United States Patent Application Publication US 2025/0074962 A1 - sequence listing, part 6

SEQ ID NO: 7211 - protein, 1997 aa, Homo sapiens
MAQRTGLEDPERYLFVDRAVIYNPATQADWTAKKLVWIPSERHGFEAASIKEERGDEVMVELAENGKKAMVNKDDIQKMNPPKFSKVEDMAELTCLNEASVLHNLKDRYYSGLIYTYSGLFCVVINPYKNLPIYSENIIEMYRGKKRHEMPPHIYAISESAYRCMLQDREDQSILCTGESGAGKTENTKKVIQYLAHVASSHKGRKDHNIPGELERQLLQANPILESFGNAKTVKNDNSSRFGKFIRINFDVTGYIVGANIETYLLEKSRAVRQAKDERTFHIFYQLLSGAGEHLKSDLLLEGFNNYRFLSNGYIPIPGQQDKDNFQETMEAMHIMGFSHEEILSMLKVVSSVLQFGNISFKKERNTDQASMPENTVAQKLCHLLGMNVMEFTRAILTPRIKVGRDYVQKAQTKEQADFAVEALAKATYERLFRWLVHRINKALDRTKRQGASFIGILDIAGFEIFELNSFEQLCINYTNEKLQQLFNHTMFILEQEEYQREGIEWNFIDFGLDLQPCIDLIERPANPPGVLALLDEECWFPKATDKTFVEKLVQEQGSHSKFQKPRQLKDKADFCIIHYAGKVDYKADEWLMKNMDPLNDNVATLLHQSSDRFVAELWKDEIQNIQRASFYDSVSGLHEPPVDRIVGLDQVTGMTETAFGSAYKTKKGMFRTVGQLYKESLTKLMATLRNTNPNFVRCIIPNHEKRAGKLDPHLVLDQLRCNGVLEGIRICRQGFPNRIVFQEFRQRYEILTPNAIPKGFMDGKQACERMIRALELDPNLYRIGQSKIFFRAGVLAHLEEERDLKITDIIIFFQAVCRGYLARKAFAKKQQQLSALKVLQRNCAAYLKLRHWQWWRVFTKVKPLLQVTRQEEELQAKDEELLKVKEKQTKVEGELEEMERKHQQLLEEKNILAEQLQAETELFAEAEEMRARLAAKKQELEEILHDLESRVEEEEERNQILQNEKKKMQAHIQDLEEQLDEEEGARQKLQLEKVTAEAKIKKMEEEILLLEDQNSKFIKEKKLMEDRIAECSSQLAEEEEKAKNLAKIRNKQEVMISDLEERLKKEEKTRQELEKAKRKLDGETTDLQDQIAELQAQIDELKLQLAKKEEELQGALARGDDETLHKNNALKVVRELQAQIAELQEDFESEKASRNKAEKQKRDLSEELEALKTELEDTLDTTAAQQELRTKREQEVAELKKALEEETKNHEAQIQDMRQRHATALEELSEQLEQAKRFKANLEKNKQGLETDNKELACEVKVLQQVKAESEHKRKKLDAQVQELHAKVSEGDRLRVELAEKASKLQNELDNVSTLLEEAEKKGIKFAKDAASLESQLQDTQELLQEETRQKLNLSSRIRQLEEEKNSLQEQQEEEEEARKNLEKQVLALQSQLADTKKKVDDDLGTIESLEEAKKKLLKDAEALSQRLEEKALAYDKLEKTKNRLQQELDDLTVDLDHQRQVASNLEKKQKKFDQLLAEEKSISARYAEERDRAEAEAREKETKALSLARALEEALEAKEEFERQNKQLRADMEDLMSSKDDVGKNVHELEKSKRALEQQVEEMRTQLEELEDELQATEDAKLRLEVNMQAMKAQFERDLQTRDEQNEEKKRLLIKQVRELEAELEDERKQRALAVASKKKMEIDLKDLEAQIEAANKARDEVIKQLRKLQAQMKDYQRELEEARASRDEIFAQSKESEKKLKSLEAEILQLQEELASSERARRHAEQERDELADEITNSASGKSALLDEKRRLEARIAQLEEELEEEQSNMELLNDRFRKTTLQVDTLNAELAAERSAAQKSDNARQQLERQNKELKAKLQELEGAVKSKFKATISALEAKIGQLEEQLEQEAKERAAANKLVRRTEKKLKEIFMQVEDERRHADQYKEQMEKANARMKQLKRQLEEAEEEATRANASRRKLQRELDDATEANEGLSREVSTLKNRLRRGGPISFSSSRSGRRQLHLEGASLELSDDDTESKTSDVNETQPPQSE

SEQ ID NO: 7212 - protein, 188 aa, Homo sapiens
MAQRTGLEDPERYLFVDRAVIYNPATQADWTAKKLVWIPSERHGFEAASIKEERGDEVMVELAENGKKAMVNKDDIQKMNPPKFSKVEDMAELTCLNEASVLHNLKDRYYSGLIYTYSGLFCVVINPYKNLPIYSENIIEMYRGKKRHEMPPHIYAISESAYRCMLQDREDQSILCTGESGAGKTENT

SEQ ID NO: 7213 - protein, 1960 aa, Homo sapiens
MAQQAADKYLYVDKNFINNPLAQADWAAKKLVWVPSDKSGFEPASLKEEVGEEAIVELVENGKKVKVNKDDIQKMNPPKFSKVEDMAELTCLNEASVLHNLKERYYSGLIYTYSGLFCVVINPYKNLPIYSEEIVEMYKGKKRHEMPPHIYAITDTAYRSMMQDREDQSILCTGESGAGKTENTKKVIQYLAYVASSHKSKKDQGELERQLLQANPILEAFGNAKTVKNDNSSRFGKFIRINFDVNGYIVGANIETYLLEKSRAIRQAKEERTFHIFYYLLSGAGEHLKTDLLLEPYNKYRFLSNGHVTIPGQQDKDMFQETMEAMRIMGIPEEEQMGLLRVISGVLQLGNIVFKKERNTDQASMPDNTAAQKVSHLLGINVTDFTRGILTPRIKVGRDYVQKAQTKEQADFAIEALAKATYERMFRWLVLRINKALDKTKRQGASFIGILDIAGFEIFDLNSFEQLCINYTNEKLQQLFNHTMFILEQEEYQREGIEWNFIDFGLDLQPCIDLIEKPAGPPGILALLDEECWFPKATDKSFVEKVMQEQGTHPKFQKPKQLKDKADFCIIHYAGKVDYKADEWLMKNMDPLNDNIATLLHQSSDKFVSELWKDVDRIIGLDQVAGMSETALPGAFKTRKGMFRTVGQLYKEQLAKLMATLRNTNPNFVRCIIPNHEKKAGKLDPHLVLDQLRCNGVLEGIRICRQGFPNRVVFQEFRQRYEILTPNSIPKGFMDGKQACVLMIKALELDSNLYRIGQSKVFFRAGVLAHLEEERDLKITDVIIGFQACCRGYLARKAFAKRQQQLTAMKVLQRNCAAYLKLRNWQWWRLFTKVKPLLQVSRQEEEMMAKEEELVKVREKQLAAENRLTEMETLQSQLMAEKLQLQEQLQAETELCAEAEELRARLTAKKQELEEICHDLEARVEEEEERCQHLQAEKKKMQQNIQELEEQLEEEESARQKLQLEKVTTEAKLKKLEEEQIILEDQNCKLAKEKKLLEDRIAEFTTNLTEEEEKSKSLAKLKNKHEAMITDLEERLRREEKQRQELEKTRRKLEGDSTDLSDQIAELQAQIAELKMQLAKKEEELQAALARVEEEAAQKNMALKKIRELESQISELQEDLESERASRNKAEKQKRDLGEELEALKTELEDTLDSTAAQQELRSKREQEVNILKKTLEEEAKTHEAQIQEMRQKHSQAVEELAEQLEQTKRVKANLEKAKQTLENERGELANEVKVLLQGKGDSEHKRKKVEAQLQELQVKFNEGERVRTELADKVTKLQVELDNVTGLLSQSDSKSSKLTKDFSALESQLQDTQELLQEENRQKLSLSTKLKQVEDEKNSFREQLEEEEEAKHNLEKQIATLHAQVADMKKKMEDSVGCLETAEEVKRKLQKDLEGLSQRHEEKVAAYDKLEKTKTRLQQELDDLLVDLDHQRQSACNLEKKQKKFDQLLAEEKTISAKYAEERDRAEAEAREKETKALSLARALEEAMEQKAELERLNKQFRTEMEDLMSSKDDVGKSVHELEKSKRALEQQVEEMKTQLEELEDELQATEDAKLRLEVNLQAMKAQFERDLQGRDEQSEEKKKQLVRQVREMEAELEDERKQRSMAVAARKKLEMDLKDLEAHIDSANKNRDEAIKQLRKLQAQMKDCMRELDDTRASREEILAQAKENEKKLKSMEAEMIQLQEELAAAERAKRQAQQERDELADEIANSSGKGALALEEKRRLEARIAQLEEELEEEQGNTELINDRLKKANLQIDQINTDLNLERSHAQKNENARQQLERQNKELKVKLQEMEGTVKSKYKASITALEAKIAQLEEQLDNETKERQAACKQVRRTEKKLKDVLLQVDDERRNAEQYKDQADKASTRLKQLKRQLEEAEEEAQRANASRRKLQRELEDATETADAMNREVSSLKNKLRRGDLPFVVPRRMARKGAGDGSDEEVDGKADGAEAKPAE

SEQ ID NO: 7214 - protein, 1382 aa, Homo sapiens
MYKGKKRHEMPPHIYAITDTAYRSMMQDREDQSILCTGESGAGKTENTKKVIQYLAYVASSHKSKKDQGELERQLLQANPILEAFGNAKTVKNDNSSRFGKFIRINFDVNGYIVGANIETYLLEKSRAIRQAKEERTFHIFYYLLSGAGEHLKTDLLLEPYNKYRFLSNGHVTIPGQQDKDMFQETMEAMRIMGIPEEEQMGLLRVISGVLQLGNIVFKKERNTDQASMPDNTAAQKVSHLLGINVTDFTRGILTPRIKVGRDYVQKAQTKEQADFAIEALAKATYERMFRWLVLRINKALDKTKRQGASFIGILDIAGFEIFDLNSFEQLCINYTNEKLQQLFNHTMFILEQEEYQREGIEWNFIDFGLDLQPCIDLIEKPAGPPGILALLDEECWFPKATDKSFVEKVMQEQGTHPKFQKPKQLKDKADFCIIHYAGKVDYKADEWLMKNMDPLNDNIATLLHQSSDKFVSELWKDVDRIIGLDQVAGMSETALPGAFKTRKGMFRTVGQLYKEQLAKLMATLRNTNPNFVRCIIPNHEKKAGKLDPHLVLDQLRCNGVLEGIRICRQGFPNRVVFQEFRQRYEILTPNSIPKGFMDGKQACVLMIKALELDSNLYRIGQSKVFFRAGVLAHLEEERDLKITDVIIGFQACCRGYLARKAFAKRQQQLTAMKVLQRNCAAYLKLRNWQWWRLFTKVKPLLQVSRQEEEMMAKEEELVKVREKQLAAENRLTEMETLQSQLMAEKLQLQEQLQAETELCAEAEELRARLTAKKQELEEICHDLEARVEEEEERCQHLQAEKKKMQQNIQELEEQLEEEESARQKLQLEKVTTEAKLKKLEEELDDLLVDLDHQRQSACNLEKKQKKFDQLLAEEKTISAKYAEERDRAEAEAREKETKALSLARALEEAMEQKAELERLNKQFRTEMEDLMSSKDDVGKSVHELEKSKRALEQQVEEMKTQLEELEDELQATEDAKLRLEVNLQAMKAQFERDLQGRDEQSEEKKKQLVRQVREMEAELEDERKQRSMAVAARKKLEMDLKDLEAHIDSANKNRDEAIKQLRKLQAQMKDCMRELDDTRASREEILAQAKENEKKLKSMEAEMIQLQEELAAAERAKRQAQQERDELADEIANSSGKGALALEEKRRLEARIAQLEEELEEEQGNTELINDRLKKANLQIDQINTDLNLERSHAQKNENARQQLERQNKELKVKLQEMEGTVKSKYKASITALEAKIAQLEEQLDNETKERQAACKQVRRTEKKLKDVLLQVDDERRNAEQYKDQADKASTRLKQLKRQLEEAEEEAQRANASRRKLQRELEDATETADAMNREVSSLKNKLRRGDLPFVVPRRMARKGAGDGSDEEVDGKADGAEAKPAE

SEQ ID NO: 7215 - protein, 562 aa, Homo sapiens
ASGTRRRWPPTTSWRRPRRGCSRSWTTCWWTWTTSARARATWRRSRRSLTSSWRRRRPSLPSMQRSATGLRRRPERRRPRLCRWPGPEEAMEQKAELERLNKQFRTEMEDLMSSKDDVGKSVHELEKSKRALEQQVEEMKTQLEELEDELQATEDAKLRLEVNLQAMKAQFERDLQGRDEQSEEKKKQLVRQVREMEAELEDERKQRSMAVAARKKLEMDLKDLEAHIDSANKNRDEAIKQLRKLQAQMKDCMRELDDTRASREEILAQAKENEKKLKSMEAEMIQLQEELAAAERAKRQAQQERDELADEIANSSGKGALALEEKRRLEARIAQLEEELEEEQGNTELINDRLKKANLQIDQINTDLNLERSHAQKNENARQQLERQNKELKVKLQEMEGTVKSKYKASITALEAKIAQLEEQLDNETKERQAACKQVRRTEKKLKDVLLQVDDERRNAEQYKDQADKASTRLKQLKRQLEEAEEEAQRANASRRKLQRELEDATETADAMNREVSSLKNKLRRGDLPFVVPRRMARKGAGDGSDEEVDGKADGAEAKPAE

SEQ ID NO: 7216 - protein, 218 aa, Homo sapiens
MAQQAADKYLYVDKNFINNPLAQADWAAKKLVWVPSDKSGFEPASLKEEVGEEAIVELVENGKKVKVNKDDIQKMNPPKFSKVEDMAELTCLNEASVLHNLKERYYSGLIYTYSGLFCVVINPYKNLPIYSEEIVEMYKGKKRHEMPPHIYAITDTAYRSMMQDREDQSILCTGESGAGKTENTKKVIQYLAYVASSHKSKKDQEAYFKNRAVRLGVL

SEQ ID NO: 7217 - protein, 103 aa, Homo sapiens
MAQQAADKYLYVDKNFINNPLAQADWAAKKLVWVPSDKSGFEPASLKEEVGEEAIVELVENGKKVKVNKDDIQKMNPPKFSKVEDMAELTCLNEASVLHNLKE

SEQ ID NO: 7218 - protein, 172 aa, Homo sapiens
MSSKRAKAKTTKKRPQRATSNVFAMFDQSQIQEFKEAFNMIDQNRDGFIDKEDLHDMLASLGKNPTDEYLEGMMSEAPGPINFTMFLTMFGEKLNGTDPEDVIRNAFACFDEEASGFIHEDHLRELLTTMGDRFTDEEVDEMYREAPIDKKGNFNYVEFTRILKHGAKDKDD

SEQ ID NO: 7219 - protein, 118 aa, Homo sapiens
MSSKRAKAKTTKKRPQRATSNVFAMFDQSQIQEFKEAFNMIDQNRDGFIDKEDLHDMLASLGFIHEDHLRELLTTMGDRFTDEEVDEMYREAPIDKKGNFNYVEFTRILKHGAKDKDD

SEQ ID NO: 7220 - protein, 308 aa, Homo sapiens
MQELTLSPGPAKLTPTLDPTHRMELILSTSPAELTLDPACQPKLPLDSTCQPEMTFNPGPTELTLDPEHQPEETPAPSLAELTLEPVHRRPELLDACADLINDQWPRSRTSRLHSLGQSSDAFPLCLMLLSPHPTLEAAPVVVGHARLSRVLNQPQSLLVETVVVARALRGRGFGRRLMEGLEVFARARGFRKLHLTTHDQVHFYTHLGYQLGEPVQGLVFTSRRLPATLLNAFPTAPSPRPPRKAPNLTAQAAPRGPKGPPLPPPPPLPECLTISPPVPSGPPSKSLLETQYQNVRGRPIFWMEKDI

SEQ ID NO: 7221 - protein, 286 aa, Homo sapiens
MELILSTSPAELTLDPACQPKLPLDSTCQPEMTFNPGPTELTLDPEHQPEETPAPSLAELTLEPVHRRPELLDACADLINDQWPRSRTSRLHSLGQSSDAFPLCLMLLSPHPTLEAAPVVVGHARLSRVLNQPQSLLVETVVVARALRGRGFGRRLMEGLEVFARARGFRKLHLTTHDQVHFYTHLGYQLGEPVQGLVFTSRRLPATLLNAFPTAPSPRPPRKAPNLTAQAAPRGPKGPPLPPPPPLPECLTISPPVPSGPPSKSLLETQYQNVRGRPIFWMEKDI

SEQ ID NO: 7222 - protein, 57 aa, Homo sapiens
MELILSTSPAELTLDPACQPKLPLDSTCQPEMTFNPGPTELTLDPEHQPEETPAPSL

SEQ ID NO: 7223 - protein, 286 aa, Homo sapiens; identical to SEQ ID NO: 7221

SEQ ID NO: 7224 - protein, 286 aa, Homo sapiens; identical to SEQ ID NO: 7221

SEQ ID NO: 7225 - protein, 86 aa, Homo sapiens
MELILSTSPAELTLDPACQPKLPLDSTCQPEMTFNPGPTELTLDPEHQPEETPAPSLAELTLEPVHRRPELLDACADLINDQWPRS

SEQ ID NO: 7226 - protein, 9 aa, Homo sapiens
MELILSTSP

SEQ ID NO: 7227 - protein, 328 aa, Homo sapiens
MAELQEVQITEEKPLLPGQTPEAAKTHSVETPYGSVTFTVYGTPKPKRPAILTYHDVGLNYKSCFQPLFQFEDMQEIIQNFVRVHVDAPGMEEGAPVFPLGYQYPSLDQLADMIPCVLQYLNFSTIIGVGVGAGAYILARYALTGLTSSIPEMILGHLFSQEELSGNSELIQKYRNIITHAPNLDNIELYWNSYNNRRDLNFERGGDITLRCPVMLVVGDQAPHEDAVVECNSKLDPTQTSFLKMADSGGQPQLTQPGKLTEAFKYFLQGMGYMASSCMTRLSRSRTASLTSAASVDGNRSRSRTLSQSSESGTLSSGPPGHTMEVSC

SEQ ID NO: 7228 - protein, 371 aa, Homo sapiens
MAELQEVQITEEKPLLPGQTPEAAKEAELAARILLDQGQTHSVETPYGSVTFTVYGTPKPKRPAILTYHDVGLNYKSCFQPLFQFEDMQEIIQNFVRVHVDAPGMEEGAPVFPLGYQYPSLDQLADMIPCVLQYLNFSTIIGVGVGAGAYILARYALNHPDTVEGLVLINIDPNAKGWMDWAAHKLTGLTSSIPEMILGHLFSQEELSGNSELIQKYRNIITHAPNLDNIELYWNSYNNRRDLNFERGGDITLRCPVMLVVGDQAPHEDAVVECNSKLDPTQTSFLKMADSGGQPQLTQPGKLTEAFKYFLQGMGYMASSCMTRLSRSRTASLTSAASVDGNRSRSRTLSQSSESGTLSSGPPGHTMEVSC

SEQ ID NO: 7229 - protein, 357 aa, Homo sapiens
MAELQEVQITEEKPLLPGQTPEAAKTHSVETPYGSVTFTVYGTPKPKRPAILTYHDVGLNYKSCFQPLFQFEDMQEIIQNFVRVHVDAPGMEEGAPVFPLGYQYPSLDQLADMIPCVLQYLNFSTIIGVGVGAGAYILARYALNHPDTVEGLVLINIDPNAKGWMDWAAHKLTGLTSSIPEMILGHLFSQEELSGNSELIQKYRNIITHAPNLDNIELYWNSYNNRRDLNFERGGDITLRCPVMLVVGDQAPHEDAVVECNSKLDPTQTSFLKMADSGGQPQLTQPGKLTEAFKYFLQGMGYMASSCMTRLSRSRTASLTSAASVDGNRSRSRTLSQSSESGTLSSGPPGHTMEVSC

SEQ ID NO: 7230 - protein, 357 aa, Homo sapiens; identical to SEQ ID NO: 7229

SEQ ID NO: 7231 - protein, 341 aa, Homo sapiens
MAELQEVQITEEKPLLPGQTPEAAKTHSVETPYGSVTFTVYGTPKPKRPAILTYHDVGLNYKSCFQPLFQFEDMQEIIQNFVRVHVDAPGMEEGAPVFPLGYQYPSLDQLADMIPCVLQYLNFSTIIGVGVGAGAYILARYALNHPDTVEGLVLINIDPNAKGWMDWAAHKLTGLTSSIPEMILGHLFSQEELSGNSELIQKYRNIITHAPNLDNIELYWNSYNNRRDLNFERGGDITLRCPVMLVVGDQAPHEDAVMADSGGQPQLTQPGKLTEAFKYFLQGMGYMASSCMTRLSRSRTASLTSAASVDGNRSRSRTLSQSSESGTLSSGPPGHTMEVSC

SEQ ID NO: 7232 - protein, 360 aa, Homo sapiens
MAELQEVQITEEKPLLPGQTPEAAKEAELAARILLDQGQTHSVETPYGSVTFTVYGTPKPKRPAILTYHDVGLNYKSCFQPLFQFEDMQEIIQNFVRVHVDAPGMEEGAPVFPLGYQYPSLDQLADMIPCVLQYLNFSTIIGVGVGAGAYILARYALNHPDTVEGLVLINIDPNAKGWMDWAAHKLTGLTSSIPEMILGHLFSQEELSGNSELIQKYRNIITHAPNLDNIELYWNSYNNRRDLNFERGGDITLRCPVMLVVECNSKLDPTQTSFLKMADSGGQPQLTQPGKLTEAFKYFLQGMGYMASSCMTRLSRSRTASLTSAASVDGNRSRSRTLSQSSESGTLSSGPPGHTMEVSC

SEQ ID NO: 7233 - protein, 371 aa, Homo sapiens; identical to SEQ ID NO: 7228

SEQ ID NO: 7234 - protein, 371 aa, Homo sapiens; identical to SEQ ID NO: 7228

SEQ ID NO: 7235 - protein, 328 aa, Homo sapiens; identical to SEQ ID NO: 7227

SEQ ID NO: 7236 - protein, 341 aa, Homo sapiens; identical to SEQ ID NO: 7231

SEQ ID NO: 7237 - protein, 371 aa, Homo sapiens; identical to SEQ ID NO: 7228

SEQ ID NO: 7238 - protein, 367 aa, Homo sapiens
MENGGSMQATMAELQEVQITEEKPLLPGQTPEAAKTHSVETPYGSVTFTVYGTPKPKRPAILTYHDVGLNYKSCFQPLFQFEDMQEIIQNFVRVHVDAPGMEEGAPVFPLGYQYPSLDQLADMIPCVLQYLNFSTIIGVGVGAGAYILARYALNHPDTVEGLVLINIDPNAKGWMDWAAHKLTGLTSSIPEMILGHLFSQEELSGNSELIQKYRNIITHAPNLDNIELYWNSYNNRRDLNFERGGDITLRCPVMLVVGDQAPHEDAVVECNSKLDPTQTSFLKMADSGGQPQLTQPGKLTEAFKYFLQGMGYMASSCMTRLSRSRTASLTSAASVDGNRSRSRTLSQSSESGTLSSGPPGHTMEVSC

SEQ ID NO: 7239 - protein, 167 aa, Homo sapiens
MAELQEVQITEEKPLLPGQTPEAAKTHSVETPYGSVTFTVYGTPKPKRPAILTYHDVGLNYKSCFQPLFQFEDMQEIIQNFVRVHVDAPGMEEGAPVFPLGYQYPSLDQLADMIPCVLQYLNFSTIIGVGVGAGAYILARYALNHPDTVEGLVLINIDPNAKGWMDW

SEQ ID NO: 7240 - protein, 357 aa, Homo sapiens; identical to SEQ ID NO: 7229

SEQ ID NO: 7241 - protein, 173 aa, Homo sapiens
MAELQEVQITEEKPLLPGQTPEAAKEAELAARILLDQGQTHSVETPYGSVTFTVYGTPKPKRPAILTYHDVGLNYKSCFQPLFQFEDMQEIIQNFVRVHVDAPGMEEGAPVFPLGYQYPSLDQLADMIPCVLQYLNFSTIIGVGVGAGAYILARYALNHPDTVEGLVLINIDP

SEQ ID NO: 7242 - protein, 252 aa, Homo sapiens
MAELQEVQITEEKPLLPGQTPEAAKEAELAARILLDQGQTHSVETPYGSVTFTVYGTPKPKRPAILTYHDVGLNYKSCFQPLFQFEDMQEIIQNFVRVHVDAPGMEEGAPVFPLGYQYPSLDQLADMIPCVLQYLNFSTIIGVGVGAGAYILARYALNHPDTVEGLVLINIDPNAKGWMDWAAHKLTGLTSSIPEMILGHLFSQEELSGNSELIQKYRNIITHAPNLDNIELYWNSYNNRRDLNFERGGDIT

SEQ ID NO: 7243 - protein, 174 aa, Homo sapiens
MAELQEVQITEEKPLLPGQTPEAAKTHSVETPYGSVTFTVYGTPKPKRPAILTYHDVGLNYKSCFQPLFQFEDMQEIIQNFVRVHVDAPGMEEGAPVFPLGYQYPSLDQLADMIPCVLQYLNFSTIIGVGVGAGAYILARYALNHPDTVEGLVLINIDPNAKGWMDWAAHKLTG

SEQ ID NO: 7244 - protein, 357 aa, Homo sapiens; identical to SEQ ID NO: 7229

SEQ ID NO: 7245 - protein, 149 aa, Homo sapiens
MAELQEVQITEEKPLLPGQTPEAAKEAELAARILLDQGQTHSVETPYGSVTFTVYGTPKPKRPAILTYHDVGLNYKSCFQPLFQFEDMQEIIQNFVRVHVDAPGMEEGAPVFPLGYQYPSLDQLADMIPCVLQYLNFSTIIGVGVGAGA

SEQ ID NO: 7246 - protein, 86 aa, Homo sapiens
MAELQEVQITEEKPLLPGQTPEAAKEAELAARILLDQGQTHSVETPYGSVTFTVYGTPKPKRPAILTYHDVGLNYKSCFQPLFQFE

SEQ ID NO: 7247 - protein, 129 aa, Homo sapiens
MAELQEVQITEEKPLLPGQTPEAAKEAELAARILLDQGQTHSVETPYGSVTFTVYGTPKPKRPAILTYHDVGLNYKSCFQPLFQFEDMQEIIQNFVRVHVDAPGMEEGAPVFPLGYQYPSLDQLADMIP

SEQ ID NO: 7248 - protein, 148 aa, Homo sapiens
MAELQEVQITEEKPLLPGQTPEAAKEAELAARILLDQGQTHSVETPYGSVTFTVYGTPKPKRPAILTYHDVGLNYKSCFQPLFQFEDMQEIIQNFVRVHVDAPGMEEGAPVFPLGYQYPSLDQLADMIPCVLQYLNFSTIIGVGVGAG

SEQ ID NO: 7249 - protein, 134 aa, Homo sapiens
MAELQEVQITEEKPLLPGQTPEAAKTHSVETPYGSVTFTVYGTPKPKRPAILTYHDVGLNYKSCFQPLFQFEDMQEIIQNFVRVHVDAPGMEEGAPVFPLGYQYPSLDQLADMIPCVLQYLNFSTIIGVGVGAG

SEQ ID NO: 7250 - protein, 108 aa, Homo sapiens
MAELQEVQITEEKPLLPGQTPEAAKTHSVETPYGSVTFTVYGTPKPKRPAILTYHDVGLNYKSCFQPLFQFEDMQEIIQNFVRVHVDAPGMEEGAPVFPLGYQYPSLD

SEQ ID NO: 7251 - protein, 120 aa, Homo sapiens
MAELQEVQITEEKPLLPGQTPEAAKTHSVETPYGSVTFTVYGTPKPKRPAILTYHDVGLNYKSCFQPLFQFEDMQEIIQNFVRVHVDAPGMEEGAPVFPLGYQYPSLDQLADMIPCVLQY

SEQ ID NO: 7252 - protein, 99 aa, Homo sapiens
MAELQEVQITEEKPLLPGQTPEAAKEAELAARILLDQGQTHSVETPYGSVTFTVYGTPKPKRPAILTYHDVGLNYKSCFQPLFQFEDMQEIIQNFVRVH

SEQ ID NO: 7253 - protein, 92 aa, Homo sapiens
MAELQEVQITEEKPLLPGQTPEAAKTHSVETPYGSVTFTVYGTPKPKRPAILTYHDVGLNYKSCFQPLFQFEDMQEIIQNFVRVHVDAPGME

SEQ ID NO: 7254 - protein, 153 aa, Homo sapiens
MAELQEVQITEEKPLLPGQTPEAAKTHSVETPYGSVTFTVYGTPKPKRPAILTYHDVGLNYKSCFQPLFQFEDMQEIIQNFVRVHVDAPGMEEGAPVFPLGYQYPSLDQLADMIPCVLQYLNFSTIIGVGVGAGAYILARYALNHPDTVEGLV

SEQ ID NO: 7255 - protein, 357 aa, Homo sapiens; identical to SEQ ID NO: 7229

SEQ ID NO: 7256 - protein, 194 aa, Homo sapiens
MAELQEVQITEEKPLLPGQTPEAAKEAELAARILLDQGQTHSVETPYGSVTFTVYGTPKPKRPAILTYHDVGLNYKSCFQPLFQFEDMQEIIQNFVRVHVDAPGMEEGAPVFPLGYQYPSLDQLADMIPCVLQYLNFSTIIGVGVGAGAYILARYALNHPDTVEGLVLINIDPNAKGWMDWAAHKLTGLTSSIP

SEQ ID NO: 7257 - protein, 128 aa, Homo sapiens
MAELQEVQITEEKPLLPGQTPEAAKTHSVETPYGSVTFTVYGTPKPKRPAILTYHDVGLNYKSCFQPLFQFEDMQEIIQNFVRVHVDAPGMEEGAPVFPLGYQYPSLDQLADMIPCVLQYLNFSTIIG

SEQ ID NO: 7258 - protein, 219 aa, Homo sapiens
MAELQEVQITEEKPLLPGQTPEAAKEAELAARILLDQGQTHSVETPYGSVTFTVYGTPKPKRPAILTYHDVGLNYKSCFQPLFQFEDMQEIIQNFVRVHVDAPGMEEGAPVFPLGYQYPSLDQLADMIPCVLQYLNFSTIIGVGVGAGAYILARYALNHPDTVEGLVLINIDPNAKGWMDWAAHKLTGLTSSIPEMILGHLFSQEELSGNSELIQKYRN

SEQ ID NO: 7259 - protein, 221 aa, Homo sapiens
MAELQEVQITEEKPLLPGQTPEAAKTHSVETPYGSVTFTVYGTPKPKRPAILTYHDVGLNYKSCFQPLFQFEDMQEIIQNFVRVHVDAPGMEEGAPVFPLGYQYPSLDQLADMIPCVLQYLNFSTIIGVGVGAGAYILARYALNHPDTVEGLVLINIDPNAKGWMDWAAHKLTGLTSSIPEMILGHLFSQEELSGNSELIQKYRNIITHAPNLDNIELYWN

SEQ ID NO: 7260 - protein, 371 aa, Homo sapiens; identical to SEQ ID NO: 7228

SEQ ID NO: 7261 - protein, 143 aa, Homo sapiens
MAELQEVQITEEKPLLPGQTPEAAKTHSVETPYGSVTFTVYGTPKPKRPAILTYHDVGLNYKSCFQPLFQFEDMQEIIQNFVRVHVDAPGMEEGAPVFPLGYQYPSLDQLADMIPCVLQYLNFSTIIGVGVGAGAYILARYAL

SEQ ID NO: 7262 - protein, 160 aa, Homo sapiens
MAELQEVQITEEKPLLPGQTPEAAKTHSVETPYGSVTFTVYGTPKPKRPAILTYHDVGLNYKSCFQPLFQFEDMQEIIQNFVRVHVDAPGMEEGAPVFPLGYQYPSLDQLADMIPCVLQYLNFSTIIGVGVGAGAYILARYALNHPDTVEGLVLINIDPN

SEQ ID NO: 7263 - protein, 141 aa, Homo sapiens
MAELQEVQITEEKPLLPGQTPEAAKEAELAARILLDQGQTHSVETPYGSVTFTVYGTPKPKRPAILTYHDVGLNYKSCFQPLFQFEDMQEIIQNFVRVHVDAPGMEEGAPVFPLGYQYPSLDQLADMIPCVLQYLNFSTII

SEQ ID NO: 7264 - protein, 118 aa, Homo sapiens
MAELQEVQITEEKPLLPGQTPEAAKEAELAARILLDQGQTHSVETPYGSVTFTVYGTPKPKRPAILTYHDVGLNYKSCFQPLFQFEDMQEIIQNFVRVHVDAPGMEEGAPVFPLGYQY

SEQ ID NO: 7265 - protein, 140 aa, Homo sapiens
MAELQEVQITEEKPLLPGQTPEAAKEAELAARILLDQGQTHSVETPYGSVTFTVYGTPKPKRPAILTYHDVGLNYKSCFQPLFQFEDMQEIIQNFVRVHVDAPGMEEGAPVFPLGYQYPSLDQLADMIPCVLQYLNFSTI

SEQ ID NO: 7266 - protein, 144 aa, Homo sapiens
MAELQEVQITEEKPLLPGQTPEAAKTHSVETPYGSVTFTVYGTPKPKRPAILTYHDVGLNYKSCFQPLFQFEDMQEIIQNFVRVHVDAPGMEEGAPVFPLGYQYPSLDQLADMIPCVLQYLNFSTIIGVGVGAGAYILARYALN

SEQ ID NO: 7267 - protein, 153 aa, Homo sapiens; identical to SEQ ID NO: 7254

SEQ ID NO: 7268 - protein, 224 aa, Homo sapiens
MAELQEVQITEEKPLLPGQTPEAAKTHSVETPYGSVTFTVYGTPKPKRPAILTYHDVGLNYKSCFQPLFQFEDMQEIIQNFVRVHVDAPGMEEGAPVFPLGYQYPSLDQLADMIPCVLQYLNFSTIIGVGVGAGAYILARYALNHPDTVEGLVLINIDPNAKGWMDWAAHKLTGLTSSIPEMILGHLFSQEELSGNSELIQKYRNIITHAPNLDNIELYWNSYN

SEQ ID NO: 7269 - protein, 150 aa, Homo sapiens
MAELQEVQITEEKPLLPGQTPEAAKTHSVETPYGSVTFTVYGTPKPKRPAILTYHDVGLNYKSCFQPLFQFEDMQEIIQNFVRVHVDAPGMEEGAPVFPLGYQYPSLDQLADMIPCVLQYLNFSTIIGVGVGAGAYILARYALNHPDTVE

SEQ ID NO: 7270 - protein, 127 aa, Homo sapiens
MAELQEVQITEEKPLLPGQTPEAAKTHSVETPYGSVTFTVYGTPKPKRPAILTYHDVGLNYKSCFQPLFQFEDMQEIIQNFVRVHVDAPGMEEGAPVFPLGYQYPSLDQLADMIPCVLQYLNFSTII

SEQ ID NO: 7271 - protein, 149 aa, Homo sapiens
MAELQEVQITEEKPLLPGQTPEAAKTHSVETPYGSVTFTVYGTPKPKRPAILTYHDVGLNYKSCFQPLFQFEDMQEIIQNFVRVHVDAPGMEEGAPVFPLGYQYPSLDQLADMIPCVLQYLNFSTIIGVGVGAGAYILARYALNHPDTV

SEQ ID NO: 7272 - protein, 375 aa, Homo sapiens
MDELQDVQLTEIKPLLNDKNGTRNFQDFDCQEHDIETTHGVVHVTIRGLPKGNRPVILTYHDIGLNHKSCFNAFFNFEDMQEITQHFAVCHVDAPGQQEGAPSFPTGYQYPTMDELAEMLPPVLTHLSLKSIIGIGVGAGAYILSRFALNHPELVEGLVLINVDPCAKGWIDWAASKLSGLTTNVVDIILAHHFGQEELQANLDLIQTYRMHIAQDINQDNLQLFLNSYNGRRDLEIERPILGQNDNKSKTLKCSTLLVVGDNSPAVEAVVECNSRLNPINTTLLKMADCGGLPQVVQPGKLTEAFKYFLQGMGYIPSASMTRLARSRTHSTSSSLGSGESPFSRSVTSNQSDGTQESCESPDVLDRHQTMEVSC

SEQ ID NO: 7273 - protein, 363 aa, Homo sapiens
MDELQDVQLTEIKPLLNDKEHDIETTHGVVHVTIRGLPKGNRPVILTYHDIGLNHKSCFNAFFNFEDMQEITQHFAVCHVDAPGQQEGAPSFPTGYQYPTMDELAEMLPPVLTHLSLKSIIGIGVGAGAYILSRFALNHPELVEGLVLINVDPCAKGWIDWAASKLSGLTTNVVDIILAHHFGQEELQANLDLIQTYRMHIAQDINQDNLQLFLNSYNGRRDLEIERPILGQNDNKSKTLKCSTLLVVGDNSPAVEAVVECNSRLNPINTTLLKMADCGGLPQVVQPGKLTEAFKYFLQGMGYIPSASMTRLARSRTHSTSSSLGSGESPFSRSVTSNQSDGTQESCESPDVLDRHQTMEVSC

SEQ ID NO: 7274 - protein, 280 aa, Homo sapiens
MVQETSRTLTVRYQYPTMDELAEMLPPVLTHLSLKSIIGIGVGAGAYILSRFALNHPELVEGLVLINVDPCAKGWIDWAASKLSGLTTNVVDIILAHHFGQEELQANLDLIQTYRMHIAQDINQDNLQLFLNSYNGRRDLEIERPILGQNDNKSKTLKCSTLLVVGDNSPAVEAVVECNSRLNPINTTLLKMADCGGLPQVVQPGKLTEAFKYFLQGMGYIPSASMTRLARSRTHSTSSSLGSGESPFSRSVTSNQSDGTQESCESPDVLDRHQTMEVSC

SEQ ID NO: 7275 - protein, 271 aa, Homo sapiens [sequence omitted]

SEQ ID NO: 7276 - protein, 139 aa, Homo sapiens
MPEGPELHLASQFVNEACRALVFGGCVEKSSVSRNPEVPFESSAYRISASARGKELRLILSPLPGAQPQQEPRAPRGAATPCPPALLHGPAWPPARPMFRGHPPVRPLGPWGKVAAGPRALCLAGVPAVQGECATKPSG

SEQ ID NO: 7277 - protein, 390 aa, Homo sapiens
MPEGPELHLASQFVNEACRALVFGGCVEKSSVSRNPEVPFESSAYRISASARGKELRLILSPLPGAQPQQEPLALVFRFGMSGSFQLVPREELPRHAHLRFYTAPPGPRLALCFVDIRRFGRWDLGGKWQPGRGPCVLQEYQQFRENVLRNLADKAFDRPICEALLDQRFFNGIGNYLRAEILYRLKIPPFEKARSVLEALQQHRPSPELTLSQKIRTKLQNPDLLELCHSVPKEVVQLGGKGYGSESGEEDFAAFRAWLRCYGMPGMSSLQDRHGRTIWFQGDPGPLAPKGRKSRKKKSKATQLSPEDRVEDALPPSKAPSRTRRAKRDLPKRTATQRPEGTSLQQDPEAPTVPKKGRRKGRQAASGHCRPRKVKADIPSLEPEGTSAS

SEQ ID NO: 7278 - protein, 390 aa, Homo sapiens; identical to SEQ ID NO: 7277

SEQ ID NO: 7279 - protein, 332 aa, Homo sapiens
MPEGPLVRKFHHLVSPFVGQQVVKTGGSSKKLQPASLQSLWLQDTQVHGKKLFLRFDLDEEMGPPGSSPTPEPPQKEVQKEGAADPKQVGEPSGQKTLDGSSRSAELVPQGEDDSEYLERDAPAGDAGRWLRVSFGLFGSVWVNDFSRAKKANKRGDWRDPSPRLVLHFGGGGFLAFYNCQLSWSSSPVVTPTCDILSEKFHRGQALEALGQAQPVCYTLLDQRYFSGLGNIIKNEALYRAGIHPLSLGSVLSASRREVLVDHVVEFSTAWLQGKFQGRPQHTQVYQKEQCPAGHQVMKEAFGPEDGLQRLTWWCPQCQPQLSEEPEQCQFS

SEQ ID NO: 7280 - protein, 317 aa, Homo sapiens
MPEGPLVRKFHHLVSPFVGQQVVKTGGSSKKLQPASLQSLWLQDTQVHGKKLFLRFDLDEEMGPPGSSPTPEPPQKEVQKKTLDGSSRSAELVPQGEDDSEYLERDAPAGDAGRWLRVSFGLFGSVWVNDFSRAKKANKRGDWRDPSPRLVLHFGGGGFLAFYNCQLSWSSSPVVTPTCDILSEKFHRGQALEALGQAQPVCYTLLDQRYFSGLGNIIKNEALYRAGIHPLSLGSVLSASRREVLVDHVVEFSTAWLQGKFQGRPQHTQVYQKEQCPAGHQVMKEAFGPEDGLQRLTWWCPQCQPQLSEEPEQCQFS

SEQ ID NO: 7281 - protein, 271 aa, Homo sapiens
MGPPGSSPTPEPPQKEVQKEGAADPKQVGEPSGQKTLDGSSRSAELVPQGEDDSEYLERDAPAGDAGRWLRVSFGLFGSVWVNDFSRAKKANKRGDWRDPSPRLVLHFGGGGFLAFYNCQLSWSSSPVVTPTCDILSEKFHRGQALEALGQAQPVCYTLLDQRYFSGLGNIIKNEALYRAGIHPLSLGSVLSASRREVLVDHVVEFSTAWLQGKFQGRPQHTQVYQKEQCPAGHQVMKEAFGPEDGLQRLTWWCPQCQPQLSEEPEQCQFS

SEQ ID NO: 7282 - protein, 332 aa, Homo sapiens; identical to SEQ ID NO: 7279

SEQ ID NO: 7283 - protein, 332 aa, Homo sapiens; identical to SEQ ID NO: 7279

SEQ ID NO: 7284 - protein, 216 aa, Homo sapiens
MPEGPLVRKFHHLVSPFVGQQVVKTGGSSKKLQPASLQSLWLQDTQVRLVLHFGGGGFLAFYNCQLSWSSSPVVTPTCDILSEKFHRGQALEALGQAQPVCYTLLDQRYFSGLGNIIKNEALYRAGIHPLSLGSVLSASRREVLVDHVVEFSTAWLQGKFQGRPQHTQVYQKEQCPAGHQVMKEAFGPEDGLQRLTWWCPQCQPQLSEEPEQCQFS

SEQ ID NO: 7285 - protein, 605 aa, Homo sapiens
MVEGPGCTLNGEKIRARVLPGQAVTGVRGSALRSLQGRALRLAASTVVVSPQAAALNNDSSQNVLSLFNGYVYSGVETLGKELFMYFGPKALRIHFGMKGFIMINPLEYKYKNGASPVLEVQLTKDLICFFDSSVELRNSMESQQRIRMMKELDVCSPEFSFLRAESEVKKQKGRMLGDVLMDQNVLPGVGNIIKNEALFDSGLHPAVKVCQLTDEQIHHLMKMIRDFSILFYRCRKAGLALSKHYKVYKRPNCGQCHCRITVCRFGDNNRMTYFCPHCQKENPQHVDICKLPTRNTIISWTSSRVDHVMDSVARKSEEHWTCVVCTLINKPSSKACDACLTSRPIDSVLKSEENSTVFSHLMKYPCNTFGKPHTEVKINRKTAFGTTTLVLTDFSNKSSTLERKTKQNQILDEEFQNSPPASVCLNDIQHPSKKTTNDITQPSSKVNISPTISSESKLFSPAHKKPKTAQYSSPELKSCNPGYSNSELQINMTDGPRTLNPDSPRCSKHNRLCILRVVGKDGENKGRQFYACPLPREAQCGFFEWADLSFPFCNHGKRSTMKTVLKIGPNNGKNFFVCPLGKEKQCNFFQWAENGPGIKIIPGC

SEQ ID NO: 7286 - protein, 580 aa, Homo sapiens
MPGWPWGLLLTAGTLFAALSPGPPAPADPCHDEGGAPRGCVPGLVNAALGREVLASSTCGRPATRACDASDPRRAHSPALLTSPGGTASPLCWRSESLPRAPLNVTLTVPLGKAFELVFVSLRFCSAPPASVALLKSQDHGRSWAPLGFFSSHCDLDYGRLPAPANGPAGPGPEALCFPAPLAQPDGSGLLAFSMQDSSPPGLDLDSSPVLQDWVTATDVRVVLTRPSTAGDPRDMEAVVPYSYAATDLQVGGRCKCNGHASRCLLDTQGHLICDCRHGTEGPDCGRCKPFYCDRPWQRATARESHACLACSCNGHARRCRFNMELYRLSGRRSGGVCLNCRHNTAGRHCHYCREGFYRDPGRALSDRRACRACDCHPVGAAGKTCNQTTGQCPCKDGVTGLTCNRCAPGFQQSRSPVAPCVKTPIPGPTEDSSPVQPQDCDSHCKPARGSYRISLKKFCKKDYAVQVAVGARGEARGAWTRFPVAVLAVFRSGEERARRGSSALWVPAGDAACGCPRLLPGRRYLLLGGGPGAAAGGAGGRGPGLIAARGSLVLPWRDAWTRRLRRLQRRERRGRCSAA

SEQ ID NO: 7287 - protein, 848 aa, Homo sapiens
LFCFVFSVSLQVDIVPSQGEISVGESKFFLCQVAGDAKDKDISWFSPNGEKLTPNQQRISVVWNDDSSSTLTIYNANIDDAGIYKCVVTGEDGSESEATVNVKIFQKLMFKNAPTPQEFREGEDAVIVCDVVSSLPPTIIWKHKGRDVILKKDVRFIVLSNNYLQIRGIKKTDEGTYRCEGRILARGEINFKDIQVIVNVPPTIQARQNIVNATANLGQSVTLVCDAEGFPEPTMSWTKDGEQIEQEEDDEKYIFSDDSSQLTIKKVDKNDEAEYICIAENKAGEQDATIHLKVFAKPKITYVENQTAMELEEQVTLTCEASGDPIPSITWRTSTRNISSEEKASWTRPEKQETLDGHMVVRSHARVSSLTLKSIQYTDAGEYICTASNTIGQDSQSMYLEVQYAPKLQGPVAVYTWEGNQVNITCEVFAYPSATISWFRDGQLLPSSNYSNIKIYNTPSASYLEVTPDSENDFGNYNCTAVNRIGQESLEFILVQADTPSSPSIDQVEPYSSTAQVQFDEPEATGGVPILKYKAEWRAVGEEVWHSKWYDAKEASMEGIVTIVGLKPETTYAVRLAALNGKGLGEISAASEFKTQPVPGEPSAPKLEGQMGEDGNSIKVNLIKQDDGGSPIRHYLVRYRALSSEWKPEIRLPSGSDHVMLKSLDWNAEYEVYVVAENQQGKSKAAHFVFRTSAQPTAIPANGSPTSGLSTGAIVGILIVIFVLLLVVVDITCYFLNKCGLFMCIAVNLCGKAGPGAKGKDMEEGKAAFSKDESKEPIVEVRTEEERTPNHDGGKHTEPNETTPLTEPEKGPVEAKPECQETETKPAPAEVKTVPNDATQTKENESKA

SEQ ID NO: 7288 - protein, 664 aa, Homo sapiens
ITIRDEIWVLFCFVFSVSLQVDIVPSQGEISVGESKFFLCQVAGDAKDKDISWFSPNGEKLTPNQQRISVVWNDDSSSTLTIYNANIDDAGIYKCVVTGEDGSESEATVNVKIFQKLMFKNAPTPQEFREGEDAVIVCDVVSSLPPTIIWKHKGRDVILKKDVRFIVLSNNYLQIRGIKKTDEGTYRCEGRILARGEINFKDIQVIVNVPPTIQARQNIVNATANLGQSVTLVCDAEGFPEPTMSWTKDGEQIEQEEDDEKYIFSDDSSQLTIKKVDKNDEAEYICIAENKAGEQDATIHLKVFAKPKITYVENQTAMELEEQVTLTCEASGDPIPSITWRTSTRNISSEEKASWTRPEKQETLDGHMVVRSHARVSSLTLKSIQYTDAGEYICTASNTIGQDSQSMYLEVQYAPKLQGPVAVYTWEGNQVNITCEVFAYPSATISWFRDGQLLPSSNYSNIKIYNTPSASYLEVTPDSENDFGNYNCTAVNRIGQESLEFILVQADTPSSPSIDQVEPYSSTAQVQFDEPEATGGVPILKYKAEWRAVGEEVWHSKWYDAKEASMEGIVTIVGLKPETTYAVRLAALNGKGLGEISAASEFKTQPVQAPPPTASASSSTPVPLSPPDTTWPLPALATTEPAKNIAQNHCCNMFQAGLHNALMK

SEQ ID NO: 7289 - protein, 313 aa, Homo sapiens
MEGIVTIVGLKPETTYAVRLAALNGKGLGEISAASEFKTQPVHSPPPPASASSSTPVPLSPPDTGEPSAPKLEGQMGEDGNSIKVNLIKQDDGGSPIRHYLVRYRALSSEWKPEIRLPSGSDHVMLKSLDWNAEYEVYVVAENQQGKSKAAHFVFRTSAQPTAIPANGSPTSGLSTGAIVGILIVIFVLLLVVVDITCYFLNKCGLFMCIAVNLCGKAGPGAKGKDMEEGKAAFSKDESKEPIVEVRTEEERTPNHDGGKHTEPNETTPLTEPEKGPVEAKPECQETETKPAPAEVKTVPNDATQTKENESKA

SEQ ID NO: 7290 - protein, 189 aa, Homo sapiens
MTEYKLVVVGAGGVGKSALTIQLIQNHFVDEYDPTIEDSYRKQVVIDGETCLLDILDTAGQEEYSAMRDQYMRTGEGFLCVFAINNSKSFADINLYREQIKRVKDSDDVPMVLVGNKCDLPTRTVDTKQAHELAKSYGIPFIETSAKTRQGVEDAFYTLVREIRQYRMKKLNSSDDGTQGCMGLPCVVM

SEQ ID NO: 7291 - protein, 216 aa, Homo sapiens
MPGNLMSQTSRAVSIWKFPAKLGKTHGHRALEATGMMLRVLVGAVLPAMLLAAPPPINKLALFPDKSAWCEAKNITQIVGHSGCEAKSIQNRACLGQCFSYSVPNTFPQSTESLVHCDSCMPAQSMWEIVTLECPGHEEVPRVDKLVEKILHCSCQACGKEPSHEGLSVYVQGEDGPGSQPGTHPHPHPHPHPGGQTPEPEDPPGAPHTEEEGAED

SEQ ID NO: 7292 - protein, 181 aa, Homo sapiens
MMLRVLVGAVLPAMLLAAPPPINKLALFPDKSAWCEAKNITQIVGHSGCEAKSIQNRACLGQCFSYSVPNTFPQSTESLVHCDSCMPAQSMWEIVTLECPGHEEVPRVDKLVEKILHCSCQACGKEPSHEGLSVYVQGEDGPGSQPGTHPHPHPHPHPGGQTPEPEDPPGAPHTEEEGAED

SEQ ID NO: 7293 - protein, 116 aa, Homo sapiens
MMLRVLVGAVLPAMLLAAPPPINKLALFPDKSAWCEAKNITQIVGHSGCEAKSIQNRACLGQCFSYSVPNTFPQSTESLVHCDSCMPAQSMWEIVTLECPGHEEVPRVDKLVEKIL

SEQ ID NO: 7294 - protein, 163 aa, Homo sapiens
MLRVLVGAVLPAMLLAAPPPINKLALFPDKSAWCEAKNITQIVGHSGCEAKSIQNRACLGQCFSYSVPNTFPQSTESLVHCDSCMPAQSMWEIVTLECPGHEEVPRVDKLVEKILHCSCQACGKEPSHEGLSVYVQGEDGPGSQPGTHPHPHPHPHPGGQTPE

SEQ ID NO: 7295 - protein, 117 aa, Homo sapiens
MMLRVLVGAVLPAMLLAAPPPINKLALFPDKSAWCEAKNITQIVGHSGCEAKSIQNRACLGQCFSYSVPNTFPQSTESLVHCDSCMPAQSMWEIVTLECPGHEEVPRVDKLVEKILH

SEQ ID NO: 7296 - protein, 109 aa, Homo sapiens
MMLRVLVGAVLPAMLLAAPPPINKLALFPDKSAWCEAKNITQIVGHSGCEAKSIQNRACLGQCFSYSVPNTFPQSTESLVHCDSCMPAQSMWEIVTLECPGHEEVPRVD

SEQ ID NO: 7297 - protein, 128 aa, Homo sapiens
MMLRVLVGAVLPAMLLAAPPPINKLALFPDKSAWCEAKNITQIVGHSGCEAKSIQNRACLGQCFSYSVPNTFPQSTESLVHCDSCMPAQSMWEIVTLECPGHEEVPRVDKLVEKILHCSCQACGKEPS

SEQ ID NO: 7298 - protein, 180 aa, Homo sapiens
MLRVLVGAVLPAMLLAAPPPINKLALFPDKSAWCEAKNITQIVGHSGCEAKSIQNRACLGQCFSYSVPNTFPQSTESLVHCDSCMPAQSMWEIVTLECPGHEEVPRVDKLVEKILHCSCQACGKEPSHEGLSVYVQGEDGPGSQPGTHPHPHPHPHPGGQTPEPEDPPGAPHTEEEGAED

SEQ ID NO: 7299 - protein, 2818 aa, Homo sapiens
MAAHRPVEWVQAVVSRFDEQLPIKTGQQNTHTKVSTEHNKECLINISKYKFSLVISGLTTILKNVNNMRIFGEAAEKNLYLSQLIILDTLEKCLAGQPKDTMRLDETMLVKQLLPEICHFLHTCREGNQHAAELRNSASGVLFSLSCNNFNAVFSRISTRLQELTVCSEDNVDVHDIELLQYINVDCAKLKRLLKETAFKFKALKKVAQLAVINSLEKAFWNWVENYPDEFTKLYQIPQTDMAECAEKLFDLVDGFAESTKRKAAVWPLQIILLILCPEIIQDISKDVVDENNMNKKLFLDSLRKALAGHGGSRQLTESAAIACVKLCKASTYINWEDNSVIFLLVQSMVVDLKNLLFNPSKPFSRGSQPADVDLMIDCLVSCFRISPHNNQHFKICLAQNSPSTFHYVLVNSLHRIITNSALDWWPKIDAVYCHSVELRNMFGETLHKAVQGCGAHPAIRMAPSLTFKEKVTSLKFKEKPTDLETRSYKYLLLSMVKLIHADPKLLLCNPRKQGPETQGSTAELITGLVQLVPQSHMPEIAQEAMEALLVLHQLDSIDLWNPDAPVETFWEISSQMLFYICKKLTSHQMLSSTEILKWLREILICRNKFLLKNKQADRSSCHFLLFYGVGCDIPSSGNTSQMSMDHEELLRTPGASLRKGKGNSSMDSAAGCSGTPPICRQAQTKLEVALYMFLWNPDTEAVLVAMSCFRHLCEEADIRCGVDEVSVHNLLPNYNTFMEFASVSNMMSTGRAALQKRVMALLRRIEHPTAGNTEAWEDTHAKWEQATKLILNYPKAKMEDGQAAESLHKTIVKRRMSHVSGGGSIDLSDTDSLQEWINMTGFLCALGGVCLQQRSNSGLATYSPPMGPVSERKGSMISVMSSEGNADTPVSKFMDRLLSLMVCNHEKVGLQIRTNVKDLVGLELSPALYPMLFNKLKNTISKFFDSQGQVLLTDTNTQFVEQTIAIMKNLLDNHTEGSSEHLGQASIETMMLNLVRYVRVLGNMVHAIQIKTKLCQLVEVMMARRDDLSFCQEMKFRNKMVEYLTDWVMGTSNQAADDDVKCLTRDLDQASMEAVVSLLAGLPLQPEEGDGVELMEAKSQLFLKYFTLFMNLLNDCSEVEDESAQTGGRKRGMSRRLASLRHCTVLAMSNLLNANVDSGLMHSIGLGYHKDLQTRATFMEVLTKILQQGTEFDTLAETVLADRFERLVELVTMMGDQGELPIAMALANVVPCSQWDELARVLVTLFDSRHLLYQLLWNMFSKEVELADSMQTLFRGNSLASKIMTFCFKVYGATYLQKLLDPLLRIVITSSDWQHVSFEVDPTRLEPSESLEENQRNLLQMTEKFFHAIISSSSEFPPQLRSVCHCLYQVVSQRFPQNSIGAVGSAMFLRFINPAIVSPYEAGILDKKPPPRIERGLKLMSKILQSIANHVLFTKEEHMRPFNDFVKSNFDAARRFFLDIASDCPTSDAVNHSLSFISDGNVLALHRLLWNNQEKIGQYLSSNRDHKAVGRRPFDKMATLLAYLGPPEHKPVADTHWSSLNLTSSKFEEFMTRHQVHEKEEFKALKTLSIFYQAGTSKAGNPIFYYVARRFKTGQINGDLLIYHVLLTLKPYYAKPYEIVVDLTHTGPSNRFKTDFLSKWFVVFPGFAYDNVSAVYIYNCNSWVREYTKYHERLLTGLKGSKRLVFIDCPGKLAEHIEHEQQKLPAATLALEEDLKVFHNALKLAHKDTKVSIKVGSTAVQVTSAERTKVLGQSVFLNDIYYASEIEEICLVDENQFTLTIANQGTPLTFMHQECEAIVQSIIHIRTRWELSQPDSIPQHTKIRPKDVPGTLLNIALLNLGSSDPSLRSAAYNLLCALTCTFNLKIEGQLLETSGLCIPANNTLFIVSISKTLAANEPHLTLEFLEECISGFSKSSIELKHLCLEYMTPWLSNLVRFCKHNDDAKRQRVTAILDKLITMTINEKQMYPSIQAKIWGSLGQITDLLDVVLDSFIKTSATGGLGSIKAEVMADTAVALASGNVKLVSSKVIGRMCKIIDKTCLSPTPTLEQHLMWDDIAILARYMLMLSFNNSLDVAAHLPYLFHVVTFLVATGPLSLRASTHGLVINIIHSLCTCSQLHFSEETKQVLRLSLTEFSLPKFYLLFGISKVKSAAVIAFRSSYRDRSFSPGSYERETFALTSLETVTEALLEIMEACMRDIPTCKWLDQWTELAQRFAFQYNPSLQPRALVVFGCISKRVSHGQIKQIIRILSKALESCLKGPDTYNSQVLIEATVIALTKLQPLLNKDSPLHKALFWVAVAVLQLDEVNLYSAGTALLEQNLHTLDSLRIFNDKSPEEVFMAIRNPLEWHCKQMDHFVGLNFNSNFNFALVGHLLKGYRHPSPAIVARTVRILHTLLTLVNKHRNCDKFEVNTQSVAYLAALLTVSEEVRSRCSLKHRKSLLLTDISMENVPMDTYPIHHGDPSYRTLKETQPWSSPKGSEGYLAATYPTVGQTSPRARKSMSLDMGQPSQANTKKLLGTRKSFDHLISDTKAPKRQEMESGITTPPKMRRVAETDYEMETQRISSSQQHPHLRKVSVSESNVLLDEEVLTDPKIQALLLTVLATLVKYTTDEFDQRILYEYLAEASVVFPKVFPVVHNLLDSKINTLLSLCQDPNLLNPIHGIVQSVVYHEESPPQYQTSYLQSFGFNGLWRFAGPFSKQTQIPDYAELIVKFLDALIDTYLPGIDEETSEESLLTPTSPYPPALQSQLSITANLNLSNSMTSLATSQHSPGIDKENVELSPTTGHCNSGRTRHGSASQVQKQRSAGSFKRNSIKKIV

SEQ ID NO: 7300 - protein, 2839 aa, Homo sapiens
MAAHRPVEWVQAVVSRFDEQLPIKTGQQNTHTKVSTEHNKECLINISKYKFSLVISGLTTILKNVNNMRIFGEAAEKNLYLSQLIILDTLEKCLAGQPKDTMRLDETMLVKQLLPEICHFLHTCREGNQHAAELRNSASGVLFSLSCNNFNAVFSRISTRLQELTVCSEDNVDVHDIELLQYINVDCAKLKRLLKETAFKFKALKKVAQLAVINSLEKAFWNWVENYPDEFTKLYQIPQTDMAECAEKLFDLVDGFAESTKRKAAVWPLQIILLILCPEIIQDISKDVVDENNMNKKLFLDSLRKALAGHGGSRQLTESAAIACVKLCKASTYINWEDNSVIFLLVQSMVVDLKNLLFNPSKPFSRGSQPADVDLMIDCLVSCFRISPHNNQHFKICLAQNSPSTFHYVLVNSLHRIITNSALDWWPKIDAVYCHSVELRNMFGETLHKAVQGCGAHPAIRMAPSLTFKEKVTSLKFKEKPTDLETRSYKYLLLSMVKLIHADPKLLLCNPRKQGPETQGSTAELITGLVQLVPQSHMPEIAQEAMEALLVLHQLDSIDLWNPDAPVETFWEISSQMLFYICKKLTSHQMLSSTEILKWLREILICRNKFLLKNKQADRSSCHFLLFYGVGCDIPSSGNTSQMSMDHEELLRTPGASLRKGKGNSSMDSAAGCSGTPPICRQAQTKLEVALYMFLWNPDTEAVLVAMSCFRHLCEEADIRCGVDEVSVHNLLPNYNTFMEFASVSNMMSTGRAALQKRVMALLRRIEHPTAGNTEAWEDTHAKWEQATKLILNYPKAKMEDGQAAESLHKTIVKRRMSHVSGGGSIDLSDTDSLQEWINMTGFLCALGGVCLQQRSNSGLATYSPPMGPVSERKGSMISVMSSEGNADTPVSKFMDRLLSLMVCNHEKVGLQIRTNVKDLVGLELSPALYPMLFNKLKNTISKFFDSQGQVLLTDTNTQFVEQTIAIMKNLLDNHTEGSSEHLGQASIETMMLNLVRYVRVLGNMVHAIQIKTKLCQLVEVMMARRDDLSFCQEMKFRNKMVEYLTDWVMGTSNQAADDDVKCLTRDLDQASMEAVVSLLAGLPLQPEEGDGVELMEAKSQLFLKYFTLFMNLLNDCSEVEDESAQTGGRKRGMSRRLASLRHCTVLAMSNLLNANVDSGLMHSIGLGYHKDLQTRATFMEVLTKILQQGTEFDTLAETVLADRFERLVELVTMMGDQGELPIAMALANVVPCSQWDELARVLVTLFDSRHLLYQLLWNMFSKEVELADSMQTLFRGNSLASKIMTFCFKVYGATYLQKLLDPLLRIVITSSDWQHVSFEVDPTRLEPSESLEENQRNLLQMTEKFFHAIISSSSEFPPQLRSVCHCLYQATCHSLLNKATVKEKKENKKSVVSQRFPQNSIGAVGSAMFLRFINPAIVSPYEAGILDKKPPPRIERGLKLMSKILQSIANHVLFTKEEHMRPFNDFVKSNFDAARRFFLDIASDCPTSDAVNHSLSFISDGNVLALHRLLWNNQEKIGQYLSSNRDHKAVGRRPFDKMATLLAYLGPPEHKPVADTHWSSLNLTSSKFEEFMTRHQVHEKEEFKALKTLSIFYQAGTSKAGNPIFYYVARRFKTGQINGDLLIYHVLLTLKPYYAKPYEIVVDLTHTGPSNRFKTDFLSKWFVVFPGFAYDNVSAVYIYNCNSWVREYTKYHERLLTGLKGSKRLVFIDCPGKLAEHIEHEQQKLPAATLALEEDLKVFHNALKLAHKDTKVSIKVGSTAVQVTSAERTKVLGQSVFLNDIYYASEIEEICLVDENQFTLTIANQGTPLTFMHQECEAIVQSIIHIRTRWELSQPDSIPQHTKIRPKDVPGTLLNIALLNLGSSDPSLRSAAYNLLCALTCTFNLKIEGQLLETSGLCIPANNTLFIVSISKTLAANEPHLTLEFLEECISGFSKSSIELKHLCLEYMTPWLSNLVRFCKHNDDAKRQRVTAILDKLITMTINEKQMYPSIQAKIWGSLGQITDLLDVVLDSFIKTSATGGLGSIKAEVMADTAVALASGNVKLVSSKVIGRMCKIIDKTCLSPTPTLEQHLMWDDIAILARYMLMLSFNNSLDVAAHLPYLFHVVTFLVATGPLSLRASTHGLVINIIHSLCTCSQLHFSEETKQVLRLSLTEFSLPKFYLLFGISKVKSAAVIAFRSSYRDRSFSPGSYERETFALTSLETVTEALLEIMEACMRDIPTCKWLDQWTELAQRFAFQYNPSLQPRALVVFGCISKRVSHGQIKQIIRILSKALESCLKGPDTYNSQVLIEATVIALTKLQPLLNKDSPLHKALFWVAVAVLQLDEVNLYSAGTALLEQNLHTLDSLRIFNDKSPEEVFMAIRNPLEWHCKQMDHFVGLNFNSNFNFALVGHLLKGYRHPSPAIVARTVRILHTLLTLVNKHRNCDKFEVNTQSVAYLAALLTVSEEVRSRCSLKHRKSLLLTDISMENVPMDTYPIHHGDPSYRTLKETQPWSSPKGSEGYLAATYPTVGQTSPRARKSMSLDMGQPSQANTKKLLGTRKSFDHLISDTKAPKRQEMESGITTPPKMRRVAETDYEMETQRISSSQQHPHLRKVSVSESNVLLDEEVLTDPKIQALLLTVLATLVKYTTDEFDQRILYEYLAEASVVFPKVFPVVHNLLDSKINTLLSLCQDPNLLNPIHGIVQSVVYHEESPPQYQTSYLQSFGFNGLWRFAGPFSKQTQIPDYAELIVKFLDALIDTYLPGIDEETSEESLLTPTSPYPPALQSQLSITANLNLSNSMTSLATSQHSPGIDKENVELSPTTGHCNSGRTRHGSASQVQKQRSAGSFKRNSIKKIV

SEQ ID NO: 7301 - protein, 204 aa, Homo sapiens
MHERYSNVQVAGPVDRTSSKDSPLHKALFWVAVAVLQLDEVNLYSAGTALLEQNLHTLDSLRIFNDKSPEEVFMAIRNPLEWHCKQMDHFVGLNFNSNFNFALVGHLLKGYRHPSPAIVARTVRILHTLLTLVNKHRNCDKFEVNTQSVAYLAALLTVSEEVRSRCSLKHRKSLLLTDISMENVPMDTYPIHHGDPSYRNKEKF

SEQ ID NO: 7302 - protein, 593 aa, Homo sapiens
MAAHRPVEWVQAVVSRFDEQLPIKTGQQNTHTKVSTEHNKECLINISKYKFSLVISGLTTILKNVNNMRIFGEAAEKNLYLSQLIILDTLEKCLAGQPKDTMRLDETMLVKQLLPEICHFLHTCREGNQHAAELRNSASGVLFSLSCNNFNAVFSRISTRLQELTVCSEDNVDVHDIELLQYINVDCAKLKRLLKETAFKFKALKKVAQLAVINSLEKAFWNWVENYPDEFTKLYQIPQTDMAECAEKLFDLVDGFAESTKRKAAVWPLQIILLILCPEIIQDISKDVVDENNMNKKLFLDSLRKALAGHGGSRQLTESAAIACVKLCKASTYINWEDNSVIFLLVQSMVVDLKNLLFNPSKPFSRGSQPADVDLMIDCLVSCFRISPHNNQHFKICLAQNSPSTFHYVLVNSLHRIITNSALDWWPKIDAVYCHSVELRNMFGETLHKAVQGCGAHPAIRMAPSLTFKEKVTSLKFKEKPTDLETRSYKYLLLSMVKLIHADPKLLLCNPRKQGPETQGSTAELITGLVQLVPQSHMPEIAQEAMEALLVLHQLDSIDLWNPDAPVETFWEIRYMYFYFLNSTFKFYFVFLS

SEQ ID NO: 7303 - protein, 638 aa, Homo sapiens
MHERYSNVQVAGPVDRTSSKFCGSFNCRFAFQYNPSLQPRALVVFGCISKRVSHGQIKQIIRILSKALESCLKGPDTYNSQVLIEATVIALTKLQPLLNKDSPLHKALFWVAVAVLQLDEVNLYSAGTALLEQNLHTLDSLRIFNDKSPEEVFMAIRNPLEWHCKQMDHFVGLNFNSNFNFALVGHLLKGYRHPSPAIVARTVRILHTLLTLVNKHRNCDKFEVNTQSVAYLAALLTVSEEVRSRCSLKHRKSLLLTDISMENVPMDTYPIHHGDPSYRTLKETQPWSSPKGSEGYLAATYPTVGQTSPRARKSMSLDMGQPSQANTKKLLGTRKSFDHLISDTKAPKRQEMESGITTPPKMRRVAETDYEMETQRISSSQQHPHLRKVSVSESNVLLDEEVLTDPKIQALLLTVLATLVKYTTDEFDQRILYEYLAEASVVFPKVFPVVHNLLDSKINTLLSLCQDPNLLNPIHGIVQSVVYHEESPPQYQTSYLQSFGFNGLWRFAGPFSKQTQIPDYAELIVKFLDALIDTYLPGIDEETSEESLLTPTSPYPPALQSQLSITANLNLSNSMTSLATSQHSPGIDKENVELSPTTGHCNSGRTRHGSASQVQKQRSAGSFKLALLNLLTAHQNSL

SEQ ID NO: 7304 - protein, 2502 aa, Homo sapiens
NWEDNSVIFLLVQSMVVDLKNLLFNPSKPFSRGSQPADVDLMIDCLVSCFRISPHNNQHFKICLAQNSPSTFHYVLVNSLHRIITNSALDWWPKIDAVYCHSVELRNMFGETLHKAVQGCGAHPAIRMAPSLTFKEKVTSLKFKEKPTDLETRSYKYLLLSMVKLIHADPKLLLCNPRKQGPETQGSTAELITGLVQLVPQSHMPEIAQEAMEALLVLHQLDSIDLWNPDAPVETFWEISSQMLFYICKKLTSHQMLSSTEILKWLREILICRNKFLLKNKQADRSSCHFLLFYGVGCDIPSSGNTSQMSMDHEELLRTPGASLRKGKGNSSMDSAAGCSGTPPICRQAQTKLEVALYMFLWNPDTEAVLVAMSCFRHLCEEADIRCGVDEVSVHNLLPNYNTFMEFASVSNMMSTGRAALQKRVMALLRRIEHPTAGNTEAWEDTHAKWEQATKLILNYPKAKMEDGQAAESLHKTIVKRRMSHVSGGGSIDLSDTDSLQEWINMTGFLCALGGVCLQQRSNSGLATYSPPMGPVSERKGSMISVMSSEGNADTPVSKFMDRLLSLMVCNHEKVGLQIRTNVKDLVGLELSPALYPMLFNKLKNTISKFFDSQGQVLLTDTNTQFVEQTIAIMKNLLDNHTEGSSEHLGQASIETMMLNLVRYVRVLGNMVHAIQIKTKLCQLVEVMMARRDDLSFCQEMKFRNKMVEYLTDWVMGTSNQAADDDVKCLTRDLDQASMEAVVSLLAGLPLQPEEGDGVELMEAKSQLFLKYFTLFMNLLNDCSEVEDESAQTGGRKRGMSRRLASLRHCTVLAMSNLLNANVDSGLMHSIGLGYHKDLQTRATFMEVLTKILQQGTEFDTLAETVLADRFERLVELVTMMGDQGELPIAMALANVVPCSQWDELARVLVTLFDSRHLLYQLLWNMFSKEVELADSMQTLFRGNSLASKIMTFCFKVYGATYLQKLLDPLLRIVITSSDWQHVSFEVDPTRLEPSESLEENQRNLLQMTEKFFHAIISSSSEFPPQLRSVCHCLYQVVSQRFPQNSIGAVGSAMFLRFINPAIVSPYEAGILDKKPPPRIERGLKLMSKILQSIANHVLFTKEEHMRPFNDFVKSNFDAARRFFLDIASDCPTSDAVNHSLSFISDGNVLALHRLLWNNQEKIGQYLSSNRDHKAVGRRPFDKMATLLAYLGPPEHKPVADTHWSSLNLTSSKFEEFMTRHQVHEKEEFKALKTLSIFYQAGTSKAGNPIFYYVARRFKTGQINGDLLIYHVLLTLKPYYAKPYEIVVDLTHTGPSNRFKTDFLSKWFVVFPGFAYDNVSAVYIYNCNSWVREYTKYHERLLTGLKGSKRLVFIDCPGKLAEHIEHEQQKLPAATLALEEDLKVFHNALKLAHKDTKVSIKVGSTAVQVTSAERTKVLGQSVFLNDIYYASEIEEICLVDENQFTLTIANQGTPLTFMHQECEAIVQSIIHIRTRWELSQPDSIPQHTKIRPKDVPGTLLNIALLNLGSSDPSLRSAAYNLLCALTCTFNLKIEGQLLETSGLCIPANNTLFIVSISKTLAANEPHLTLEFLEECISGFSKSSIELKHLCLEYMTPWLSNLVRFCKHNDDAKRQRVTAILDKLITMTINEKQMYPSIQAKIWGSLGQITDLLDVVLDSFIKTSATGGLGSIKAEVMADTAVALASGNVKLVSSKVIGRMCKIIDKTCLSPTPTLEQHLMWDDIAILARYMLMLSFNNSLDVAAHLPYLFHVVTFLVATGPLSLRASTHGLVINIIHSLCTCSQLHFSEETKQVLRLSLTEFSLPKFYLLFGISKVKSAAVIAFRSSYRDRSFSPGSYERETFALTSLETVTEALLEIMEACMRDIPTCKWLDQWTELAQRFAFQYNPSLQPRALVVFGCISKRVSHGQIKQIIRILSKALESCLKGPDTYNSQVLIEATVIALTKLQPLLNKDSPLHKALFWVAVAVLQLDEVNLYSAGTALLEQNLHTLDSLRIFNDKSPEEVFMAIRNPLEWHCKQMDHFVGLNFNSNFNFALVGHLLKGYRHPSPAIVARTVRILHTLLTLVNKHRNCDKFEVNTQSVAYLAALLTVSEEVRSRCSLKHRKSLLLTDISMENVPMDTYPIHHGDPSYRTLKETQPWSSPKGSEGYLAATYPTVGQTSPRARKSMSLDMGQPSQANTKKLLGTRKSFDHLISDTKAPKRQEMESGITTPPKMRRVAETDYEMETQRISSSQQHPHLRKVSVSESNVLLDEEVLTDPKIQALLLTVLATLVKYTTDEFDQRILYEYLAEASVVFPKVFPVVHNLLDSKINTLLSLCQDPNLLNPIHGIVQSVVYHEESPPQYQTSYLQSFGFNGLWRFAGPFSKQTQIPDYAELIVKFLDALIDTYLPGIDEETSEESLLTPTSPYPPALQSQLSITANLNLSNSMTSLATSQHSPASLPCSKSAVFMQLFPHQGIDKENVELSPTTGHCNSGRTRHGSASQVQKQRSAGSFKRNSIKKIV

SEQ ID NO: 7305 - protein, 507 aa, Homo sapiens
MAGAIASRMSFSSLKRKQPKTFTVRIVTMDAEMEFNCEVKKQILDEKIYCPPEASVLLASYAVQAKYGDYDPSVHKRGFLAQEELLPKRVINLYQMTPEMWEERITAWYAEHRGRARDEAEMEYLKIAQDLEMYGVNYFAIRNKKGTELLLGVDALGLHIYDPENRLTPKISFPWNEIRNISYSDKEFTIKPLDKKIDVFKFNSSKLRVNKLILQLCIGNHDLFMRRRKADSLEVQQMKAQAREEKARKQMERQRLAREKQMREEAERTRDELERRLLQMKEEATMANEALMRSEETADLLAEKAQITEEEAKLLAQKAAEAEQEMQRIKATAIRTEEEKRLMEQKVLEAEVLALKMAEESERRAKEADQLKQDLQEAREAERRAKQKLLEIATKPTYPPMNPIPAPLPPDIPSFNLIGDSLSFDFKDTDMKRLSMEIEKEKVEYMEKSKHLQEQLNELKTEIEALKLKERETALDILHNENSDRGGSSKHNTIKKPQAQGRRPICI

SEQ ID NO: 7306 - protein, 595 aa, Homo sapiens
MAGAIASRMSFSSLKRKQPKTFTVRIVTMDAEMEFNCEMKWKGKDLFDLVCRTLGLRETWFFGLQYTIKDTVAWLKMDKKVLDHDVSKEEPVTFHFLAKFYPENAEEELVQEITQHLFFLQVKKQILDEKIYCPPEASVLLASYAVQAKYGDYDPSVHKRGFLAQEELLPKRVINLYQMTPEMWEERITAWYAEHRGRARDEAEMEYLKIAQDLEMYGVNYFAIRNKKGTELLLGVDALGLHIYDPENRLTPKISFPWNEIRNISYSDKEFTIKPLDKKIDVFKFNSSKLRVNKLILQLCIGNHDLFMRRRKADSLEVQQMKAQAREEKARKQMERQRLAREKQMREEAERTRDELERRLLQMKEEATMANEALMRSEETADLLAEKAQITEEEAKLLAQKAAEAEQEMQRIKATAIRTEEEKRLMEQKVLEAEVLALKMAEESERRAKEADQLKQDLQEAREAERRAKQKLLEIATKPTYPPMNPIPAPLPPDIPSFNLIGDSLSFDFKDTDMKRLSMEIEKEKVEYMEKSKHLQEQLNELKTEIEALKLKERETALDILHNENSDRGGSSKHNTIKKLTLQSAKSRVAFFEEL

SEQ ID NO: 7307 - protein, 220 aa, Homo sapiens
MAGAIASRMSFSSLKRKQPKTFTVRIVTMDAEMEFNCEVKKQILDEKIYCPPEASVLLASYAVQAKNKKGTELLLGVDALGLHIYDPENRLTPKISFPWNEIRNISYSDKEFTIKPLDKKIDVFKFNSSKLRVNKLILQLCIGNHDLFMRRRKADSLEVQQMKAQAREEKARKQGQRGRSAEAGPAGSTRGGAKSQAEAPGDCHQAHVPAHEPNSSTVAS

SEQ ID NO: 7308 - protein, 507 aa, Homo sapiens; identical to SEQ ID NO: 7305

SEQ ID NO: 7309 - protein, 590 aa, Homo sapiens
MAGAIASRMSFSSLKRKQPKTFTVRIVTMDAEMEFNCEMKWKGKDLFDLVCRTLGLRETWFFGLQYTIKDTVAWLKMDKKVLDHDVSKEEPVTFHFLAKFYPENAEEELVQEITQHLFFLQVKKQILDEKIYCPPEASVLLASYAVQAKYGDYDPSVHKRGFLAQEELLPKRVINLYQMTPEMWEERITAWYAEHRGRARDEAEMEYLKIAQDLEMYGVNYFAIRNKKGTELLLGVDALGLHIYDPENRLTPKISFPWNEIRNISYSDKEFTIKPLDKKIDVFKFNSSKLRVNKLILQLCIGNHDLFMRRRKADSLEVQQMKAQAREEKARKQMERQRLAREKQMREEAERTRDELERRLLQMKEEATMANEALMRSEETADLLAEKAQITEEEAKLLAQKAAEAEQEMQRIKATAIRTEEEKRLMEQKVLEAEVLALKMAEESERRAKEADQLKQDLQEAREAERRAKQKLLEIATKPTYPPMNPIPAPLPPDIPSFNLIGDSLSFDFKDTDMKRLSMEIEKEKVEYMEKSKHLQEQLNELKTEIEALKLKERETALDILHNENSDRGGSSKHNTIKKPQAQGRRPICI

SEQ ID NO: 7310 - protein, 549 aa, Homo sapiens
MAGAIASRMSFSSLKRKQPKTFTVRIVTMDAEMEFNCEMKWKGKDLFDLVCRTLGLRETWFFGLQYTIKDTVAWLKMDKKVKKQILDEKIYCPPEASVLLASYAVQAKYGDYDPSVHKRGFLAQEELLPKRVINLYQMTPEMWEERITAWYAEHRGRARDEAEMEYLKIAQDLEMYGVNYFAIRNKKGTELLLGVDALGLHIYDPENRLTPKISFPWNEIRNISYSDKEFTIKPLDKKIDVFKFNSSKLRVNKLILQLCIGNHDLFMRRRKADSLEVQQMKAQAREEKARKQMERQRLAREKQMREEAERTRDELERRLLQMKEEATMANEALMRSEETADLLAEKAQITEEEAKLLAQKAAEAEQEMQRIKATAIRTEEEKRLMEQKVLEAEVLALKMAEESERRAKEADQLKQDLQEAREAERRAKQKLLEIATKPTYPPMNPIPAPLPPDIPSFNLIGDSLSFDFKDTDMKRLSMEIEKEKVEYMEKSKHLQEQLNELKTEIEALKLKERETALDILHNENSDRGGSSKHNTIKKPQAQGRRPICI

SEQ ID NO: 7311 - protein, 548 aa, Homo sapiens
MAGAIASRMSFSSLKRKQPKTFTVRIVTMDAEMEFNCEVLDHDVSKEEPVTFHFLAKFYPENAEEELVQEITQHLFFLQVKKQILDEKIYCPPEASVLLASYAVQAKYGDYDPSVHKRGFLAQEELLPKRVINLYQMTPEMWEERITAWYAEHRGRARDEAEMEYLKIAQDLEMYGVNYFAIRNKKGTELLLGVDALGLHIYDPENRLTPKISFPWNEIRNISYSDKEFTIKPLDKKIDVFKFNSSKLRVNKLILQLCIGNHDLFMRRRKADSLEVQQMKAQAREEKARKQMERQRLAREKQMREEAERTRDELERRLLQMKEEATMANEALMRSEETADLLAEKAQITEEEAKLLAQKAAEAEQEMQRIKATAIRTEEEKRLMEQKVLEAEVLALKMAEESERRAKEADQLKQDLQEAREAERRAKQKLLEIATKPTYPPMNPIPAPLPPDIPSFNLIGDSLSFDFKDTDMKRLSMEIEKEKVEYMEKSKHLQEQLNELKTEIEALKLKERETALDILHNENSDRGGSSKHNTIKKPQAQGRRPICI

SEQ ID NO: 7312 - protein, 590 aa, Homo sapiens; identical to SEQ ID NO: 7309

SEQ ID NO: 7313 - protein, 601 aa, Homo sapiens
MAGAIASRMSFSSLKRKQPKTFTVRIVTMDAEMEFNCEMKWKGKDLFDLVCRTLGLRETWFFGLQYTIKDTVAWLKMDKKVLDHDVSKEEPVTFHFLAKFYPENAEEELVQEITQHLFFLQVKKQILDEKIYCPPEASVLLASYAVQAKYGDYDPSVHKRGFLAQEELLPKRVINLYQMTPEMWEERITAWYAEHRGRARDEAEMEYLKIAQDLEMYGVNYFAIRNKKGTELLLGVDALGLHIYDPENRLTPKISFPWNEIRNISYSDKEFTIKPLDKKIDVFKFNSSKLRVNKLILQLCIGNHDLFMRRRKADSLEVQQMKAQAREEKARKQMERQRLAREKQMREEAERTRDELERRLLQMKEEATMANEALMRSEEAEQEMQRIKATAIRTEEEKRLMEQKVLEAEVLALKMAEESERRAKEADQLKQDLQEAREAERRAKQKLLEIATKPTYPPMNPIPAPLPPDIPSFNLIGDSLSFDFKDTDMKRLSMEIEKEKVEYMEKSKHLQEQLNELKTEIEALKLKERETALDILHNENSDRGGSSKHNTIKKGMFLFFFILFCWFSLKPKAEDLSAFEPSNSPCRAPSPEWPSLKSSSR

SEQ ID NO: 7314 - protein, 561 aa, Homo sapiens
MAGAIASRMSFSSLKRKQPKTFTVRIVTMDAEMEFNCEMKWKGKDLFDLVCRTLGLRETWFFGLQYTIKDTVAWLKMDKKVLDHDVSKEEPVTFHFLAKFYPENAEEELVQEITQHLFFLQVKKQILDEKIYCPPEASVLLASYAVQAKYGDYDPSVHKRGFLAQEELLPKRVINLYQMTPEMWEERITAWYAEHRGRARDEAEMEYLKIAQDLEMYGVNYFAIRNKKGTELLLGVDALGLHIYDPENRLTPKISFPWNEIRNISYSDKEFTIKPLDKKIDVFKFNSSKLRVNKLILQLCIGNHDLFMRRRKADSLEVQQMKAQAREEKARKQMKEEATMANEALMRSEETADLLAEKAQITEEEAKLLAQKAAEAEQEMQRIKATAIRTEEEKRLMEQKVLEAEVLALKMAEESERRAKEADQLKQDLQEAREAERRAKQKLLEIATKPTYPPMNPIPAPLPPDIPSFNLIGDSLSFDFKDTDMKRLSMEIEKEKVEYMEKSKHLQEQLNELKTEIEALKLKERETALDILHNENSDRGGSSKHNTIKKPQAQGRRPICI

SEQ ID NO: 7315 - protein, 590 aa, Homo sapiens; identical to SEQ ID NO: 7309

SEQ ID NO: 7316 - protein, 165 aa, Homo sapiens
MAGAIASRMSFSSLKRKQPKTFTVRIVTMDAEMEFNCEMKWKGKDLFDLVCRTLGLRETWFFGLQYTIKDTVAWLKMDKKVLDHDVSKEEPVTFHFLAKFYPENAEEELVQEITQHLFFLQVKKQILDEKIYCPPEASVLLASYAVQAKLTLQSAKSRVAFFEEL

SEQ ID NO: 7317 - protein, 220 aa, Homo sapiens; identical to SEQ ID NO: 7307

SEQ ID NO: 7318 - protein, 923 aa, Homo sapiens
MERGLPLLCAVLALVLAPAGAFRNDKCGDTIKIESPGYLTSPGYPHSYHPSEKCEWLIQAPDPYQRIMINFNPHFDLEDRDCKYDYVEVFDGENENGHFRGKFCGKIAPPPVVSSGPFLFIKFVSDYETHGAGFSIRYEIFKRGPECSQNYTTPSGVIKSPGFPEKYPNSLECTYIVFVPKMSEIILEFESFDLEPDSNPPGGMFCRYDRLEIWDGFPDVGPHIGRYCGQKTPGRIRSSSGILSMVFYTDSAIAKEGFSANYSVLQSSVSEDFKCMEALGMESGEIHSDQITASSQYSTNWSAERSRLNYPENGWTPGEDSYREWIQVDLGLLRFVTAVGTQGAISKETKKKYYVKTYKIDVSSNGEDWITIKEGNKPVLFQGNTNPTDVVVAVFPKPLITRFVRIKPATWETGISMRFEVYGCKITDYPCSGMLGMVSGLISDSQITSSNQGDRNWMPENIRLVTSRSGWALPPAPHSYINEWLQIDLGEEKIVRGIIIQGGKHRENKVFMRKFKIGYSNNGSDWKMIMDDSKRKAKSFEGNNNYDTPELRTFPALSTRFIRIYPERATHGGLGLRMELLGCEVEAPTAGPTTPNGNLVDECDDDQANCHSGTGDDFQLTGGTTVLATEKPTVIDSTIQSEFPTYGFNCEFGWGSHKTFCHWEHDNHVQLKWSVLTSKTGPIQDHTGDGNFIYSQADENQKGKVARLVSPVVYSQNSAHCMTFWYHMSGSHVGTLRVKLRYQKPEEYDQLVWMAIGHQGDHWKEGRVLLHKSLKLYQVIFEGEIGKGNLGGIAVDDISINNHISQEDCAKPADLDKKNPEIKIDETGSTPGYEGEGEGDKNISRKPGNVLKTLDPILITIIAMSALGVLLGAVCGVVLYCACWHNGMSERNLSALENYNFELVDGVKLKKDKLNTQSTYSEA

SEQ ID NO: 7319 - protein, 139 aa, Homo sapiens
MDDSKRKAKSFEGNNNYDTPELRTFPALSTRFIRIYPERATHGGLGLRMELLGCEVEAPTAGPTTPNGNLVDECDDDQANCHSGTGDDFQLTGGTTVLATEKPTVIDSTIQSGSRFFKHHHKQQSMRPQNLHHNSILLL

SEQ ID NO: 7320 - protein, 641 aa, Homo sapiens
MERGLPLLCAVLALVLAPAGAFRNDKCGDTIKIESPGYLTSPGYPHSYHPSEKCEWLIQAPDPYQRIMINFNPHFDLEDRDCKYDYVEVFDGENENGHFRGKFCGKIAPPPVVSSGPFLFIKFVSDYETHGAGFSIRYEIFKRGPECSQNYTTPSGVIKSPGFPEKYPNSLECTYIVFVPKMSEIILEFESFDLEPDSNPPGGMFCRYDRLEIWDGFPDVGPHIGRYCGQKTPGRIRSSSGILSMVFYTDSAIAKEGFSANYSVLQSSVSEDFKCMEALGMESGEIHSDQITASSQYSTNWSAERSRLNYPENGWTPGEDSYREWIQVDLGLLRFVTAVGTQGAISKETKKKYYVKTYKIDVSSNGEDWITIKEGNKPVLFQGNTNPTDVVVAVFPKPLITRFVRIKPATWETGISMRFEVYGCKITDYPCSGMLGMVSGLISDSQITSSNQGDRNWMPENIRLVTSRSGWALPPAPHSYINEWLQIDLGEEKIVRGIIIQGGKHRENKVFMRKFKIGYSNNGSDWKMIMDDSKRKAKSFEGNNNYDTPELRTFPALSTRFIRIYPERATHGGLGLRMELLGCEVEGTINTDQECPCARALAKDAKKKKRWADSTHCRCVRSIHGEMWSSGKGVCSLDANL

SEQ ID NO: 7321 - protein, 188 aa, Homo sapiens
MSEIILEFESFDLEPDSNPPGGMFCRYDRLEIWDGFPDVGPHIGRYCGQKTPGRIRSSSGILSMVFYTDSAIAKEGFSANYSVLQSSVSEDFKCMEALGMESGEIHSDQITASSQYSTNWSAERSRLNYPENGWTPGEDSYREWIQDAKYRLRVSVVRSKSSSSSTSLEPRPLSSLKLSFFSYKIKIT

SEQ ID NO: 7322 - protein, 609 aa, Homo sapiens
MERGLPLLCAVLALVLAPAGAFRNDKCGDTIKIESPGYLTSPGYPHSYHPSEKCEWLIQAPDPYQRIMINFNPHFDLEDRDCKYDYVEVFDGENENGHFRGKFCGKIAPPPVVSSGPFLFIKFVSDYETHGAGFSIRYEIFKRGPECSQNYTTPSGVIKSPGFPEKYPNSLECTYIVFVPKMSEIILEFESFDLEPDSNPPGGMFCRYDRLEIWDGFPDVGPHIGRYCGQKTPGRIRSSSGILSMVFYTDSAIAKEGFSANYSVLQSSVSEDFKCMEALGMESGEIHSDQITASSQYSTNWSAERSRLNYPENGWTPGEDSYREWIQVDLGLLRFVTAVGTQGAISKETKKKYYVKTYKIDVSSNGEDWITIKEGNKPVLFQGNTNPTDVVVAVFPKPLITRFVRIKPATWETGISMRFEVYGCKITDYPCSGMLGMVSGLISDSQITSSNQGDRNWMPENIRLVTSRSGWALPPAPHSYINEWLQIDLGEEKIVRGIIIQGGKHRENKVFMRKFKIGYSNNGSDWKMIMDDSKRKAKSFEGNNNYDTPELRTFPALSTRFIRIYPERATHGGLGLRMELLGCEVEGGTTVLATEKPTVIDSTIQSGIK

SEQ ID NO: 7323 - protein, 644 aa, Homo sapiens
MERGLPLLCAVLALVLAPAGAFRNDKCGDTIKIESPGYLTSPGYPHSYHPSEKCEWLIQAPDPYQRIMINFNPHFDLEDRDCKYDYVEVFDGENENGHFRGKFCGKIAPPPVVSSGPFLFIKFVSDYETHGAGFSIRYEIFKRGPECSQNYTTPSGVIKSPGFPEKYPNSLECTYIVFVPKMSEIILEFESFDLEPDSNPPGGMFCRYDRLEIWDGFPDVGPHIGRYCGQKTPGRIRSSSGILSMVFYTDSAIAKEGFSANYSVLQSSVSEDFKCMEALGMESGEIHSDQITASSQYSTNWSAERSRLNYPENGWTPGEDSYREWIQVDLGLLRFVTAVGTQGAISKETKKKYYVKTYKIDVSSNGEDWITIKEGNKPVLFQGNTNPTDVVVAVFPKPLITRFVRIKPATWETGISMRFEVYGCKITDYPCSGMLGMVSGLISDSQITSSNQGDRNWMPENIRLVTSRSGWALPPAPHSYINEWLQIDLGEEKIVRGIIIQGGKHRENKVFMRKFKIGYSNNGSDWKMIMDDSKRKAKSFEGNNNYDTPELRTFPALSTRFIRIYPERATHGGLGLRMELLGCEVEAPTAGPTTPNGNLVDECDDDQANCHSGTGDDFQLTGGTTVLATEKPTVIDSTIQSGIK

SEQ ID NO: 7324 - protein, 704 aa, Homo sapiens
MERGLPLLCAVLALVLAPAGAFRNDKCGDTIKIESPGYLTSPGYPHSYHPSEKCEWLIQAPDPYQRIMINFNPHFDLEDRDCKYDYVEVFDGENENGHFRGKFCGKIAPPPVVSSGPFLFIKFVSDYETHGAGFSIRYEIFKRGPECSQNYTTPSGVIKSPGFPEKYPNSLECTYIVFVPKMSEIILEFESFDLEPDSNPPGGMFCRYDRLEIWDGFPDVGPHIGRYCGQKTPGRIRSSSGILSMVFYTDSAIAKEGFSANYSVLQSSVSEDFKCMEALGMESGEIHSDQITASSQYSTNWSAERSRLNYPENGWTPGEDSYREWIQVDLGLLRFVTAVGTQGAISKETKKKYYVKTYKIDVSSNGEDWITIKEGNKPVLFQGNTNPTDVVVAVFPKPLITRFVRIKPATWETGISMRFEVYGCKITDYPCSGMLGMVSGLISDSQITSSNQGDRNWMPENIRLVTSRSGWALPPAPHSYINEWLQIDLGEEKIVRGIIIQGGKHRENKVFMRKFKIGYSNNGSDWKMIMDDSKRKAKSFEGNNNYDTPELRTFPALSTRFIRIYPERATHGGLGLRMELLGCEVEAPTAGPTTPNGNLVDECDDDQANCHSGTGDDFQLTGAETIFIPLLYHFSSCLSWDQLTPVCVLVTPHGRELPRNRSCLARTRASSFPHVIWIDELFLIATTICNNNLSHFESQRLGLS

SEQ ID NO: 7325 - protein, 86 aa, Homo sapiens
MELLGCEVEAPTAGPTTPNGNLVDECDDDQANCHSGTGDDFQLTGGTTVLATEKPTVIDSTIQSARLEVSTLNLSLHNPPQQKALI

SEQ ID NO: 7326 - protein, 923 aa, Homo sapiens; identical to SEQ ID NO: 7318

SEQ ID NO: 7327 - protein, 735 aa, Homo sapiens
MSEIILEFESFDLEPDSNPPGGMFCRYDRLEIWDGFPDVGPHIGRYCGQKTPGRIRSSSGILSMVFYTDSAIAKEGFSANYSVLQSSVSEDFKCMEALGMESGEIHSDQITASSQYSTNWSAERSRLNYPENGWTPGEDSYREWIQVDLGLLRFVTAVGTQGAISKETKKKYYVKTYKIDVSSNGEDWITIKEGNKPVLFQGNTNPTDVVVAVFPKPLITRFVRIKPATWETGISMRFEVYGCKITDYPCSGMLGMVSGLISDSQITSSNQGDRNWMPENIRLVTSRSGWALPPAPHSYINEWLQIDLGEEKIVRGIIIQGGKHRENKVFMRKFKIGYSNNGSDWKMIMDDSKRKAKSFEGNNNYDTPELRTFPALSTRFIRIYPERATHGGLGLRMELLGCEVEAPTAGPTTPNGNLVDECDDDQANCHSGTGGTTVLATEKPTVIDSTIQSEFPTYGFNCEFGWGSHKTFCHWEHDNHVQLKWSVLTSKTGPIQDHTGDGNFIYSQADENQKGKVARLVSPVVYSQNSAHCMTFWYHMSGSHVGTLRVKLRYQKPEEYDQLVWMAIGHQGDHWKEGRVLLHKSLKLYQVIFEGEIGKGNLGGIAVDDISINNHISQEDCAKPADLDKKNPEIKIDETGSTPGYEGEGEGDKNISRKPGNVLKTLDPILITIIAMSALGVLLGAVCGVVLYCACWHNGMSERNLSALENYNFELVDGVKLKKDKLNTQSTYSEA

SEQ ID NO: 7328 - protein, 906 aa, Homo sapiens
MERGLPLLCAVLALVLAPAGAFRNDKCGDTIKIESPGYLTSPGYPHSYHPSEKCEWLIQAPDPYQRIMINFNPHFDLEDRDCKYDYVEVFDGENENGHFRGKFCGKIAPPPVVSSGPFLFIKFVSDYETHGAGFSIRYEIFKRGPECSQNYTTPSGVIKSPGFPEKYPNSLECTYIVFVPKMSEIILEFESFDLEPDSNPPGGMFCRYDRLEIWDGFPDVGPHIGRYCGQKTPGRIRSSSGILSMVFYTDSAIAKEGFSANYSVLQSSVSEDFKCMEALGMESGEIHSDQITASSQYSTNWSAERSRLNYPENGWTPGEDSYREWIQVDLGLLRFVTAVGTQGAISKETKKKYYVKTYKIDVSSNGEDWITIKEGNKPVLFQGNTNPTDVVVAVFPKPLITRFVRIKPATWETGISMRFEVYGCKITDYPCSGMLGMVSGLISDSQITSSNQGDRNWMPENIRLVTSRSGWALPPAPHSYINEWLQIDLGEEKIVRGIIIQGGKHRENKVFMRKFKIGYSNNGSDWKMIMDDSKRKAKSFEGNNNYDTPELRTFPALSTRFIRIYPERATHGGLGLRMELLGCEVEAPTAGPTTPNGNLVDECDDDQANCHSGTGDDFQLTGGTTVLATEKPTVIDSTIQSEFPTYGFNCEFGWGSHKTFCHWEHDNHVQLKWSVLTSKTGPIQDHTGDGNFIYSQADENQKGKVARLVSPVVYSQNSAHCMTFWYHMSGSHVGTLRVKLRYQKPEEYDQLVWMAIGHQGDHWKEGRVLLHKSLKLYQVIFEGEIGKGNLGGIAVDDISINNHISQEDCARSTPGYEGEGEGDKNISRKPGNVLKTLDPILITIIAMSALGVLLGAVCGVVLYCACWHNGMSERNLSALENYNFELVDGVKLKKDKLNTQSTYSEA

SEQ ID NO: 7329 - protein, 105 aa, Homo sapiens
NHISQEDCARSTPGYEGEGEGDKNISRKPGNVLKTLDPILITIIAMSALGVLLGAVCGVVLYCACWHNGMSERNLSALENYNFELVDGVKLKKDKLNTQSTYSEA

SEQ ID NO: 7330 - protein, 77 aa, Homo sapiens
  VARIANT 1: note = MOD_RES - Any amino acid
XPTAGPTTPNGNLVDECDDDQANCHSGTGDDFQLTGGTTVLATEKPTVIDSTIQSARLEVSTLNLSLHNPPQQKALI

SEQ ID NO: 7331 - protein, 100 aa, Homo sapiens
  VARIANT 1: note = MOD_RES - Any amino acid
XTHGGLGLRMELLGCEVEAPTAGPTTPNGNLVDECDDDQANCHSGTGDDFQLTGGTTVLATEKPTVIDSTIQSGSRFFKHHHKQQSMRPQNLHHNSILLL

SEQ ID NO: 7332 - protein, 236 aa, Homo sapiens
VDLGLLRFVTAVGTQGAISKETKKKYYVKTYKIDVSSNGEDWITIKEGNKPVLFQGNTNPTDVVVAVFPKPLITRFVRIKPATWETGISMRFEVYGCKITDYPCSGMLGMVSGLISDSQITSSNQGDRNWMPENIRLVTSRSGWALPPAPHSYINEWLQIDLGEEKIVRGIIIQGGKHRENKVFMRKFKIGYSNNGSDWKMIMDDSKRKAKVRAGDWEEVIPYVLDFNQGPLAFSR

SEQ ID NO: 7333 - protein, 170 aa, Homo sapiens
  VARIANT 1: note = MOD_RES - Any amino acid
XPGGMFCRYDRLEIWDGFPDVGPHIGRYCGQKTPGRIRSSSGILSMVFYTDSAIAKEGFSANYSVLQSSVSEDFKCMEALGMESGEIHSDQITASSQYSTNWSAERSRLNYPENGWTPGEDSYREWIQDAKYRLRVSVVRSKSSSSSTSLEPRPLSSLKLSFFSYKIKIT

SEQ ID NO: 7334 - protein, 906 aa, Homo sapiens
MDMFPLTWVFLALYFSRHQVRGQPDPPCGGRLNSKDAGYITSPGYPQDYPSHQNCEWIVYAPEPNQKIVLNFNPHFEIEKHDCKYDFIEIRDGDSESADLLGKHCGNIAPPTIISSGSMLYIRFTSDYARQGAGFSLRYEIFKTGSEDCSKNFTSPNGTIESPGFPEKYPHNLDCTFTILAKPKMEIILQFLIFDLEHDPLQVGEGDCKYDWLDIWDGIPHVGPLIGKYCGTKTPSELRSSTGILSLTFHTDMAVAKDGFSARYYLVHQEPLENFQCNVPLGMESGRIANEQISASSTYSDGRWTPQQSRLHGDDNGWTPNLDSNKEYLQVDLRFLTMLTAIATQGAISRETQNGYYVKSYKLEVSTNGEDWMVYRHGKNHKVFQANNDATEVVLNKLHAPLLTRFVRIRPQTWHSGIALRLELFGCRVTDAPCSNMLGMLSGLIADSQISASSTQEYLWSPSAARLVSSRSGWFPRIPQAQPGEEWLQVDLGTPKTVKGVIIQGARGGDSITAVEARAFVRKFKVSYSLNGKDWEYIQDPRTQQPKLFEGNMHYDTPDIRRFDPIPAQYVRVYPERWSPAGIGMRLEVLGCDWTDSKPTVETLGPTVKSEETTTPYPTEEEATECGENCSFEDDKDLQLPSGFNCNFDFLEEPCGWMYDHAKWLRTTWASSSSPNDRTFPDDRNFLRLQSDSQREGQYARLISPPVHLPRSPVCMEFQYQATGGRGVALQVVREASQESKLLWVIREDQGGEWKHGRIILPSYDMEYQIVFEGVIGKGRSGEIAIDDIRISTDVPLENCMEPISAFAGENFKGGTLLPGTEPTVDTVPMQPIPAYWYYVMAAGGAVLVLVSVALALVLHYHRFRYAAKKTDHSITYKTSHYTNGAPLAVEPTLTIKLEQDRGSHC

SEQ ID NO: 7335 - protein, 99 aa, Homo sapiens
MDMFPLTWVFLALYFSRHQVRGQPDPPCGGRLNSKDAGYITSPGYPQDYPSHQNCEWIVYAPEPNQKIVLNFNPHFEIEKHDCNLLSAWKISLTSRSFA

SEQ ID NO: 7336 - protein, 555 aa, Homo sapiens
MDMFPLTWVFLALYFSRHQVRGQPDPPCGGRLNSKDAGYITSPGYPQDYPSHQNCEWIVYAPEPNQKIVLNFNPHFEIEKHDCKYDFIEIRDGDSESADLLGKHCGNIAPPTIISSGSMLYIRFTSDYARQGAGFSLRYEIFKTGSEDCSKNFTSPNGTIESPGFPEKYPHNLDCTFTILAKPKMEIILQFLIFDLEHDPLQVGEGDCKYDWLDIWDGIPHVGPLIGKYCGTKTPSELRSSTGILSLTFHTDMAVAKDGFSARYYLVHQEPLENFQCNVPLGMESGRIANEQISASSTYSDGRWTPQQSRLHGDDNGWTPNLDSNKEYLQVDLRFLTMLTAIATQGAISRETQNGYYVKSYKLEVSTNGEDWMVYRHGKNHKVFQANNDATEVVLNKLHAPLLTRFVRIRPQTWHSGIALRLELFGCRVTDAPCSNMLGMLSGLIADSQISASSTQEYLWSPSAARLVSSRSGWFPRIPQAQPGEEWLQVDLGTPKTVKGVIIQGARGGDSITAVEARAFVRKFKVSYSLNGKDWEYIQDPRTQQPKVGCSWRPL

SEQ ID NO: 7337 - protein, 901 aa, Homo sapiens
MDMFPLTWVFLALYFSRHQVRGQPDPPCGGRLNSKDAGYITSPGYPQDYPSHQNCEWIVYAPEPNQKIVLNFNPHFEIEKHDCKYDFIEIRDGDSESADLLGKHCGNIAPPTIISSGSMLYIRFTSDYARQGAGFSLRYEIFKTGSEDCSKNFTSPNGTIESPGFPEKYPHNLDCTFTILAKPKMEIILQFLIFDLEHDPLQVGEGDCKYDWLDIWDGIPHVGPLIGKYCGTKTPSELRSSTGILSLTFHTDMAVAKDGFSARYYLVHQEPLENFQCNVPLGMESGRIANEQISASSTYSDGRWTPQQSRLHGDDNGWTPNLDSNKEYLQVDLRFLTMLTAIATQGAISRETQNGYYVKSYKLEVSTNGEDWMVYRHGKNHKVFQANNDATEVVLNKLHAPLLTRFVRIRPQTWHSGIALRLELFGCRVTDAPCSNMLGMLSGLIADSQISASSTQEYLWSPSAARLVSSRSGWFPRIPQAQPGEEWLQVDLGTPKTVKGVIIQGARGGDSITAVEARAFVRKFKVSYSLNGKDWEYIQDPRTQQPKLFEGNMHYDTPDIRRFDPIPAQYVRVYPERWSPAGIGMRLEVLGCDWTDSKPTVETLGPTVKSEETTTPYPTEEEATECGENCSFEDDKDLQLPSGFNCNFDFLEEPCGWMYDHAKWLRTTWASSSSPNDRTFPDDRNFLRLQSDSQREGQYARLISPPVHLPRSPVCMEFQYQATGGRGVALQVVREASQESKLLWVIREDQGGEWKHGRIILPSYDMEYQIVFEGVIGKGRSGEIAIDDIRISTDVPLENCMEPISAFAGGTLLPGTEPTVDTVPMQPIPAYWYYVMAAGGAVLVLVSVALALVLHYHRFRYAAKKTDHSITYKTSHYTNGAPLAVEPTLTIKLEQDRGSHC

SEQ ID NO: 7338 - protein, 926 aa, Homo sapiens
MDMFPLTWVFLALYFSRHQVRGQPDPPCGGRLNSKDAGYITSPGYPQDYPSHQNCEWIVYAPEPNQKIVLNFNPHFEIEKHDCKYDFIEIRDGDSESADLLGKHCGNIAPPTIISSGSMLYIRFTSDYARQGAGFSLRYEIFKTGSEDCSKNFTSPNGTIESPGFPEKYPHNLDCTFTILAKPKMEIILQFLIFDLEHDPLQVGEGDCKYDWLDIWDGIPHVGPLIGKYCGTKTPSELRSSTGILSLTFHTDMAVAKDGFSARYYLVHQEPLENFQCNVPLGMESGRIANEQISASSTYSDGRWTPQQSRLHGDDNGWTPNLDSNKEYLQVDLRFLTMLTAIATQGAISRETQNGYYVKSYKLEVSTNGEDWMVYRHGKNHKVFQANNDATEVVLNKLHAPLLTRFVRIRPQTWHSGIALRLELFGCRVTDAPCSNMLGMLSGLIADSQISASSTQEYLWSPSAARLVSSRSGWFPRIPQAQPGEEWLQVDLGTPKTVKGVIIQGARGGDSITAVEARAFVRKFKVSYSLNGKDWEYIQDPRTQQPKLFEGNMHYDTPDIRRFDPIPAQYVRVYPERWSPAGIGMRLEVLGCDWTDSKPTVETLGPTVKSEETTTPYPTEEEATECGENCSFEDDKDLQLPSGFNCNFDFLEEPCGWMYDHAKWLRTTWASSSSPNDRTFPDDRNFLRLQSDSQREGQYARLISPPVHLPRSPVCMEFQYQATGGRGVALQVVREASQESKLLWVIREDQGGEWKHGRIILPSYDMEYQIVFEGVIGKGRSGEIAIDDIRISTDVPLENCMEPISAFAVDIPEIHEREGYEDEIDDEYEVDWSNSSSATSGSGAPSTDKEKSWLYTLDPILITIIAMSSLGVLLGATCAGLLLYCTCSYSGLSSRSCTTLENYNFELYDGLKHKVKMNHQKCCSEA

SEQ ID NO: 7339 - protein, 931 aa, Homo sapiens
MDMFPLTWVFLALYFSRHQVRGQPDPPCGGRLNSKDAGYITSPGYPQDYPSHQNCEWIVYAPEPNQKIVLNFNPHFEIEKHDCKYDFIEIRDGDSESADLLGKHCGNIAPPTIISSGSMLYIRFTSDYARQGAGFSLRYEIFKTGSEDCSKNFTSPNGTIESPGFPEKYPHNLDCTFTILAKPKMEIILQFLIFDLEHDPLQVGEGDCKYDWLDIWDGIPHVGPLIGKYCGTKTPSELRSSTGILSLTFHTDMAVAKDGFSARYYLVHQEPLENFQCNVPLGMESGRIANEQISASSTYSDGRWTPQQSRLHGDDNGWTPNLDSNKEYLQVDLRFLTMLTAIATQGAISRETQNGYYVKSYKLEVSTNGEDWMVYRHGKNHKVFQANNDATEVVLNKLHAPLLTRFVRIRPQTWHSGIALRLELFGCRVTDAPCSNMLGMLSGLIADSQISASSTQEYLWSPSAARLVSSRSGWFPRIPQAQPGEEWLQVDLGTPKTVKGVIIQGARGGDSITAVEARAFVRKFKVSYSLNGKDWEYIQDPRTQQPKLFEGNMHYDTPDIRRFDPIPAQYVRVYPERWSPAGIGMRLEVLGCDWTDSKPTVETLGPTVKSEETTTPYPTEEEATECGENCSFEDDKDLQLPSGFNCNFDFLEEPCGWMYDHAKWLRTTWASSSSPNDRTFPDDRNFLRLQSDSQREGQYARLISPPVHLPRSPVCMEFQYQATGGRGVALQVVREASQESKLLWVIREDQGGEWKHGRIILPSYDMEYQIVFEGVIGKGRSGEIAIDDIRISTDVPLENCMEPISAFAGENFKVDIPEIHEREGYEDEIDDEYEVDWSNSSSATSGSGAPSTDKEKSWLYTLDPILITIIAMSSLGVLLGATCAGLLLYCTCSYSGLSSRSCTTLENYNFELYDGLKHKVKMNHQKCCSEA

SEQ ID NO: 7340 - protein, 909 aa, Homo sapiens
MDMFPLTWVFLALYFSRHQVRGQPDPPCGGRLNSKDAGYITSPGYPQDYPSHQNCEWIVYAPEPNQKIVLNFNPHFEIEKHDCKYDFIEIRDGDSESADLLGKHCGNIAPPTIISSGSMLYIRFTSDYARQGAGFSLRYEIFKTGSEDCSKNFTSPNGTIESPGFPEKYPHNLDCTFTILAKPKMEIILQFLIFDLEHDPLQVGEGDCKYDWLDIWDGIPHVGPLIGKYCGTKTPSELRSSTGILSLTFHTDMAVAKDGFSARYYLVHQEPLENFQCNVPLGMESGRIANEQISASSTYSDGRWTPQQSRLHGDDNGWTPNLDSNKEYLQVDLRFLTMLTAIATQGAISRETQNGYYVKSYKLEVSTNGEDWMVYRHGKNHKVFQANNDATEVVLNKLHAPLLTRFVRIRPQTWHSGIALRLELFGCRVTDAPCSNMLGMLSGLIADSQISASSTQEYLWSPSAARLVSSRSGWFPRIPQAQPGEEWLQVDLGTPKTVKGVIIQGARGGDSITAVEARAFVRKFKVSYSLNGKDWEYIQDPRTQQPKLFEGNMHYDTPDIRRFDPIPAQYVRVYPERWSPAGIGMRLEVLGCDWTDSKPTVETLGPTVKSEETTTPYPTEEEATECGENCSFEDDKDLQLPSGFNCNFDFLEEPCGWMYDHAKWLRTTWASSSSPNDRTFPDDRNFLRLQSDSQREGQYARLISPPVHLPRSPVCMEFQYQATGGRGVALQVVREASQESKLLWVIREDQGGEWKHGRIILPSYDMEYQIVFEGVIGKGRSGEIAIDDIRISTDVPLENCMEPISAFADEYEVDWSNSSSATSGSGAPSTDKEKSWLYTLDPILITIIAMSSLGVLLGATCAGLLLYCTCSYSGLSSRSCTTLENYNFELYDGLKHKVKMNHQKCCSEA

SEQ ID NO: 7341 - protein, 555 aa, Homo sapiens; identical to SEQ ID NO: 7336

SEQ ID NO: 7342 - protein, 102 aa, Homo sapiens
MDMFPLTWVFLALYFSRHQVRGQPDPPCGGRLNSKDAGYITSPGYPQDYPSHQNCEWIVYAPEPNQKIVLNFNPHFEIEKHDCKYDFIEIRDGDSESADLLG

SEQ ID NO: 7343 - protein, 926 aa, Homo sapiens
MDMFPLTWVFLALYFSRHQVRGQPDPPCGGRLNSKDAGYITSPGYPQDYPSHQNCEWIVYAPEPNQKIVLNFNPHFEIEKHDCKYDFIEIRDGDSESADLLGKHCGNIAPPTIISSGSMLYIRFTSDYARQGAGFSLRYEIFKTGSEDCSKNFTSPNGTIESPGFPEKYPHNLDCTFTILAKPKMEIILQFLIFDLEHDPLQVGEGDCKYDWLDIWDGIPHVGPLIGKYCGTKTPSELRSSTGILSLTFHTDMAVAKDGFSARYYLVHQEPLENFQCNVPLGMESGRIANEQISASSTYSDGRWTPQQSRLHGDDNGWTPNLDSNKEYLQVDLRFLTMLTAIATQGAISRETQNGYYVKSYKLEVSTNGEDWMVYRHGKNHKVFQANNDATEVVLNKLHAPLLTRFVRIRPQTWHSGIALRLELFGCRVTDAPCSNMLGMLSGLIADSQISASSTQEYLWSPSAARLVSSRSGWFPRIPQAQPGEEWLQVDLGTPKTVKGVIIQGARGGDSITAVEARAFVRKFKVSYSLNGKDWEYIQDPRTQQPKLFEGNMHYDTPDIRRFDPIPAQYVRVYPERWSPAGIGMRLEVLGCDWTDSKPTVETLGPTVKSEETTTPYPTEEEATECGENCSFEDDKDLQLPSGFNCNFDFLEEPCGWMYDHAKWLRTTWASSSSPNDRTFPDDRNFLRLQSDSQREGQYARLISPPVHLPRSPVCMEFQYQATGGRGVALQVVREASQESKLLWVIREDQGGEWKHGRIILPSYDMEYQIVFEGVIGKGRSGEIAIDDIRISTDVPLENCMATVSASIVDIPEIHEREGYEDEIDDEYEVDWSNSSSATSGSGAPSTDKEKSWLYTLDPILITIIAMSSLGVLLGATCAGLLLYCTCSYSGLSSRSCTTLENYNFELYDGLKHKVKMNHQKCCSEA

SEQ ID NO: 7344 - protein, 909 aa, Homo sapiens
MDMFPLTWVFLALYFSRHQVRGQPDPPCGGRLNSKDAGYITSPGYPQDYPSHQNCEWIVYAPEPNQKIVLNFNPHFEIEKHDCKYDFIEIRDGDSESADLLGKHCGNIAPPTIISSGSMLYIRFTSDYARQGAGFSLRYEIFKTGSEDCSKNFTSPNGTIESPGFPEKYPHNLDCTFTILAKPKMEIILQFLIFDLEHDPLQVGEGDCKYDWLDIWDGIPHVGPLIGKYCGTKTPSELRSSTGILSLTFHTDMAVAKDGFSARYYLVHQEPLENFQCNVPLGMESGRIANEQISASSTYSDGRWTPQQSRLHGDDNGWTPNLDSNKEYLQVDLRFLTMLTAIATQGAISRETQNGYYVKSYKLEVSTNGEDWMVYRHGKNHKVFQANNDATEVVLNKLHAPLLTRFVRIRPQTWHSGIALRLELFGCRVTDAPCSNMLGMLSGLIADSQISASSTQEYLWSPSAARLVSSRSGWFPRIPQAQPGEEWLQVDLGTPKTVKGVIIQGARGGDSITAVEARAFVRKFKVSYSLNGKDWEYIQDPRTQQPKLFEGNMHYDTPDIRRFDPIPAQYVRVYPERWSPAGIGMRLEVLGCDWTDSKPTVETLGPTVKSEETTTPYPTEEEATECGENCSFEDDKDLQLPSGFNCNFDFLEEPCGWMYDHAKWLRTTWASSSSPNDRTFPDDRNFLRLQSDSQREGQYARLISPPVHLPRSPVCMEFQYQATGGRGVALQVVREASQESKLLWVIREDQGGEWKHGRIILPSYDMEYQIVFEGVIGKGRSGEIAIDDIRISTDVPLENCMGPKACIADEYEVDWSNSSSATSGSGAPSTDKEKSWLYTLDPILITIIAMSSLGVLLGATCAGLLLYCTCSYSGLSSRSCTTLENYNFELYDGLKHKVKMNHQKCCSEA

SEQ ID NO: 7345 - protein, 153 aa, Homo sapiens
MTKIKADPDGPEAQAEACSGERTYQELLVNQNPIAQPLASRRLTRKLYKCIKKAVKQKQIRRGVKEVQKFVNKGEKGIMVLAGDTLPIEVYCHLPVMCEDRNLPYVYIPSKTDLGAAAGSKRPTCVIMVKPHEEYQEAYDECLEEVQSLPLPL

SEQ ID NO: 7346 - protein, 90 aa, Homo sapiens
MTKIKADPDGPEAQAEACSGERTYQELLVNQNPIAQPLASRRLTRKLYKCIKKAVKQKQIRRGVKEVQKFVNKGEKGTWVQPQAPSAPPV

SEQ ID NO: 7347 - protein, 754 aa, Homo sapiens
MWKLLPAAGPAGGEPYRLLTGVEYVVGRKNCAILIENDQSISRNHAVLTANFSVTNLSQTDEIPVLTLKDNSKYGTFVNEEKMQNGFSRTLKSGDGITFGVFGSKFRIEYEPLVACSSCLDVSGKTALNQAILQLGGFTVNNWTEECTHLVMVSVKVTIKTICALICGRPIVKPEYFTEFLKAVESKKQPPQIESFYPPLDEPSIGSKNVDLSGRQERKQIFKGKTFIFLNAKQHKKLSSAVVFGGGEARLITEENEEEHNFFLAPGTCVVDTGITNSQTLIPDCQKKWIQSIMDMLQRQGLRPIPEAEIGLAVIFMTTKNYCDPQGHPSTGLKTTTPGPSLSQGVSVDEKLMPSAPVNTTTYVADTESEQADTWDLSERPKEIKVSKMEQKFRMLSQDAPTVKESCKTSSNNNSMVSNTLAKMRIPNYQLSPTKLPSINKSKDRASQQQQTNSIRNYFQPSTKKRERDEENQEMSSCKSARIETSCSLLEQTQPATPSLWKNKEQHLSENEPVDTNSDNNLFTDTDLKSIVKNSASKSHAAEKLRSNKKREMDDVAIEDEVLEQLFKDTKPELEIDVKVQKQEEDVNVRKRPRMDIETNDTFSDEAVPESSKISQENEIGKKRELKEDSLWSAKEISNNDKLQDDSEMLPKKLLLTEFRSLVIKNSTSRNPSGINDDYGQLKNFKKFKKVTYPGAGKLPHIIGGSDLIAHHARKNTELEEWLRQEMEVQNQHAKEESLADDLFRYNPYLKRRR

SEQ ID NO: 7348 - protein, 478 aa, Homo sapiens
MWKLLPAAGPAGGEPYRLLTGVEYVVGRKNCAILIENDQSISRNHAVLTANFSVTNLSQTDEIPVLTLKDNSKYGTFVNEEKMQNGFSRTLKSGDGITFGVFGSKFRIEYEPLVACSSCLDVSGKTALNQAILQLGGFTVNNWTEECTHLVMVSVKVTIKTICALICGRPIVKPEYFTEFLKAVESKKQPPQIESFYPPLDEPSIGSKNVDLSGRQERKQIFKGKTFIFLNAKQHKKLSSAVVFGGGEARLITEENEEEHNFFLAPGTCVVDTGITNSQTLIPDCQKKWIQSIMDMLQRQGLRPIPEAEIGLAVIFMTTKNYCDPQGHPSTGLKTTTPGPSLSQGVSVDEKLMPSAPVNTTTYVADTESEQADTWDLSERPKEIKVSKMEQKFRMLSQDAPTVKESCKTSSNNNSMVSNTLAKMRIPNYQLSPTKLPSINKSKDRASQQQQTNSIRNYFQPSTKKRERLHLKKKKKKK

SEQ ID NO: 7349 - protein, 380 aa, Homo sapiens
MGSGCRIECIFFSEFHPTLGPKITYQVPEDFISRELFDTVQVYIITKPELQNKLITVTAMEKKLIGCPVCIEHKKYSRNALLFNLGFVCDAQAKTCALEPIVKKLAGYLTTLELESSFVSMEESKQKLVPIMTILLEELNASGRCTLPIDESNTIHLKVIEQRPDPPVAQEYDVPVFTKDKEDFFNSQWDLTTQQILPYIDGFRHIQKISAEADVELNLVRIAIQNLLYYGVVTLVSILQYSNVYCPTPKVQDLVDDKSLQEACLSYVTKQGHKRASLRDVFQLYCSLSPGTTVRDLIGRHPQQLQHVDERKLIQFGLMKNLIRRLQKYPVRVTREEQSHPARLYTGCHSYDEICCKTGMSYHELDERLENDPNIIICWK

SEQ ID NO: 7350 - protein, 401 aa, Homo sapiens
MWSGGSGKARGWEAAAGGRSSPGRLSRRRIMSMSPKHTTPFSVSDILSPLEESYKKVGMEGGGLGAPLAAYRQGQAAPPTAAMQQHAVGHHGAVTAAYHMTAAGVPQLSHSAVGGYCNGNLGNMSELPPYQDTMRNSASGPGWYGANPDPRFPAISRFMGPASGMNMSGMGGLGSLGDVSKNMAPLPSAPRRKRRVLFSQAQVYELERRFKQQKYLSAPEREHLASMIHLTPTQVKIWFQNHRYKMKRQAKDKAAQQQLQQDSGGGGGGGGTGCPQQQQAQQQSPRRVAVPVLVKDGKPCQAGAPAPGAASLQGHAQQQAQHQAQAAQAAAAAISVGSGGAGLGAHPGHQPGSAGQSPDLAHHAASPAALQGQVSSLSHLNSSGSDYGTMSCSTLLYGRTW

SEQ ID NO: 7351 - protein, 371 aa, Homo sapiens
MSMSPKHTTPFSVSDILSPLEESYKKVGMEGGGLGAPLAAYRQGQAAPPTAAMQQHAVGHHGAVTAAYHMTAAGVPQLSHSAVGGYCNGNLGNMSELPPYQDTMRNSASGPGWYGANPDPRFPAISRFMGPASGMNMSGMGGLGSLGDVSKNMAPLPSAPRRKRRVLFSQAQVYELERRFKQQKYLSAPEREHLASMIHLTPTQVKIWFQNHRYKMKRQAKDKAAQQQLQQDSGGGGGGGGTGCPQQQQAQQQSPRRVAVPVLVKDGKPCQAGAPAPGAASLQGHAQQQAQHQAQAAQAAAAAISVGSGGAGLGAHPGHQPGSAGQSPDLAHHAASPAALQGQVSSLSHLNSSGSDYGTMSCSTLLYGRTW

SEQ ID NO: 7352 - protein, 371 aa, Homo sapiens; identical to SEQ ID NO: 7351

SEQ ID NO: 7353 - protein, 371 aa, Homo sapiens; identical to SEQ ID NO: 7351

SEQ ID NO: 7354 - protein, 34 aa, Homo sapiens
MWSGGSGKARGWEAAAGGRSSPGRLSAYAPPLVA

SEQ ID NO: 7355 - protein, 190 aa, Homo sapiens
MLRVPEPRPGEAKAEGAAPPTPSKPLTSFLIQDILRDGAPEEAETLAETEPERHLGSYLLDSENTSGALPRLPQTPKQPQKRSRAAFSHTQVIELERKFSHQKYLSAPERAHLAKNLKLTETQVKIWFQNRRYKTKRKQLSSELGDLEKHSSLPALKEEAFSRASLVSVYNSYPYYPYLYCVGSWSPAFW

SEQ ID NO: 7356 - protein, 234 aa, Homo sapiens
MLRVPEPRPGEAKAEGAAPPTPSKPLTSFLIQDILRDGAQRQGGRTSSQRQRDPEPEPEPEPEGGRSRAGAQNDQLSTGPRAAPEEAETLAETEPERHLGSYLLDSENTSGALPRLPQTPKQPQKRSRAAFSHTQVIELERKFSHQKYLSAPERAHLAKNLKLTETQVKIWFQNRRYKTKRKQLSSELGDLEKHSSLPALKEEAFSRASLVSVYNSYPYYPYLYCVGSWSPAFW

SEQ ID NO: 7357 - protein, 159 aa, Homo sapiens
MLRVPEPRPGEAETLAETEPERHLGSYLLDSENTSGALPRLPQTPKQPQKRSRAAFSHTQVIELERKFSHQKYLSAPERAHLAKNLKLTETQVKIWFQNRRYKTKRKQLSSELGDLEKHSSLPALKEEAFSRASLVSVYNSYPYYPYLYCVGSWSPAFW

SEQ ID NO: 7358 - protein, 1403 aa, Homo sapiens
MATQQKASDERISQFDHNLLPELSALLGLDAVQLAKELEEEEQKERAKMQKGYNSQMRSEAKRLKTFVTYEPYSSWIPQEMAAAGFYFTGVKSGIQCFCCSLILFGAGLTRLPIEDHKRFHPDCGFLLNKDVGNIAKYDIRVKNLKSRLRGGKMRYQEEEARLASFRNWPFYVQGISPCVLSEAGFVFTGKQDTVQCFSCGGCLGNWEEGDDPWKEHAKWFPKCEFLRSKKSSEEITQYIQSYKGFVDITGEHFVNSWVQRELPMASAYCNDSIFAYEELRLDSFKDWPRESAVGVAALAKAGLFYTGIKDIVQCFSCGGCLEKWQEGDDPLDDHTRCFPNCPFLQNMKSSAEVTPDLQSRGELCELLETTSESNLEDSIAVGPIVPEMAQGEAQWFQEAKNLNEQLRAAYTSASFRHMSLLDISSDLATDHLLGCDLSIASKHISKPVQEPLVLPEVFGNLNSVMCVEGEAGSGKTVLLKKIAFLWASGCCPLLNRFQLVFYLSLSSTRPDEGLASIICDQLLEKEGSVTEMCVRNIIQQLKNQVLFLLDDYKEICSIPQVIGKLIQKNHLSRTCLLIAVRTNRARDIRRYLETILEIKAFPFYNTVCILRKLFSHNMTRLRKFMVYFGKNQSLQKIQKTPLFVAAICAHWFQYPFDPSFDDVAVFKSYMERLSLRNKATAEILKATVSSCGELALKGFFSCCFEFNDDDLAEAGVDEDEDLTMCLMSKFTAQRLRPFYRFLSPAFQEFLAGMRLIELLDSDRQEHQDLGLYHLKQINSPMMTVSAYNNFLNYVSSLPSTKAGPKIVSHLLHLVDNKESLENISENDDYLKHQPEISLQMQLLRGLWQICPQAYFSMVSEHLLVLALKTAYQSNTVAACSPFVLQFLQGRTLTLGALNLQYFFDHPESLSLLRSIHFPIRGNKTSPRAHFSVLETCFDKSQVPTIDQDYASAFEPMNEWERNLAEKEDNVKSYMDMQRRASPDLSTGYWKLSPKQYKIPCLEVDVNDIDVVGQDMLEILMTVFSASQRIELHLNHSRGFIESIRPALELSKASVTKCSISKLELSAAEQELLLTLPSLESLEVSGTIQSQDQIFPNLDKFLCLKELSVDLEGNINVFSVIPEEFPNFHHMEKLLIQISAEYDPSKLVKLIQNSPNLHVFHLKCNFFSDFGSLMTMLVSCKKLTEIKFSDSFFQAVPFVASLPNFISLKILNLEGQQFPDEETSEKFAYILGSLSNLEELILPTGDGIYRVAKLIIQQCQQLHCLRVLSFFKTLNDDSVVEIAKVAISGGFQKLENLKLSINHKITEEGYRNFFQALDNMPNLQELDISRHFTECIKAQATTVKSLSQCVLRLPRLIRLNMLSWLLDADDIALLNVMKERHPQSKYLTILQKWILPFSPIIQK

SEQ ID NO: 7359 - protein, 1241 aa, Homo sapiens
MPLHIGDFVWDSKVHSLQSSLNIFSLLPTKGRTEHLFFSHILSFHWPAFSSIRLELWINLRCEFLRSKKSSEEITQYIQSYKGFVDITGEHFVNSWVQRELPMASAYCNDSIFAYEELRLDSFKDWPRESAVGVAALAKAGLFYTGIKDIVQCFSCGGCLEKWQEGDDPLDDHTRCFPNCPFLQNMKSSAEVTPDLQSRGELCELLETTSESNLEDSIAVGPIVPEMAQGEAQWFQEAKNLNEQLRAAYTSASFRHMSLLDISSDLATDHLLGCDLSIASKHISKPVQEPLVLPEVFGNLNSVMCVEGEAGSGKTVLLKKIAFLWASGCCPLLNRFQLVFYLSLSSTRPDEGLASIICDQLLEKEGSVTEMCVRNIIQQLKNQVLFLLDDYKEICSIPQVIGKLIQKNHLSRTCLLIAVRTNRARDIRRYLETILEIKAFPFYNTVCILRKLFSHNMTRLRKFMVYFGKNQSLQKIQKTPLFVAAICAHWFQYPFDPSFDDVAVFKSYMERLSLRNKATAEILKATVSSCGELALKGFFSCCFEFNDDDLAEAGVDEDEDLTMCLMSKFTAQRLRPFYRFLSPAFQEFLAGMRLIELLDSDRQEHQDLGLYHLKQINSPMMTVSAYNNFLNYVSSLPSTKAGPKIVSHLLHLVDNKESLENISENDDYLKHQPEISLQMQLLRGLWQICPQAYFSMVSEHLLVLALKTAYQSNTVAACSPFVLQFLQGRTLTLGALNLQYFFDHPESLSLLRSIHFPIRGNKTSPRAHFSVLETCFDKSQVPTIDQDYASAFEPMNEWERNLAEKEDNVKSYMDMQRRASPDLSTGYWKLSPKQYKIPCLEVDVNDIDVVGQDMLEILMTVFSASQRIELHLNHSRGFIESIRPALELSKASVTKCSISKLELSAAEQELLLTLPSLESLEVSGTIQSQDQIFPNLDKFLCLKELSVDLEGNINVFSVIPEEFPNFHHMEKLLIQISAEYDPSKLVKLIQNSPNLHVFHLKCNFFSDFGSLMTMLVSCKKLTEIKFSDSFFQAVPFVASLPNFISLKILNLEGQQFPDEETSEKFAYILGSLSNLEELILPTGDGIYRVAKLIIQQCQQLHCLRVLSFFKTLNDDSVVEIAKVAISGGFQKLENLKLSINHKITEEGYRNFFQALDNMPNLQELDISRHFTECIKAQATTVKSLSQCVLRLPRLIRLNMLSWLLDADDIALLNVMKERHPQSKYLTILQKWILPFSPIIQK

SEQ ID NO: 7360 - protein, 1403 aa, Homo sapiens; identical to SEQ ID NO: 7358

SEQ ID NO: 7361 - protein, 1241 aa, Homo sapiens; identical to SEQ ID NO: 7359

SEQ ID NO: 7362 - protein, 298 aa, Homo sapiens
MVTPALQMKKPKQFCRRMGQKKQRPARAGQPHSSSDAAQAPAEQPHSSSDAAQAPCPRERCLGPPTTPGPYRSIYFSSPKGHLTRLGLEFFDQPAVPLARAFLGQVLVRRLPNGTELRGRIVETEAYLGPEDEAAHSRGGRQTPRNRGMFMKPGTLYVYIIYGMYFCMNISSQGDGACVLLRALEPLEGLETMRQLRSTLRKGTASRVLKDRELCSGPSKLCQALAINKSFDQRDLAQDEAVWLERGPLEPSEPAVVAAARVGVGHAGEWARKPLRFYVRGSPWVSVVDRVAEQDTQA

SEQ ID NO: 7363 - protein, 293 aa, Homo sapiens
MPARSGAQFCRRMGQKKQRPARAGQPHSSSDAAQAPAEQPHSSSDAAQAPCPRERCLGPPTTPGPYRSIYFSSPKGHLTRLGLEFFDQPAVPLARAFLGQVLVRRLPNGTELRGRIVETEAYLGPEDEAAHSRGGRQTPRNRGMFMKPGTLYVYIIYGMYFCMNISSQGDGACVLLRALEPLEGLETMRQLRSTLRKGTASRVLKDRELCSGPSKLCQALAINKSFDQRDLAQDEAVWLERGPLEPSEPAVVAAARVGVGHAGEWARKPLRFYVRGSPWVSVVDRVAEQDTQA

SEQ ID NO: 7364 - protein, 281 aa, Homo sapiens
MGQKKQRPARAGQPHSSSDAAQAPAEQPHSSSDAAQAPCPRERCLGPPTTPGPYRSIYFSSPKGHLTRLGLEFFDQPAVPLARAFLGQVLVRRLPNGTELRGRIVETEAYLGPEDEAAHSRGGRQTPRNRGMFMKPGTLYVYIIYGMYFCMNISSQGDGACVLLRALEPLEGLETMRQLRSTLRKGTASRVLKDRELCSGPSKLCQALAINKSFDQRDLAQDEAVWLERGPLEPSEPAVVAAARVGVGHAGEWARKPLRFYVRGSPWVSVVDRVAEQDTQA

SEQ ID NO: 7365 - protein, 251 aa, Homo sapiens
MGQKKQRPARAGQPHSSSDAAQAPAEQPHSSSDAAQAPCPRERCLGPPTTPGPYRSIYFSSPKGHLTRLGLEFFDQPAVPLARAFLGQVLVRRLPNGTELRGRIVETEAYLGPEDEAAHSRGGRQTPRNRGMFMKPGTLYVYIIYGMYFCMNISSQGDGACVLLRALEPLEGLETMRQLRSTLRKGTASRVLKDRELCSGPSKLCQALAINKSFDQRDLAQDEAVWLERGPLEPSEPAVVAAARVGVGHAG

SEQ ID NO: 7366 - protein, 347 aa, Homo sapiens
MHAHCLPFLLHAWWALLQAGAATVATALLRTRGQPSSPSPLAYMLSLYRDPLPRADIIRSLQAEDVAVDGQNWTFAFDFSFLSQQEDLAWAELRLQLSSPVDLPTEGSLAIEIFHQPKPDTEQASDSCLERFQMDLFTVTLSQVTFSLGSMVLEVTRPLSKWLKHPGALEKQMSRVAGECWPRPPTPPATNVLLMLYSNLSQEQRQLGGSTLLWEAESSWRAQEGQLSWEWGKRHRRHHLPDRSQLCRKVKFQVDFNLIGWGSWIIYPKQYNAYRCEGECPNPVGEEFHPTNHAYIQSLLKRYQPHRVPSTCCAPVKTKPLSMLYVDNGRVLLDHHKDMIVEECGCL

SEQ ID NO: 7367 - protein, 292 aa, Homo sapiens
DQQLGIQTKDVAVDGQNWTFAFDFSFLSQQEDLAWAELRLQLSSPVDLPTEGSLAIEIFHQPKPDTEQASDSCLERFQMDLFTVTLSQVTFSLGSMVLEVTRPLSKWLKHPGALEKQMSRVAGECWPRPPTPPATNVLLMLYSNLSQEQRQLGGSTLLWEAESSWRAQEGQLSWEWGKRHRRHHLPDRSQLCRKVKFQVDFNLIGWGSWIIYPKQYNAYRCEGECPNPVGEEFHPTNHAYIQSLLKRYQPHRVPSTCCAPVKTKPLSMLYVDNGRVLLDHHKDMIVEECGCL

SEQ ID NO: 7368 - protein, 177 aa, Homo sapiens
MVLLSTLGIVFQGEGPPISSCDTGTMANCERTFIAIKPDGVQRGLVGEIIKRFEQKGFRLVGLKFMQASEDLLKEHYVDLKDRPFFAGLVKYMHSGPVVAMVWEGLNVVKTGRVMLGETNPADSKPGTIRGDFCIQVGRNIIHGSDSVESAEKEIGLWFHPEELVDYTSCAQNWIYE

SEQ ID NO: 7369 - protein, 177 aa, Homo sapiens; identical to SEQ ID NO: 7368

SEQ ID NO: 7370 - protein, 152 aa, Homo sapiens
MANCERTFIAIKPDGVQRGLVGEIIKRFEQKGFRLVGLKFMQASEDLLKEHYVDLKDRPFFAGLVKYMHSGPVVAMVWEGLNVVKTGRVMLGETNPADSKPGTIRGDFCIQVGRNIIHGSDSVESAEKEIGLWFHPEELVDYTSCAQNWIYE

SEQ ID NO: 7371 - protein, 60 aa, Homo sapiens
MVLLSTLGIVFQGEGPPISSCDTGTMANCERTFIAIKPDGVQRGLVGEIIKRFEQKGFRL

SEQ ID NO: 7372 - protein, 187 aa, Homo sapiens
MGGLFWRSALRGLRCGPRAPGPSLLVRHGSGGPSWTRERTLVAVKPDGVQRRLVGDVIQRFERRGFTLVGMKMLQAPESVLAEHYQDLRRKPFYPALIRYMSSGPVVAMVWEGYNVVRASRAMIGHTDSAEAAPGTIRGDFSVHISRNVIHASDSVEGAQREIQLWFQSSELVSWADGGQHSSIHPA

SEQ ID NO: 7373 - protein, 195 aa, Homo sapiens
MGGLFWRSALRGLRCGPRAPGPSLLVRHGSGLPPSALKRGPSWTRERTLVAVKPDGVQRRLVGDVIQRFERRGFTLVGMKMLQAPESVLAEHYQDLRRKPFYPALIRYMSSGPVVAMVWEGYNVVRASRAMIGHTDSAEAAPGTIRGDFSVHISRNVIHASDSVEGAQREIQLWFQSSELVSWADGGQHSSIHPA

SEQ ID NO: 7374 - protein, 117 aa, Homo sapiens
MKMLQAPESVLAEHYQDLRRKPFYPALIRYMSSGPVVAMVWEGYNVVRASRAMIGHTDSAEAAPGTIRGDFSVHISRNVIHASDSVEGAQREIQLWFQSSELVSWADGGQHSSIHPA

SEQ ID NO: 7375 - protein, 169 aa, Homo sapiens
  VARIANT 1: note = MOD_RES - Any amino acid
XWRSALRGLRCGPRAPGPSLLVRHGSGGPSWTRERTLVAVKPDGVQRRLVGDVIQRFERRGFTLVGMKMLQAPESVLAEHYQDLRRKPFYPALIRYMSSGPVVAMVWEGYNVVRASRAMIGHTDSAEAAPGTIRGDFSVHISSHRLAPLDRGQREQQMVPGIPQGAHEA

SEQ ID NO: 7376 - protein, 233 aa, Homo sapiens
MGGLFWRSALRGLRCGPRAPGPSLLVRHGSGGPSWTRERTLVAVKPDGVQRRLVGDVIQRFERRGFTLVGMKMLQAPESVLAEHYQDLRRKPFYPALIRYMSSGPVVAMVWEGYNVVRASRAMIGHTDSAEAAPGTIRGDFSVHISRNVIHASDSVEGAQREIQLWFQSSELSPTGAPWPSRRPTWRGTTVSPRTATSSARTCCGTKWPSSQEAALGLGSGLLRFSCGTAAIR

SEQ ID NO: 7377 - protein, 117 aa, Homo sapiens; identical to SEQ ID NO: 7374

SEQ ID NO: 7378 - protein, 37 aa, Homo sapiens
MKMLQAPESVLAEHYQDLRRKPFYPALIRYMSSGPVV

SEQ ID NO: 7379 - protein, 64 aa, Homo sapiens
MFLQYYLNEQGDRVYTLKKFDPMGQQTCSAHPARFSPDDKYSRHRITIKKRFKVLMTQQPRPVL

SEQ ID NO: 7380 - protein, 2555 aa, Homo sapiens
MPPLLAPLLCLALLPALAARGPRCSQPGETCLNGGKCEAANGTEACVCGGAFVGPRCQDPNPCLSTPCKNAGTCHVVDRRGVADYACSCALGFSGPLCLTPLDNACLTNPCRNGGTCDLLTLTEYKCRCPPGWSGKSCQQADPCASNPCANGGQCLPFEASYICHCPPSFHGPTCRQDVNECGQKPGLCRHGGTCHNEVGSYRCVCRATHTGPNCERPYVPCSPSPCQNGGTCRPTGDVTHECACLPGFTGQNCEENIDDCPGNNCKNGGACVDGVNTYNCRCPPEWTGQYCTEDVDECQLMPNACQNGGTCHNTHGGYNCVCVNGWTGEDCSENIDDCASAACFHGATCHDRVASFYCECPHGRTGLLCHLNDACISNPCNEGSNCDTNPVNGKAICTCPSGYTGPACSQDVDECSLGANPCEHAGKCINTLGSFECQCLQGYTGPRCEIDVNECVSNPCQNDATCLDQIGEFQCICMPGYEGVHCEVNTDECASSPCLHNGRCLDKINEFQCECPTGFTGHLCQYDVDECASTPCKNGAKCLDGPNTYTCVCTEGYTGTHCEVDIDECDPDPCHYGSCKDGVATFTCLCRPGYTGHHCETNINECSSQPCRHGGTCQDRDNAYLCFCLKGTTGPNCEINLDDCASSPCDSGTCLDKIDGYECACEPGYTGSMCNINIDECAGNPCHNGGTCEDGINGFTCRCPEGYHDPTCLSEVNECNSNPCVHGACRDSLNGYKCDCDPGWSGTNCDINNNECESNPCVNGGTCKDMTSGYVCTCREGFSGPNCQTNINECASNPCLNQGTCIDDVAGYKCNCLLPYTGATCEVVLAPCAPSPCRNGGECRQSEDYESFSCVCPTGWQGQTCEVDINECVLSPCRHGASCQNTHGGYRCHCQAGYSGRNCETDIDDCRPNPCHNGGSCTDGINTAFCDCLPGFRGTFCEEDINECASDPCRNGANCTDCVDSYTCTCPAGFSGIHCENNTPDCTESSCFNGGTCVDGINSFTCLCPPGFTGSYCQHDVNECDSQPCLHGGTCQDGCGSYRCTCPQGYTGPNCQNLVHWCDSSPCKNGGKCWQTHTQYRCECPSGWTGLYCDVPSVSCEVAAQRQGVDVARLCQHGGLCVDAGNTHHCRCQAGYTGSYCEDLVDECSPSPCQNGATCTDYLGGYSCKCVAGYHGVNCSEEIDECLSHPCQNGGTCLDLPNTYKCSCPRGTQGVHCEINVDDCNPPVDPVSRSPKCFNNGTCVDQVGGYSCTCPPGFVGERCEGDVNECLSNPCDARGTQNCVQRVNDFHCECRAGHTGRRCESVINGCKGKPCKNGGTCAVASNTARGFICKCPAGFEGATCENDARTCGSLRCLNGGTCISGPRSPTCLCLGPFTGPECQFPASSPCLGGNPCYNQGTCEPTSESPFYRCLCPAKFNGLLCHILDYSFGGGAGRDIPPPLIEEACELPECQEDAGNKVCSLQCNNHACGWDGGDCSLNFNDPWKNCTQSLQCWKYFSDGHCDSQCNSAGCLFDGFDCQRAEGQCNPLYDQYCKDHFSDGHCDQGCNSAECEWDGLDCAEHVPERLAAGTLVVVVLMPPEQLRNSSFHFLRELSRVLHTNVVFKRDAHGQQMIFPYYGREEELRKHPIKRAAEGWAAPDALLGQVKASLLPGGSEGGRRRRELDPMDVRGSIVYLEIDNRQCVQASSQCFQSATDVAAFLGALASLGSLNIPYKIEAVQSETVEPPPPAQLHFMYVAAAAFVLLFFVGCGVLLSRKRRRQHGQLWFPEGFKVSEASKKKRREPLGEDSVGLKPLKNASDGALMDDNQNEWGDEDLETKKFRFEEPVVLPDLDDQTDHRQWTQQHLDAADLRMSAMAPTPPQGEVDADCMDVNVRGPDGFTPLMIASCSGGGLETGNSEEEEDAPAVISDFIYQGASLHNQTDRTGETALHLAARYSRSDAAKRLLEASADANIQDNMGRTPLHAAVSADAQGVFQILIRNRATDLDARMHDGTTPLILAARLAVEGMLEDLINSHADVNAVDDLGKSALHWAAAVNNVDAAVVLLKNGANKDMQNNREETPLFLAAREGSYETAKVLLDHFANRDITDHMDRLPRDIAQERMHHDIVRLLDEYNLVRSPQLHGAPLGGTPTLSPPLCSPNGYLGSLKPGVQGKKVRKPSSKGLACGSKEAKDLKARRKKSQDGKGCLLDSSGMLSPVDSLESPHGYLSDVASPPLLPSPFQQSPSVPLNHLPGMPDTHLGIGHLNVAAKPEMAALGGGGRLAFETGPPRLSHLPVASGTSTVLGSSSGGALNFTVGGSTSLNGQCEWLSRLQSGMVPNQYNPLRGSVAPGPLSTQAPSLQHGMVGPLHSSLAASALSQMMSYQGLPSTRLATQPHLVQTQQVQPQNLQMQQQNLQPANIQQQQSLQPPPPPPQPHLGVSSAASGHLGRSFLSGEPSQADVQPLGPSSLAVHTILPQESPALPTSLPSSLVPPVTAAQFLTPPSQHSYSSPVDNTPSHQLQVPEHPFLTPSPESPDQWSSSSPHSNVSDWSEGVSSPPTSMQSQIARIPEAFK

SEQ ID NO: 7381 - protein, 2003 aa, Homo sapiens
MQPPSLLLLLLLLLLLCVSVVRPRGLLCGSFPEPCANGGTCLSLSLGQGTCQCAPGFLGETCQFPDPCQNAQLCQNGGSCQALLPAPLGLPSSPSPLTPSFLCTCLPGFTGERCQAKLEDPCPPSFCSKRGRCHIQASGRPQCSCMPGWTGEQCQLRDFCSANPCVNGGVCLATYPQIQCHCPPGFEGHACERDVNECFQDPGPCPKGTSCHNTLGSFQCLCPVGQEGPRCELRAGPCPPRGCSNGGTCQLMPEKDSTFHLCLCPPGFIGPDCEVNPDNCVSHQCQNGGTCQDGLDTYTCLCPETWTGWDCSEDVDECETQGPPHCRNGGTCQNSAGSFHCVCVSGWGGTSCEENLDDCIAATCAPGSTCIDRVGSFSCLCPPGRTGLLCHLEDMCLSQPCHGDAQCSTNPLTGSTLCLCQPGYSGPTCHQDLDECLMAQQGPSPCEHGGSCLNTPGSFNCLCPPGYTGSRCEADHNECLSQPCHPGSTCLDLLATFHCLCPPGLEGQLCEVETNECASAPCLNHADCHDLLNGFQCICLPGFSGTRCEEDIDECRSSPCANGGQCQDQPGAFHCKCLPGFEGPRCQTEVDECLSDPCPVGASCLDLPGAFFCLCPSGFTGQLCEVPLCAPNLCQPKQICKDQKDKANCLCPDGSPGCAPPEDNCTCHHGHCQRSSCVCDVGWTGPECEAELGGCISAPCAHGGTCYPQPSGYNCTCPTGYTGPTCSEEMTACHSGPCLNGGSCNPSPGGYYCTCPPSHTGPQCQTSTDYCVSAPCFNGGTCVNRPGTFSCLCAMGFQGPRCEGKLRPSCADSPCRNRATCQDSPQGPRCLCPTVYTGGSCQTLMDLCAQKPCPRNSHCLQTGPSFHCLCLQGWTGPLCNLPLSSCQKAALSQGIDVSSLCHNGGLCVDSGPSYFCHCPPGFQGSLCQDHVNPCESRPCQNGATCMAQPSGYLCQCAPGYDGQNCSKELDACQSQPCHNHGTCTPKPGGFHCACPPGFVGLRCEGDVDECLDQPCHPTGTAACHSLANAFYCQCLPGHTGQWCEVEIDPCHSQPCFHGGTCEATAGSPLGFICHCPKGFEGPTCSHRAPSCGFHHCHHGGLCLPSPKPGFPPRCACLSGYGGPDCLTPPAPKGCGPPSPCLYNGSCSETTGLGGPGFRCSCPHSSPGPRCQKPGAKGCEGRSGDGACDAGCSGPGGNWDGGDCSLGVPDPWKGCPSHSRCWLLFRDGQCHPQCDSEECLFDGYDCETPPACTPAYDQYCHDHFHNGHCEKGCNTAECGWDGGDCRPEDGDPEWGPSLALLVVLSPPALDQQLFALARVLSLTLRVGLWVRKDRDGRDMVYPYPGARAEEKLGGTRDPTYQERAAPQTQPLGKETDSLSAGFVVVMGVDLSRCGPDHPASRCPWDPGLLLRFLAAMAAVGALEPLLPGPLLAVHPHAGTAPPANQLPWPVLCSPVAGVILLALGALLVLQLIRRRRREHGALWLPPGFTRRPRTQSAPHRRRPPLGEDSIGLKALKPKAEVDEDGVVMCSGPEEGEEVGQAEETGPPSTCQLWSLSGGCGALPQAAMLTPPQESEMEAPDLDTRGPDGVTPLMSAVCCGEVQSGTFQGAWLGCPEPWEPLLDGGACPQAHTVGTGETPLHLAARFSRPTAARRLLEAGANPNQPDRAGRTPLHAAVAADAREVCQLLLRSRQTAVDARTEDGTTPLMLAARLAVEDLVEELIAAQADVGARDKWGKTALHWAAAVNNARAARSLLQAGADKDAQDNREQTPLFLAAREGAVEVAQLLLGLGAARELRDQAGLAPADVAHQRNHWDLLTLLEGAGPPEARHKATPGREAGPFPRARTVSVSVPPHGGGALPRCRTLSAGAGPRGGGACLQARTWSVDLAARGGGAYSHCRSLSGVGAGGGPTPRGRRFSAGMRGPRPNPAIMRGRYGVAAGRGGRVSTDDWPCDWVALGACGSASNIPIPPPCLTPSPERGSPQLDCGPPALQEMPINQGGEGKK

SEQ ID NO: 7382 - protein, 186 aa, Homo sapiens
MSAVCCGEVQSGTFQGAWLGCPEPWEPLLDGGACPQAHTVGTGETPLHLAARFSRPTAARRLLEAGANPNQPDRAGRTPLHAAVAADAREVCQLLLRSRQTAVDARTEDGTTPLMLAARLAVEDLVEELIAAQADVGARDKWGADAAIPGGAGRSGGSSPATAGAGGSPRAAGPGWASAGGRRSPT

SEQ ID NO: 7383 - protein, 312 aa, Homo sapiens
MCSPQESGMTALSARMLTRSRSLGPGAGPRGCREEPGPLRRREAAAEARKSHSPVKRPRKAQRLRVAYEGSDSEKGEGAEPLKVPVWEPQDWQQQLVNIRAMRNKKDAPVDHLGTEHCYDSSAPPKVRRYQVLLSLMLSSQTKDQVTAGAMQRLRARGLTVDSILQTDDATLGKLIYPVGFWRSKVKYIKQTSAILQQHYGGDIPASVAELVALPGVGPKMAHLAMAVAWGTVSGIAVDTHVHRIANRLRWTKKATKSPEETRAALEEWLPRELWHEINGLLVGFGQQTCLPVHPRCHACLNQALCPAAQGL

SEQ ID NO: 7384 - protein, 1455 aa, Homo sapiens
MGGACSSFTTSSSPTIYSTSVTDSKAMQVESCSSAVGVSNRGVSEKQLTSNTVQQHPSTPKRHTVLYISPPPEDLLDNSRMSCQDEGCGLESEQSCSMWMEDSPSNFSNMSTSSYNDNTEVPRKSRKRNPKQRPGVKRRDCEESNMDIFDADSAKAPHYVLSQLTTDNKGNSKAGNGTLENQKGTGVKKSPMLCGQYPVKSEGKELKIVVQPETQHRARYLTEGSRGSVKDRTQQGFPTVKLEGHNEPVVLQVFVGNDSGRVKPHGFYQACRVTGRNTTPCKEVDIEGTTVIEVGLDPSNNMTLAVDCVGILKLRNADVEARIGIAGSKKKSTRARLVFRVNIMRKDGSTLTLQTPSSPILCTQPAGVPEILKKSLHSCSVKGEEEVFLIGKNFLKGTKVIFQENVSDENSWKSEAEIDMELFHQNHLIVKVPPYHDQHITLPVSVGIYVVTNAGRSHDVQPFTYTPDPAAAGALNVNVKKEISSPARPCSFEEAMKAMKTTGCNLDKVNIIPNALMTPLIPSSMIKSEDVTPMEVTAEKRSSTIFKTTKSVGSTQQTLENISNIAGNGSFSSPSSSHLPSENEKQQQIQPKAYNPETLTTIQTQDISQPGTFPAVSASSQLPNSDALLQQATQFQTRETQSREILQSDGTVVNLSQLTEASQQQQQSPLQEQAQTLQQQISSNIFPSPNSVSQLQNTIQQLQAGSFTGSTASGSSGSVDLVQQVLEAQQQLSSVLFSAPDGNENVQEQLSADIFQQVSQIQSGVSPGMFSSTEPTVHTRPDNLLPGRAESVHPQSENTLSNQQQQQQQQQQVMESSAAMVMEMQQSICQAAAQIQSELFPSTASANGNLQQSPVYQQTSHMMSALSTNEDMQMQCELFSSPPAVSGNETSTTTTQQVATPGTTMFQTSSSGDGEETGTQAKQIQNSVFQTMVQMQHSGDNQPQVNLFSSTKSMMSVQNSGTQQQGNGLFQQGNEMMSLQSGNFLQQSSHSQAQLFHPQNPIADAQNLSQETQGSLFHSPNPIVHSQTSTTSSEQMQPPMFHSQSTIAVLQGSSVPQDQQSTNIFLSQSPMNNLQTNTVAQEAFFAAPNSISPLQSTSNSEQQAAFQQQAPISHIQTPMLSQEQAQPPQQGLFQPQVALGSLPPNPMPQSQQGTMFQSQHSIVAMQSNSPSQEQQQQQQQQQQQQQQQQQSILFSNQNTMATMASPKQPPPNMIFNPNQNPMANQEQQNQSIFHQQSNMAPMNQEQQPMQFQSQSTVSSLQNPGPTQSESSQTPLFHSSPQIQLVQGSPSSQEQQVTLFLSPASMSALQTSINQQDMQQSPLYSPQNNMPGIQGATSSPQPQATLFHNTAGGTMNQLQNSPGSSQQTSGMFLFGIQNNCSQLLTSGPATLPDQLMAISQPGQPQNEGQPPVTTLLSQQMPENSPLASSINTNQNIEKIDLLVSLQNQGNNLTGSF

SEQ ID NO: 7385 - protein, 1548 aa, Homo sapiens
MPSDFISLLSADLDLESPKSLYSRDSLKLHPSQNFHRAGLLEESVYDLLPKELQLPPSRETSVASMSQTSGGEAGSPPPAVVAADASSAPSSSSMGGACSSFTTSSSPTIYSTSVTDSKAMQVESCSSAVGVSNRGVSEKQLTSNTVQQHPSTPKRHTVLYISPPPEDLLDNSRMSCQDEGCGLESEQSCSMWMEDSPSNFSNMSTSSYNDNTEVPRKSRKRNPKQRPGVKRRDCEESNMDIFDADSAKAPHYVLSQLTTDNKGNSKAGNGTLENQKGTGVKKSPMLCGQYPVKSEGKELKIVVQPETQHRARYLTEGSRGSVKDRTQQGFPTVKLEGHNEPVVLQVFVGNDSGRVKPHGFYQACRVTGRNTTPCKEVDIEGTTVIEVGLDPSNNMTLAVDCVGILKLRNADVEARIGIAGSKKKSTRARLVFRVNIMRKDGSTLTLQTPSSPILCTQPAGVPEILKKSLHSCSVKGEEEVFLIGKNFLKGTKVIFQENVSDENSWKSEAEIDMELFHQNHLIVKVPPYHDQHITLPVSVGIYVVTNAGRSHDVQPFTYTPDPAAGALNVNVKKEISSPARPCSFEEAMKAMKTTGCNLDKVNIIPNALMTPLIPSSMIKSEDVTPMEVTAEKRSSTIFKTTKSVGSTQQTLENISNIAGNGSFSSPSSSHLPSENEKQQQIQPKAYNPETLTTIQTQDISQPGTFPAVSASSQLPNSDALLQQATQFQTRETQSREILQSDGTVVNLSQLTEASQQQQQSPLQEQAQTLQQQISSNIFPSPNSVSQLQNTIQQLQAGSFTGSTASGSSGSVDLVQQVLEAQQQLSSVLFSAPDGNENVQEQLSADIFQQVSQIQSGVSPGMFSSTEPTVHTRPDNLLPGRAESVHPQSENTLSNQQQQQQQQQQVMESSAAMVMEMQQSICQAAAQIQSELFPSTASANGNLQQSPVYQQTSHMMSALSTNEDMQMQCELFSSPPAVSGNETSTTTTQQVATPGTTMFQTSSSGDGEETGTQAKQIQNSVFQTMVQMQHSGDNQPQVNLFSSTKSMMSVQNSGTQQQGNGLFQQGNEMMSLQSGNFLQQSSHSQAQLFHPQNPIADAQNLSQETQGSLFHSPNPIVHSQTSTTSSEQMQPPMFHSQSTIAVLQGSSVPQDQQSTNIFLSQSPMNNLQTNTVAQEAFFAAPNSISPLQSTSNSEQQAAFQQQAPISHIQTPMLSQEQAQPPQQGLFQPQVALGSLPPNPMPQSQQGTMFQSQHSIVAMQSNSPSQEQQQQQQQQQQQQQQQQQSILFSNQNTMATMASPKQPPPNMIFNPNQNPMANQEQQNQSIFHQQSNMAPMNQEQQPMQFQSQSTVSSLQNPGPTQSESSQTPLFHSSPQIQLVQGSPSSQEQQVTLFLSPASMSALQTSINQQDMQQSPLYSPQNNMPGIQGATSSPQPQATLFHNTAGGTMNQLQNSPGSSQQTSGMFLFGIQNNCSQLLTSGPATLPDQLMAISQPGQPQNEGQPPVTTLLSQQMPENSPLASSINTNQNIEKIDLLVSLQNQGNNLTGSF

SEQ ID NO: 7386 - protein, 1455 aa, Homo sapiens; identical to SEQ ID NO: 7384

SEQ ID NO: 7387 - protein, 1531 aa, Homo sapiens
MPSDFISLLSADLDLESPKSLYSRESVYDLLPKELQLPPSRETSVASMSQTSGGEAGSPPPAVVAADASSAPSSSSMGGACSSFTTSSSPTIYSTSVTDSKAMQVESCSSAVGVSNRGVSEKQLTSNTVQQHPSTPKRHTVLYISPPPEDLLDNSRMSCQDEGCGLESEQSCSMWMEDSPSNFSNMSTSSYNDNTEVPRKSRKRNPKQRPGVKRRDCEESNMDIFDADSAKAPHYVLSQLTTDNKGNSKAGNGTLENQKGTGVKKSPMLCGQYPVKSEGKELKIVVQPETQHRARYLTEGSRGSVKDRTQQGFPTVKLEGHNEPVVLQVFVGNDSGRVKPHGFYQACRVTGRNTTPCKEVDIEGTTVIEVGLDPSNNMTLAVDCVGILKLRNADVEARIGIAGSKKKSTRARLVFRVNIMRKDGSTLTLQTPSSPILCTQPAGVPEILKKSLHSCSVKGEEEVFLIGKNFLKGTKVIFQENVSDENSWKSEAEIDMELFHQNHLIVKVPPYHDQHITLPVSVGIYVVTNAGRSHDVQPFTYTPDPAAAGALNVNVKKEISSPARPCSFEEAMKAMKTTGCNLDKVNIIPNALMTPLIPSSMIKSEDVTPMEVTAEKRSSTIFKTTKSVGSTQQTLENISNIAGNGSFSSPSSSHLPSENEKQQQIQPKAYNPETLTTIQTQDISQPGTFPAVSASSQLPNSDALLQQATQFQTRETQSREILQSDGTVVNLSQLTEASQQQQQSPLQEQAQTLQQQISSNIFPSPNSVSQLQNTIQQLQAGSFTGSTASGSSGSVDLVQQVLEAQQQLSSVLFSAPDGNENVQEQLSADIFQQVSQIQSGVSPGMFSSTEPTVHTRPDNLLPGRAESVHPQSENTLSNQQQQQQQQQQVMESSAAMVMEMQQSICQAAAQIQSELFPSTASANGNLQQSPVYQQTSHMMSALSTNEDMQMQCELFSSPPAVSGNETSTTTTQQVATPGTTMFQTSSSGDGEETGTQAKQIQNSVFQTMVQMQHSGDNQPQVNLFSSTKSMMSVQNSGTQQQGNGLFQQGNEMMSLQSGNFLQQSSHSQAQLFHPQNPIADAQNLSQETQGSLFHSPNPIVHSQTSTTSSEQMQPPMFHSQSTIAVLQGSSVPQDQQSTNIFLSQSPMNNLQTNTVAQEAFFAAPNSISPLQSTSNSEQQAAFQQQAPISHIQTPMLSQEQAQPPQQGLFQPQVALGSLPPNPMPQSQQGTMFQSQHSIVAMQSNSPSQEQQQQQQQQQQQQQQQQQSILFSNQNTMATMASPKQPPPNMIFNPNQNPMANQEQQNQSIFHQQSNMAPMNQEQQPMQFQSQSTVSSLQNPGPTQSESSQTPLFHSSPQIQLVQGSPSSQEQQVTLFLSPASMSALQTSINQQDMQQSPLYSPQNNMPGIQGATSSPQPQATLFHNTAGGTMNQLQNSPGSSQQTSGMFLFGIQNNCSQLLTSGPATLPDQLMAISQPGQPQNEGQPPVTTLLSQQMPENSPLASSINTNQNIEKIDLLVSLQNQGNNLTGSF

SEQ ID NO: 7388 - protein, 1455 aa, Homo sapiens; identical to SEQ ID NO: 7384

SEQ ID NO: 7389 - protein, 1548 aa, Homo sapiens; identical to SEQ ID NO: 7385

SEQ ID NO: 7390 - protein, 1549 aa, Homo sapiens
MPSDFISLLSADLDLESPKSLYSRDSLKLHPSQNFHRAGLLEESVYDLLPKELQLPPSRETSVASMSQTSGGEAGSPPPAVVAADASSAPSSSSMGGACSSFTTSSSPTIYSTSVTDSKAMQVESCSSAVGVSNRGVSEKQLTSNTVQQHPSTPKRHTVLYISPPPEDLLDNSRMSCQDEGCGLESEQSCSMWMEDSPSNFSNMSTSSYNDNTEVPRKSRKRNPKQRPGVKRRDCEESNMDIFDADSAKAPHYVLSQLTTDNKGNSKAGNGTLENQKGTGVKKSPMLCGQYPVKSEGKELKIVVQPETQHRARYLTEGSRGSVKDRTQQGFPTVKLEGHNEPVVLQVFVGNDSGRVKPHGFYQACRVTGRNTTPCKEVDIEGTTVIEVGLDPSNNMTLAVDCVGILKLRNADVEARIGIAGSKKKSTRARLVFRVNIMRKDGSTLTLQTPSSPILCTQPAGVPEILKKSLHSCSVKGEEEVFLIGKNFLKGTKVIFQENVSDENSWKSEAEIDMELFHQNHLIVKVPPYHDQHITLPVSVGIYVVTNAGRSHDVQPFTYTPDPAAAGALNVNVKKEISSPARPCSFEEAMKAMKTTGCNLDKVNIIPNALMTPLIPSSMIKSEDVTPMEVTAEKRSSTIFKTTKSVGSTQQTLENISNIAGNGSFSSPSSSHLPSENEKQQQIQPKAYNPETLTTIQTQDISQPGTFPAVSASSQLPNSDALLQQATQFQTRETQSREILQSDGTVVNLSQLTEASQQQQQSPLQEQAQTLQQQISSNIFPSPNSVSQLQNTIQQLQAGSFTGSTASGSSGSVDLVQQVLEAQQQLSSVLFSAPDGNENVQEQLSADIFQQVSQIQSGVSPGMFSSTEPTVHTRPDNLLPGRAESVHPQSENTLSNQQQQQQQQQQVMESSAAMVMEMQQSICQAAAQIQSELFPSTASANGNLQQSPVYQQTSHMMSALSTNEDMQMQCELFSSPPAVSGNETSTTTTQQVATPGTTMFQTSSSGDGEETGTQAKQIQNSVFQTMVQMQHSGDNQPQVNLFSSTKSMMSVQNSGTQQQGNGLFQQGNEMMSLQSGNFLQQSSHSQAQLFHPQNPIADAQNLSQETQGSLFHSPNPIVHSQTSTTSSEQMQPPMFHSQSTIAVLQGSSVPQDQQSTNIFLSQSPMNNLQTNTVAQEAFFAAPNSISPLQSTSNSEQQAAFQQQAPISHIQTPMLSQEQAQPPQQGLFQPQVALGSLPPNPMPQSQQGTMFQSQHSIVAMQSNSPSQEQQQQQQQQQQQQQQQQQSILFSNQNTMATMASPKQPPPNMIFNPNQNPMANQEQQNQSIFHQQSNMAPMNQEQQPMQFQSQSTVSSLQNPGPTQSESSQTPLFHSSPQIQLVQGSPSSQEQQVTLFLSPASMSALQTSINQQDMQQSPLYSPQNNMPGIQGATSSPQPQATLFHNTAGGTMNQLQNSPGSSQQTSGMFLFGIQNNCSQLLTSGPATLPDQLMAISQPGQPQNEGQPPVTTLLSQQMPENSPLASSINTNQNIEKIDLLVSLQNQGNNLTGSF

SEQ ID NO: 7391 - protein, 716 aa, Homo sapiens
MPSTSFPVPSKFPLGPAAAVFGRGETLGPAPRAGGTMKSAEEEHYGYASSNVSPALPLPTAHSTLPAPCHNLQTSTPGIIPPADHPSGYGAALDGGPAGYFLSSGHTRPDGAPALESPRIEITSCLGLYHNNNQFFHDVEVEDVLPSSKRSPSTATLSLPSLEAYRDPSCLSPASSLSSRSCNSEASSYESNYSYPYASPQTSPWQSPCVSPKTTDPEEGFPRGLGACTLLGSPRHSPSTSPRASVTEESWLGARSSRPASPCNKRKYSLNGRQPPYSPHHSPTPSPHGSPRVSVTDDSWLGNTTQYTSSAIVAAINALTTDSSLDLGDGVPVKSRKTTLEQPPSVALKVEPVGEDLGSPPPPADFAPEDYSSFQHIRKGGFCDQYLAVPQHPYQWAKPKPLSPTSYMSPTLPALDWQLPSHSGPYELRIEVQPKSHHRAHYETEGSRGAVKASAGGHPIVQLHGYLENEPLMLQLFIGTADDRLLRPHAFYQVHRITGKTVSTTSHEAILSNTKVLEIPLLPENSMRAVIDCAGILKLRNSDIELRKGETDIGRKNTRVRLVFRVHVPQPSGRTLSLQVASNPIECSQRSAQELPLVEKQSTDSYPVVGGKKMVLSGHNFLQDSKVIFVEKAPDGHHVWEMEAKTDRDLCKPNSLVVEIPPFRNQRITSPVHVSFYVCNGKRKRSQYQRFTYLPANGNAIFLTVSREHERVGCFF

SEQ ID NO: 7392 - protein, 825 aa, Homo sapiens
MPSTSFPVPSKFPLGPAAAVFGRGETLGPAPRAGGTMKSAEEEHYGYASSNVSPALPLPTAHSTLPAPCHNLQTSTPGIIPPADHPSGYGAALDGGPAGYFLSSGHTRPDGAPALESPRIEITSCLGLYHNNNQFFHDVEVEDVLPSSKRSPSTATLSLPSLEAYRDPSCLSPASSLSSRSCNSEASSYESNYSYPYASPQTSPWQSPCVSPKTTDPEEGFPRGLGACTLLGSPRHSPSTSPRASVTEESWLGARSSRPASPCNKRKYSLNGRQPPYSPHHSPTPSPHGSPRVSVTDDSWLGNTTQYTSSAIVAAINALTTDSSLDLGDGVPVKSRKTTLEQPPSVALKVEPVGEDLGSPPPPADFAPEDYSSFQHIRKGGFCDQYLAVPQHPYQWAKPKPLSPTSYMSPTLPALDWQLPSHSGPYELRIEVQPKSHHRAHYETEGSRGAVKASAGGHPIVQLHGYLENEPLMLQLFIGTADDRLLRPHAFYQVHRITGKTVSTTSHEAILSNTKVLEIPLLPENSMRAVIDCAGILKLRNSDIELRKGETDIGRKNTRVRLVFRVHVPQPSGRTLSLQVASNPIECSQRSAQELPLVEKQSTDSYPVVGGKKMVLSGHNFLQDSKVIFVEKAPDGHHVWEMEAKTDRDLCKPNSLVVEIPPFRNQRITSPVHVSFYVCNGKRKRSQYQRFTYLPANVPIIKTEPTDDYEPAPTCGPVSQGLSPLPRPYYSQQLAMPPDPSSCLVAGFPPCPQRSTLMPAAPGVSPKLHDLSPAAYTKGVASPGHCHLGLPQPAGEAPAVQDVPRPVATHPGSPGQPPPALLPQQ

SEQ ID NO: 7393 - protein, 943 aa, Homo sapiens
MPSTSFPVPSKFPLGPAAAVFGRGETLGPAPRAGGTMKSAEEEHYGYASSNVSPALPLPTAHSTLPAPCHNLQTSTPGIIPPADHPSGYGAALDGGPAGYFLSSGHTRPDGAPALESPRIEITSCLGLYHNNNQFFHDVEVEDVLPSSKRSPSTATLSLPSLEAYRDPSCLSPASSLSSRSCNSEASSYESNYSYPYASPQTSPWQSPCVSPKTTDPEEGFPRGLGACTLLGSPRHSPSTSPRASVTEESWLGARSSRPASPCNKRKYSLNGRQPPYSPHHSPTPSPHGSPRVSVTDDSWLGNTTQYTSSAIVAAINALTTDSSLDLGDGVPVKSRKTTLEQPPSVALKVEPVGEDLGSPPPPADFAPEDYSSFQHIRKGGFCDQYLAVPQHPYQWAKPKPLSPTSYMSPTLPALDWQLPSHSGPYELRIEVQPKSHHRAHYETEGSRGAVKASAGGHPIVQLHGYLENEPLMLQLFIGTADDRLLRPHAFYQVHRITGKTVSTTSHEAILSNTKVLEIPLLPENSMRAVIDCAGILKLRNSDIELRKGETDIGRKNTRVRLVFRVHVPQPSGRTLSLQVASNPIECSQRSAQELPLVEKQSTDSYPVVGGKKMVLSGHNFLQDSKVIFVEKAPDGHHVWEMEAKTDRDLCKPNSLVVEIPPFRNQRITSPVHVSFYVCNGKRKRSQYQRFTYLPANVPIIKTEPTDDYEPAPTCGPVSQGLSPLPRPYYSQQLAMPPDPSSCLVAGFPPCPQRSTLMPAAPGVSPKLHDLSPAAYTKGVASPGHCHLGLPQPAGEAPAVQDVPRPVATHPGSPGQPPPALLPQQVSAPPSSSCPPGLEHSLCPSSPSPPLPPATQEPTCLQPCSPACPPATGRPQHLPSTVRRDESPTAGPRLLPEVHEDGSPNLAPIPVTVKREPEELDQLYLDDVNEIIRNDLSSTSTHS

SEQ ID NO: 7394 - protein, 930 aa, Homo sapiens
MTGLEDQEFDFEFLFEFNQRDEGAAAAAPEHYGYASSNVSPALPLPTAHSTLPAPCHNLQTSTPGIIPPADHPSGYGAALDGGPAGYFLSSGHTRPDGAPALESPRIEITSCLGLYHNNNQFFHDVEVEDVLPSSKRSPSTATLSLPSLEAYRDPSCLSPASSLSSRSCNSEASSYESNYSYPYASPQTSPWQSPCVSPKTTDPEEGFPRGLGACTLLGSPRHSPSTSPRASVTEESWLGARSSRPASPCNKRKYSLNGRQPPYSPHHSPTPSPHGSPRVSVTDDSWLGNTTQYTSSAIVAAINALTTDSSLDLGDGVPVKSRKTTLEQPPSVALKVEPVGEDLGSPPPPADFAPEDYSSFQHIRKGGFCDQYLAVPQHPYQWAKPKPLSPTSYMSPTLPALDWQLPSHSGPYELRIEVQPKSHHRAHYETEGSRGAVKASAGGHPIVQLHGYLENEPLMLQLFIGTADDRLLRPHAFYQVHRITGKTVSTTSHEAILSNTKVLEIPLLPENSMRAVIDCAGILKLRNSDIELRKGETDIGRKNTRVRLVFRVHVPQPSGRTLSLQVASNPIECSQRSAQELPLVEKQSTDSYPVVGGKKMVLSGHNFLQDSKVIFVEKAPDGHHVWEMEAKTDRDLCKPNSLVVEIPPFRNQRITSPVHVSFYVCNGKRKRSQYQRFTYLPANVPIIKTEPTDDYEPAPTCGPVSQGLSPLPRPYYSQQLAMPPDPSSCLVAGFPPCPQRSTLMPAAPGVSPKLHDLSPAAYTKGVASPGHCHLGLPQPAGEAPAVQDVPRPVATHPGSPGQPPPALLPQQVSAPPSSSCPPGLEHSLCPSSPSPPLPPATQEPTCLQPCSPACPPATGRPQHLPSTVRRDESPTAGPRLLPEVHEDGSPNLAPIPVTVKREPEELDQLYLDDVNEIIRNDLSSTSTHS

SEQ ID NO: 7395 - protein, 353 aa, Homo sapiens
MLQLFIGTADDRLLRPHAFYQVHRITGKTVSTTSHEAILSNTKVLEIPLLPENSMRAVIDCAGILKLRNSDIELRKGETDIGRKNTRVRLVFRVHVPQPSGRTLSLQVASNPIECSQRSAQELPLVEKQSTDSYPVVGGKKMVLSGHNFLQDSKVIFVEKAPDGHHVWEMEAKTDRDLCKPNSLVVEIPPFRNQRITSPVHVSFYVCNGKRKRSQYQRFTYLPANVPIIKTEPTDDYEPAPTCGPVSQGLSPLPRPYYSQQLAMPPDPSSCLVAGFPPCPQRSTLMPAAPGVSPKLHDLSPAAYTKGVASPGHCHLGLPQPAGEAPAVQDVPRPVATHPGSPGQPPPALLPQQ

SEQ ID NO: 7396 - protein, 907 aa, Homo sapiens
MKSGTLEHYGYASSNVSPALPLPTAHSTLPAPCHNLQTSTPGIIPPADHPSGYGAALDGGPAGYFLSSGHTRPDGAPALESPRIEITSCLGLYHNNNQFFHDVEVEDVLPSSKRSPSTATLSLPSLEAYRDPSCLSPASSLSSRSCNSEASSYESNYSYPYASPQTSPWQSPCVSPKTTDPEEGFPRGLGACTLLGSPRHSPSTSPRASVTEESWLGARSSRPASPCNKRKYSLNGRQPPYSPHHSPTPSPHGSPRVSVTDDSWLGNTTQYTSSAIVAAINALTTDSSLDLGDGVPVKSRKTTLEQPPSVALKVEPVGEDLGSPPPPADFAPEDYSSFQHIRKGGFCDQYLAVPQHPYQWAKPKPLSPTSYMSPTLPALDWQLPSHSGPYELRIEVQPKSHHRAHYETEGSRGAVKASAGGHPIVQLHGYLENEPLMLQLFIGTADDRLLRPHAFYQVHRITGKTVSTTSHEAILSNTKVLEIPLLPENSMRAVIDCAGILKLRNSDIELRKGETDIGRKNTRVRLVFRVHVPQPSGRTLSLQVASNPIECSQRSAQELPLVEKQSTDSYPVVGGKKMVLSGHNFLQDSKVIFVEKAPDGHHVWEMEAKTDRDLCKPNSLVVEIPPFRNQRITSPVHVSFYVCNGKRKRSQYQRFTYLPANVPIIKTEPTDDYEPAPTCGPVSQGLSPLPRPYYSQQLAMPPDPSSCLVAGFPPCPQRSTLMPAAPGVSPKLHDLSPAAYTKGVASPGHCHLGLPQPAGEAPAVQDVPRPVATHPGSPGQPPPALLPQQVSAPPSSSCPPGLEHSLCPSSPSPPLPPATQEPTCLQPCSPACPPATGRPQHLPSTVRRDESPTAGPRLLPEVHEDGSPNLAPIPVTVKREPEELDQLYLDDVNEIIRNDLSSTSTHS

SEQ ID NO: 7397 - protein, 914 aa, Homo sapiens
MTGLEDQEFDFEFLFEFNQRDEGAAAAAPEHYGYASSNVSPALPLPTAHSTLPAPCHNLQTSTPGIIPPADHPSGYGAALDGGPAGYFLSSGHTRPDGAPALESPRIEITSCLGLYHNNNQFFHDVEVEDVLPSSKRSPSTATLSLPSLEAYRDPSCLSPASSLSSRSCNSEASSYESNYSYPYASPQTSPWQSPCVSPKTTDPEEGFPRGLGACTLLGSPRHSPSTSPRASVTEESWLGARSSRPASPCNKRKYSLNGRQPPYSPHHSPTPSPHGSPRVSVTDDSWLGNTTQYTSSAIVAAINALTTDSSLDLGDGVPVKSRKTTLEQPPSVALKVEPVGEDLGSPPPPADFAPEDYSSFQHIRKGGFCDQYLAVPQHPYQWAKPKPLSPTSYMSPTLPALDWQLPSHSGPYELRIEVQPKSHHRAHYETEGSRGAVKASAGGHPIVQLHGYLENEPLMLQLFIGTADDRLLRPHAFYQVHRITGKTVSTTSHEAILSNTKVLEIPLLPENSMRAVIDCAGILKLRNSDIELRKGETDIGRKNTRVRLVFRVHVPQPSGRTLSLQVASNPIECSQRSAQELPLVEKQSTDSYPVVGGKKMVLSGHNFLQDSKVIFVEKAPDGHHVWEMEAKTDRDLCKPNSLVVEIPPFRNQRITSPVHVSFYVCNGKRKRSQYQRFTYLPANVPIIKTEPTDDYEPAPTCGPVSQGLSPLPRPYYSQQLAMPPDPSSCLVAGFPPCPQRSTLMPAAPGVSPKLHDLSPAAYTKGVASPGHCHLGLPQPAGEAPAVQDVPRPVATHPGSPGQPPPALLPQQVSAPPSSSCPPGLEHSLCPSSPSPPLPPATQEPTCLQPCSPACPPATGRPQHLPSTVRRDESPTAGPRLLPEVHEDGSPNLAPIPVTVKREPEELDQLYLDD

SEQ ID NO: 7398 - protein, 713 aa, Homo sapiens
MPSTSFPVPSKFPLGPAAAVFGRGETLGPAPRAGGTMKSAEEEHYGYASSNVSPALPLPTAHSTLPAPCHNLQTSTPGIIPPADHPSGYGAALDGGPAGYFLSSGHTRPDGAPALESPRIEITSCLGLYHNNNQFFHDVEVEDVLPSSKRSPSTATLSLPSLEAYRDPSCLSPASSLSSRSCNSEASSYESNYSYPYASPQTSPWQSPCVSPKTTDPEEGFPRGLGACTLLGSPRHSPSTSPRASVTEESWLGARSSRPASPCNKRKYSLNGRQPPYSPHHSPTPSPHGSPRVSVTDDSWLGNTTQYTSSAIVAAINALTTDSSLDLGDGVPVKSRKTTLEQPPSVALKVEPVGEDLGSPPPPADFAPEDYSSFQHIRKGGFCDQYLAVPQHPYQWAKPKPLSPTSYMSPTLPALDWQLPSHSGPYELRIEVQPKSHHRAHYETEGSRGAVKASAGGHPIVQLHGYLENEPLMLQLFIGTADDRLLRPHAFYQVHRITGKTVSTTSHEAILSNTKVLEIPLLPENSMRAVIDCAGILKLRNSDIELRKGETDIGRKNTRVRLVFRVHVPQPSGRTLSLQVASNPIECSQRSAQELPLVEKQSTDSYPVVGGKKMVLSGHNFLQDSKVIFVEKAPDGHHVWEMEAKTDRDLCKPNSLVVEIPPFRNQRITSPVHVSFYVCNGKRKRSQYQRFTYLPANVNEIIRNDLSSTSTHS

SEQ ID NO: 7399 - protein, 471 aa, Homo sapiens
MLQLFIGTADDRLLRPHAFYQVHRITGKTVSTTSHEAILSNTKVLEIPLLPENSMRAVIDCAGILKLRNSDIELRKGETDIGRKNTRVRLVFRVHVPQPSGRTLSLQVASNPIECSQRSAQELPLVEKQSTDSYPVVGGKKMVLSGHNFLQDSKVIFVEKAPDGHHVWEMEAKTDRDLCKPNSLVVEIPPFRNQRITSPVHVSFYVCNGKRKRSQYQRFTYLPANVPIIKTEPTDDYEPAPTCGPVSQGLSPLPRPYYSQQLAMPPDPSSCLVAGFPPCPQRSTLMPAAPGVSPKLHDLSPAAYTKGVASPGHCHLGLPQPAGEAPAVQDVPRPVATHPGSPGQPPPALLPQQVSAPPSSSCPPGLEHSLCPSSPSPPLPPATQEPTCLQPCSPACPPATGRPQHLPSTVRRDESPTAGPRLLPEVHEDGSPNLAPIPVTVKREPEELDQLYLDDVNEIIRNDLSSTSTHS

SEQ ID NO: 7400 - protein, 921 aa, Homo sapiens
MNAPERQPQPDGGDAPGHEPGGSPQDELDFSILFDYEYLNPNEEEPNAHKVASPPSGPAYPDDVLDYGLKPYSPLASLSGEPPGRFGEPDRVGPQKFLSAAKPAGASGLSPRIEITPSHELIQAVGPLRMRDAGLLVEQPPLAGVAASPRFTLPVPGFEGYREPLCLSPASSGSSASFISDTFSPYTSPCVSPNNGGPDDLCPQFQNIPAHYSPRTSPIMSPRTSLAEDSCLGRHSPVPRPASRSSSPGAKRRHSCAEALVALPPGASPQRSRSPSPQPSSHVAPQDHGSPAGYPPVAGSAVIMDALNSLATDSPCGIPPKMWKTSPDPSPVSAAPSKAGLPRHIYPAVEFLGPCEQGERRNSAPESILLVPPTWPKPLVPAIPICSIPVTASLPPLEWPLSSQSGSYELRIEVQPKPHHRAHYETEGSRGAVKAPTGGHPVVQLHGYMENKPLGLQIFIGTADERILKPHAFYQVHRITGKTVTTTSYEKIVGNTKVLEIPLEPKNNMRATIDCAGILKLRNADIELRKGETDIGRKNTRVRLVFRVHIPESSGRIVSLQTASNPIECSQRSAHELPMVERQDTDSCLVYGGQQMILTGQNFTSESKVVFTEKTTDGQQIWEMEATVDKDKSQPNMLFVEIPEYRNKHIRTPVKVNFYVINGKRKRSQPQHFTYHPVPAIKTEPTDEYDPTLICSPTHGGLGSQPYYPQHPMVAESPSCLVATMAPCQQFRTGLSSPDARYQQQNPAAVLYQRSKSLSPSLLGYQQPALMAAPLSLADAHRSVLVHAGSQGQSSALLHPSPTNQQASPVIHYSPTNQQLRCGSHQEFQHIMYCENFAPGTTRPGPPPVSQGQRLSPGSYPTVIQQQNATSQRAAKNGPPVSDQKEVLPAGVTIKQEQNLDQTYLDDELIDTHLSWIQNIL

SEQ ID NO: 7401 - protein, 325 aa, Homo sapiens
MSPRTSLAEDSCLGRHSPVPRPASRSSSPGAKRRHSCAEALVALPPGASPQRSRSPSPQPSSHVAPQDHGSPAGYPPVAGSAVIMDALNSLATDSPCGIPPKMWKTSPDPSPVSAAPSKAGLPRHIYPAVEFLGPCEQGERRNSAPESILLVPPTWPKPLVPAIPICSIPVTASLPPLEWPLSSQSGSYELRIEVQPKPHHRAHYETEGSRGAVKAPTGGHPVVQLHGYMENKPLGLQIFIGTADERILKPHAFYQVHRITGKTVTTTSYEKIVGNTKVLEIPLEPSTAPHLLSPFMFISQPGVHTRINVWALSGLSLKELATSL

SEQ ID NO: 7402 - protein, 925 aa, Homo sapiens
MNAPERQPQPDGGDAPGHEPGGSPQDELDFSILFDYEYLNPNEEEPNAHKVASPPSGPAYPDDVLDYGLKPYSPLASLSGEPPGRFGEPDRVGPQKFLSAAKPAGASGLSPRIEITPSHELIQAVGPLRMRDAGLLVEQPPLAGVAASPRFTLPVPGFEGYREPLCLSPASSGSSASFISDTFSPYTSPCVSPNNGGPDDLCPQFQNIPAHYSPRTSPIMSPRTSLAEDSCLGRHSPVPRPASRSSSPGAKRRHSCAEALVALPPGASPQRSRSPSPQPSSHVAPQDHGSPAGYPPVAGSAVIMDALNSLATDSPCGIPPKMWKTSPDPSPVSAAPSKAGLPRHIYPAVEFLGPCEQGERRNSAPESILLVPPTWPKPLVPAIPICSIPVTASLPPLEWPLSSQSGSYELRIEVQPKPHHRAHYETEGSRGAVKAPTGGHPVVQLHGYMENKPLGLQIFIGTADERILKPHAFYQVHRITGKTVTTTSYEKIVGNTKVLEIPLEPKNNMRATIDCAGILKLRNADIELRKGETDIGRKNTRVRLVFRVHIPESSGRIVSLQTASNPIECSQRSAHELPMVERQDTDSCLVYGGQQMILTGQNFTSESKVVFTEKTTDGQQIWEMEATVDKDKSQPNMLFVEIPEYRNKHIRTPVKVNFYVINGKRKRSQPQHFTYHPVPAIKTEPTDEYDPTLICSPTHGGLGSQPYYPQHPMVAESPSCLVATMAPCQQFRTGLSSPDARYQQQNPAAVLYQRSKSLSPSLLGYQQPALMAAPLSLADAHRSVLVHAGSQGQSSALLHPSPTNQQASPVIHYSPTNQQLRCGSHQEFQHIMYCENFAPGTTRPGPPPVSQGQRLSPGSYPTVIQQQNATSQRAAKNGPPVSDQKEVLPAGVTIKQEQNLDQTYLDDVNEIIRKEFSGPPARNQT

SEQ ID NO: 7403 - protein, 901 aa, Homo sapiens
MQREAAFRLGHCHPLRIMGSVDQEEPNAHKVASPPSGPAYPDDVLDYGLKPYSPLASLSGEPPGRFGEPDRVGPQKFLSAAKPAGASGLSPRIEITPSHELIQAVGPLRMRDAGLLVEQPPLAGVAASPRFTLPVPGFEGYREPLCLSPASSGSSASFISDTFSPYTSPCVSPNNGGPDDLCPQFQNIPAHYSPRTSPIMSPRTSLAEDSCLGRHSPVPRPASRSSSPGAKRRHSCAEALVALPPGASPQRSRSPSPQPSSHVAPQDHGSPAGYPPVAGSAVIMDALNSLATDSPCGIPPKMWKTSPDPSPVSAAPSKAGLPRHIYPAVEFLGPCEQGERRNSAPESILLVPPTWPKPLVPAIPICSIPVTASLPPLEWPLSSQSGSYELRIEVQPKPHHRAHYETEGSRGAVKAPTGGHPVVQLHGYMENKPLGLQIFIGTADERILKPHAFYQVHRITGKTVTTTSYEKIVGNTKVLEIPLEPKNNMRATIDCAGILKLRNADIELRKGETDIGRKNTRVRLVFRVHIPESSGRIVSLQTASNPIECSQRSAHELPMVERQDTDSCLVYGGQQMILTGQNFTSESKVVFTEKTTDGQQIWEMEATVDKDKSQPNMLFVEIPEYRNKHIRTPVKVNFYVINGKRKRSQPQHFTYHPVPAIKTEPTDEYDPTLICSPTHGGLGSQPYYPQHPMVAESPSCLVATMAPCQQFRTGLSSPDARYQQQNPAAVLYQRSKSLSPSLLGYQQPALMAAPLSLADAHRSVLVHAGSQGQSSALLHPSPTNQQASPVIHYSPTNQQLRCGSHQEFQHIMYCENFAPGTTRPGPPPVSQGQRLSPGSYPTVIQQQNATSQRAAKNGPPVSDQKEVLPAGVTIKQEQNLDQTYLDDELIDTHLSWIQNIL

SEQ ID NO: 7404 - protein, 1068 aa, Homo sapiens
MTTANCGAHDELDFKLVFGEDGAPAPPPPGSRPADLEPDDCASIYIFNVDPPPSTLTTPLCLPHHGLPSHSSVLSPSFQLQSHKNYEGTCEIPESKYSPLGGPKPFECPSIQITSISPNCHQELDAHEDDLQINDPEREFLERPSRDHLYLPLEPSYRESSLSPSPASSISSRSWFSDASSCESLSHIYDDVDSELNEAAARFTLGSPLTSPGGSPGGCPGEETWHQQYGLGHSLSPRQSPCHSPRSSVTDENWLSPRPASGPSSRPTSPCGKRRHSSAEVCYAGSLSPHHSPVPSPGHSPRGSVTEDTWLNASVHGGSGLGPAVFPFQYCVETDIPLKTRKTSEDQAAILPGKLELCSDDQGSLSPARETSIDDGLGSQYPLKKDSCGDQFLSVPSPFTWSKPKPGHTPIFRTSSLPPLDWPLPAHFGQCELKIEVQPKTHHRAHYETEGSRGAVKASTGGHPVVKLLGYNEKPINLQMFIGTADDRYLRPHAFYQVHRITGKTVATASQEIIIASTKVLEIPLLPENNMSASIDCAGILKLRNSDIELRKGETDIGRKNTRVRLVFRVHIPQPSGKVLSLQIASIPVECSQRSAQELPHIEKYSINSCSVNGGHEMVVTGSNFLPESKIIFLEKGQDGRPQWEVEGKIIREKCQGAHIVLEVPPYHNPAVTAAVQVHFYLCNGKRKKSQSQRFTYTPVLMKQEHREEIDLSSVPSLPVPHPAQTQRPSSDSGCSHDSVLSGQRSLICSIPQTYASMVTSSHLPQLQCRDESVSKEQHMIPSPIVHQPFQVTPTPPVGSSYQPMQTNVVYNGPTCLPINAASSQEFDSVLFQQDATLSGLVNLGCQPLSSIPFHSSNSGSTGHLLAHTPHSVHTLPHLQSMGYHCSNTGQRSLSSPVADQITGQPSSQLQPITYGPSHSGSATTASPAASHPLASSPLSGPPSPQLQPMPYQSPSSGTASSPSPATRMHSGQHSTQAQSTGQGGLSAPSSLICHSLCDPASFPPDGATVSIKPEPEDREPNFATIGLQDITLDDDQFISDLEHQPSGSAEKWPNHSVLSCPAPFWRI

SEQ ID NO: 7405 - protein, 1075 aa, Homo sapiens
MTTANCGAHDELDFKLVFGEDGAPAPPPPGSRPADLEPDDCASIYIFNVDPPPSTLTTPLCLPHHGLPSHSSVLSPSFQLQSHKNYEGTCEIPESKYSPLGGPKPFECPSIQITSISPNCHQELDAHEDDLQINDPEREFLERPSRDHLYLPLEPSYRESSLSPSPASSISSRSWFSDASSCESLSHIYDDVDSELNEAAARFTLGSPLTSPGGSPGGCPGEETWHQQYGLGHSLSPRQSPCHSPRSSVTDENWLSPRPASGPSSRPTSPCGKRRHSSAEVCYAGSLSPHHSPVPSPGHSPRGSVTEDTWLNASVHGGSGLGPAVFPFQYCVETDIPLKTRKTSEDQAAILPGKLELCSDDQGSLSPARETSIDDGLGSQYPLKKDSCGDQFLSVPSPFTWSKPKPGHTPIFRTSSLPPLDWPLPAHFGQCELKIEVQPKTHHRAHYETEGSRGAVKASTGGHPVVKLLGYNEKPINLQMFIGTADDRYLRPHAFYQVHRITGKTVATASQEIIIASTKVLEIPLLPENNMSASIDCAGILKLRNSDIELRKGETDIGRKNTRVRLVFRVHIPQPSGKVLSLQIASIPVECSQRSAQELPHIEKYSINSCSVNGGHEMVVTGSNFLPESKIIFLEKGQDGRPQWEVEGKIIREKCQGAHIVLEVPPYHNPAVTAAVQVHFYLCNGKRKKSQSQRFTYTPVLMKQEHREEIDLSSVPSLPVPHPAQTQRPSSDSGCSHDSVLSGQRSLICSIPQTYASMVTSSHLPQLQCRDESVSKEQHMIPSPIVHQPFQVTPTPPVGSSYQPMQTNVVYNGPTCLPINAASSQEFDSVLFQQDATLSGLVNLGCQPLSSIPFHSSNSGSTGHLLAHTPHSVHTLPHLQSMGYHCSNTGQRSLSSPVADQITGQPSSQLQPITYGPSHSGSATTASPAASHPLASSPLSGPPSPQLQPMPYQSPSSGTASSPSPATRMHSGQHSTQAQSTGQGGLSAPSSLICHSLCDPASFPPDGATVSIKPEPEDREPNFATIGLQDITLDDVNEIIGRDMSQISVSQGAGVSRQAPLPSPESLDLGRSDGL

SEQ ID NO: 7406 - protein, 1065 aa, Homo sapiens
MTTANCGAHDELDFKLVFGEDGAPAPPPPGSRPADLEPDDCASIYIFNVDPPPSTLTTPLCLPHHGLPSHSSVLSPSFQLQSHKNYEGTCEIPESKYSPLGGPKPFECPSIQITSISPNCHQELDAHEDDLQINDPEREFLERPSRDHLYLPLEPSYRESSLSPSPASSISSRSWFSDASSCESLSHIYDDVDSELNEAAARFTLGSPLTSPGGSPGGCPGEETWHQQYGLGHSLSPRQSPCHSPRSSVTDENWLSPRPASGPSSRPTSPCGKRRHSSAEVCYAGSLSPHHSPVPSPGHSPRGSVTEDTWLNASVHGGSGLGPAVFPFQYCVETDIPLKTRKTSEDQAAILPGKLELCSDDQGSLSPARETSIDDGLGSQYPLKKDSCGDQFLSVPSPFTWSKPKPGHTPIFRTSSLPPLDWPLPAHFGQCELKIEVQPKTHHRAHYETEGSRGAVKASTGGHPVVKLLGYNEKPINLQMFIGTADDRYLRPHAFYQVHRITGKTVATASQEIIIASTKVLEIPLLPENNMSASIDCAGILKLRNSDIELRKGETDIGRKNTRVRLVFRVHIPQPSGKVLSLQIASIPVECSQRSAQELPHIEKYSINSCSVNGGHEMVVTGSNFLPESKIIFLEKGQDGRPQWEVEGKIIREKCQGAHIVLEVPPYHNPAVTAAVQVHFYLCNGKRKKSQSQRFTYTPVLMKQEHREEIDLSSVPSLPVPHPAQTQRPSSDSGCSHDSVLSGQRSLICSIPQTYASMVTSSHLPQLQCRDESVSKEQHMIPSPIVHQPFQVTPTPPVGSSYQPMQTNVVYNGPTCLPINAASSQEFDSVLFQQDATLSGLVNLGCQPLSSIPFHSSNSGSTGHLLAHTPHSVHTLPHLQSMGYHCSNTGQRSLSSPVADQITGQPSSQLQPITYGPSHSGSATTASPAASHPLASSPLSGPPSPQLQPMPYQSPSSGTASSPSPATRMHSGQHSTQAQSTGQGGLSAPSSLICHSLCDPASFPPDGATVSIKPEPEDREPNFATIGLQDITLDDDLFTSNNFDLLQLRPTFWPVPAGRYLRNLE

SEQ ID NO: 7407 - protein, 589 aa, Homo sapiens
MFIGTADDRYLRPHAFYQVHRITGKTVATASQEIIIASTKVLEIPLLPENNMSASIDCAGILKLRNSDIELRKGETDIGRKNTRVRLVFRVHIPQPSGKVLSLQIASIPVECSQRSAQELPHIEKYSINSCSVNGGHEMVVTGSNFLPESKIIFLEKGQDGRPQWEVEGKIIREKCQGAHIVLEVPPYHNPAVTAAVQVHFYLCNGKRKKSQSQRFTYTPVLMKQEHREEIDLSSVPSLPVPHPAQTQRPSSDSGCSHDSVLSGQRSLICSIPQTYASMVTSSHLPQLQCRDESVSKEQHMIPSPIVHQPFQVTPTPPVGSSYQPMQTNVVYNGPTCLPINAASSQEFDSVLFQQDATLSGLVNLGCQPLSSIPFHSSNSGSTGHLLAHTPHSVHTLPHLQSMGYHCSNTGQRSLSSPVADQITGQPSSQLQPITYGPSHSGSATTASPAASHPLASSPLSGPPSPQLQPMPYQSPSSGTASSPSPATRMHSGQHSTQAQSTGQGGLSAPSSLICHSLCDPASFPPDGATVSIKPEPEDREPNFATIGLQDITLDDDQFISDLEHQPSGSAEKWPNHSVLSCPAPFWRI

SEQ ID NO: 7408 - protein, 902 aa, Homo sapiens
MGAASCEDEELEFKLVFGEEKEAPPLGAGGLGEELDSEDAPPCCRLALGEPPPYGAAPIGIPRPPPPRPGMHSPPPRPAPSPGTWESQPARSVRLGGPGGGAGGAGGGRVLECPSIRITSISPTPEPPAALEDNPDAWGDGSPRDYPPPEGFGGYREAGGQGGGAFFSPSPGSSSLSSWSFFSDASDEAALYAACDEVESELNEAASRFGLGSPLPSPRASPRPWTPEDPWSLYGPSPGGRGPEDSWLLLSAPGPTPASPRPASPCGKRRYSSSGTPSSASPALSRRGSLGEEGSEPPPPPPLPLARDPGSPGPFDYVGAPPAESIPQKTRRTSSEQAVALPRSEEPASCNGKLPLGAEESVAPPGGSRKEVAGMDYLAVPSPLAWSKARIGGHSPIFRTSALPPLDWPLPSQYEQLELRIEVQPRAHHRAHYETEGSRGAVKAAPGGHPVVKLLGYSEKPLTLQMFIGTADERNLRPHAFYQVHRITGKMVATASYEAVVSGTKVLEMTLLPENNMAANIDCAGILKLRNSDIELRKGETDIGRKNTRVRLVFRVHVPQGGGKVVSVQAASVPIECSQRSAQELPQVEAYSPSACSVRGGEELVLTGSNFLPDSKVVFIERGPDGKLQWEEEATVNRLQSNEVTLTLTVPEYSNKRVSRPVQVYFYVSNGRRKRSPTQSFRFLPVICKEEPLPDSSLRGFPSASATPFGTDMDFSPPRPPYPSYPHEDPACETPYLSEGFGYGMPPLYPQTGPPPSYRPGLRMFPETRGTTGCAQPPAVSFLPRPFPSDPYGGRGSSFSLGLPFSPPAPFRPPPLPASPPLEGPFPSQSDVHPLPAEGYNKVGPGYGPGEGAPEQEKSRGGYSSGFRDSVPIQGITLEEVSEIIGRDLSGFPAPPGEEPPA

SEQ ID NO: 7409 - protein, 964 aa, Homo sapiens
MITTLPSLLPASLASISHRVTNLPSNSLSHNPGLSKPDFPGNSSPGLPSSSSPGRDLGAPAGSMGAASCEDEELEFKLVFGEEKEAPPLGAGGLGEELDSEDAPPCCRLALGEPPPYGAAPIGIPRPPPPRPGMHSPPPRPAPSPGTWESQPARSVRLGGPGGGAGGAGGGRVLECPSIRITSISPTPEPPAALEDNPDAWGDGSPRDYPPPEGFGGYREAGGQGGGAFFSPSPGSSSLSSWSFFSDASDEAALYAACDEVESELNEAASRFGLGSPLPSPRASPRPWTPEDPWSLYGPSPGGRGPEDSWLLLSAPGPTPASPRPASPCGKRRYSSSGTPSSASPALSRRGSLGEEGSEPPPPPPLPLARDPGSPGPFDYVGAPPAESIPQKTRRTSSEQAVALPRSEEPASCNGKLPLGAEESVAPPGGSRKEVAGMDYLAVPSPLAWSKARIGGHSPIFRTSALPPLDWPLPSQYEQLELRIEVQPRAHHRAHYETEGSRGAVKAAPGGHPVVKLLGYSEKPLTLQMFIGTADERNLRPHAFYQVHRITGKMVATASYEAVVSGTKVLEMTLLPENNMAANIDCAGILKLRNSDIELRKGETDIGRKNTRVRLVFRVHVPQGGGKVVSVQAASVPIECSQRSAQELPQVEAYSPSACSVRGGEELVLTGSNFLPDSKVVFIERGPDGKLQWEEEATVNRLQSNEVTLTLTVPEYSNKRVSRPVQVYFYVSNGRRKRSPTQSFRFLPVICKEEPLPDSSLRGFPSASATPFGTDMDFSPPRPPYPSYPHEDPACETPYLSEGFGYGMPPLYPQTGPPPSYRPGLRMFPETRGTTGCAQPPAVSFLPRPFPSDPYGGRGSSFSLGLPFSPPAPFRPPPLPASPPLEGPFPSQSDVHPLPAEGYNKVGPGYGPGEGAPEQEKSRGGYSSGFRDSVPIQGITLEEGGCGTGGCECECVQEIALHVC

SEQ ID NO: 7410 - protein, 889 aa, Homo sapiens
MPASISSIFPGPTLLLSCGSEELDSEDAPPCCRLALGEPPPYGAAPIGIPRPPPPRPGMHSPPPRPAPSPGTWESQPARSVRLGGPGGGAGGAGGGRVLECPSIRITSISPTPEPPAALEDNPDAWGDGSPRDYPPPEGFGGYREAGGQGGGAFFSPSPGSSSLSSWSFFSDASDEAALYAACDEVESELNEAASRFGLGSPLPSPRASPRPWTPEDPWSLYGPSPGGRGPEDSWLLLSAPGPTPASPRPASPCGKRRYSSSGTPSSASPALSRRGSLGEEGSEPPPPPPLPLARDPGSPGPFDYVGAPPAESIPQKTRRTSSEQAVALPRSEEPASCNGKLPLGAEESVAPPGGSRKEVAGMDYLAVPSPLAWSKARIGGHSPIFRTSALPPLDWPLPSQYEQLELRIEVQPRAHHRAHYETEGSRGAVKAAPGGHPVVKLLGYSEKPLTLQMFIGTADERNLRPHAFYQVHRITGKMVATASYEAVVSGTKVLEMTLLPENNMAANIDCAGILKLRNSDIELRKGETDIGRKNTRVRLVFRVHVPQGGGKVVSVQAASVPIECSQRSAQELPQVEAYSPSACSVRGGEELVLTGSNFLPDSKVVFIERGPDGKLQWEEEATVNRLQSNEVTLTLTVPEYSNKRVSRPVQVYFYVSNGRRKRSPTQSFRFLPVICKEEPLPDSSLRGFPSASATPFGTDMDFSPPRPPYPSYPHEDPACETPYLSEGFGYGMPPLYPQTGPPPSYRPGLRMFPETRGTTGCAQPPAVSFLPRPFPSDPYGGRGSSFSLGLPFSPPAPFRPPPLPASPPLEGPFPSQSDVHPLPAEGYNKVGPGYGPGEGAPEQEKSRGGYSSGFRDSVPIQGITLEEGGCGTGGCECECVQEIALHVC

SEQ ID NO: 7411 - protein, 914 aa, Homo sapiens
MLSGRDLGAPAGSMGAASCEDEELEFKLVFGEEKEAPPLGAGGLGEELDSEDAPPCCRLALGEPPPYGAAPIGIPRPPPPRPGMHSPPPRPAPSPGTWESQPARSVRLGGPGGGAGGAGGGRVLECPSIRITSISPTPEPPAALEDNPDAWGDGSPRDYPPPEGFGGYREAGGQGGGAFFSPSPGSSSLSSWSFFSDASDEAALYAACDEVESELNEAASRFGLGSPLPSPRASPRPWTPEDPWSLYGPSPGGRGPEDSWLLLSAPGPTPASPRPASPCGKRRYSSSGTPSSASPALSRRGSLGEEGSEPPPPPPLPLARDPGSPGPFDYVGAPPAESIPQKTRRTSSEQAVALPRSEEPASCNGKLPLGAEESVAPPGGSRKEVAGMDYLAVPSPLAWSKARIGGHSPIFRTSALPPLDWPLPSQYEQLELRIEVQPRAHHRAHYETEGSRGAVKAAPGGHPVVKLLGYSEKPLTLQMFIGTADERNLRPHAFYQVHRITGKMVATASYEAVVSGTKVLEMTLLPENNMAANIDCAGILKLRNSDIELRKGETDIGRKNTRVRLVFRVHVPQGGGKVVSVQAASVPIECSQRSAQELPQVEAYSPSACSVRGGEELVLTGSNFLPDSKVVFIERGPDGKLQWEEEATVNRLQSNEVTLTLTVPEYSNKRVSRPVQVYFYVSNGRRKRSPTQSFRFLPVICKEEPLPDSSLRGFPSASATPFGTDMDFSPPRPPYPSYPHEDPACETPYLSEGFGYGMPPLYPQTGPPPSYRPGLRMFPETRGTTGCAQPPAVSFLPRPFPSDPYGGRGSSFSLGLPFSPPAPFRPPPLPASPPLEGPFPSQSDVHPLPAEGYNKVGPGYGPGEGAPEQEKSRGGYSSGFRDSVPIQGITLEEGGCGTGGCECECVQEIALHVC

SEQ ID NO: 7412 - protein, 933 aa, Homo sapiens
MADGGADSAAQRLPEGPGRVAPGRDLGAPAGSMGAASCEDEELEFKLVFGEEKEAPPLGAGGLGEELDSEDAPPCCRLALGEPPPYGAAPIGIPRPPPPRPGMHSPPPRPAPSPGTWESQPARSVRLGGPGGGAGGAGGGRVLECPSIRITSISPTPEPPAALEDNPDAWGDGSPRDYPPPEGFGGYREAGGQGGGAFFSPSPGSSSLSSWSFFSDASDEAALYAACDEVESELNEAASRFGLGSPLPSPRASPRPWTPEDPWSLYGPSPGGRGPEDSWLLLSAPGPTPASPRPASPCGKRRYSSSGTPSSASPALSRRGSLGEEGSEPPPPPPLPLARDPGSPGPFDYVGAPPAESIPQKTRRTSSEQAVALPRSEEPASCNGKLPLGAEESVAPPGGSRKEVAGMDYLAVPSPLAWSKARIGGHSPIFRTSALPPLDWPLPSQYEQLELRIEVQPRAHHRAHYETEGSRGAVKAAPGGHPVVKLLGYSEKPLTLQMFIGTADERNLRPHAFYQVHRITGKMVATASYEAVVSGTKVLEMTLLPENNMAANIDCAGILKLRNSDIELRKGETDIGRKNTRVRLVFRVHVPQGGGKVVSVQAASVPIECSQRSAQELPQVEAYSPSACSVRGGEELVLTGSNFLPDSKVVFIERGPDGKLQWEEEATVNRLQSNEVTLTLTVPEYSNKRVSRPVQVYFYVSNGRRKRSPTQSFRFLPVICKEEPLPDSSLRGFPSASATPFGTDMDFSPPRPPYPSYPHEDPACETPYLSEGFGYGMPPLYPQTGPPPSYRPGLRMFPETRGTTGCAQPPAVSFLPRPFPSDPYGGRGSSFSLGLPFSPPAPFRPPPLPASPPLEGPFPSQSDVHPLPAEGYNKVGPGYGPGEGAPEQEKSRGGYSSGFRDSVPIQGITLEEGGCGTGGCECECVQEIALHVC

SEQ ID NO: 7413 - protein, 826 aa, Homo sapiens
MADGGADSAAQRLPEGPGRVAPGRDLGAPAGSMGAASCEDEELEFKLVFGEEKEAPPLGAGGLGEELDSEDAPPCCRLALGEPPPYGAAPIGIPRPPPPRPGMHSPPPRPAPSPGTWESQPARSVRLGGPGGGAGGAGGGRVLECPSIRITSISPTPEPPAALEDNPDAWGDGSPRDYPPPEGFGGYREAGGQGGGAFFSPSPGSSSLSSWSFFSDASDEAALYAACDEVESELNEAASRFGLGSPLPSPRASPRPWTPEDPWSLYGPSPGGRGPEDSWLLLSAPGPTPASPRPASPCGKRRYSSSGTPSSASPALSRRGSLGEEGSEPPPPPPLPLARDPGSPGPFDYVGAPPAESIPQKTRRTSSEQAVALPRSEEPASCNGKLPLGAEESVAPPGGSRKEVAGMDYLAVPSPLAWSKARIGGHSPIFRTSALPPLDWPLPSQYEQLELRIEVQPRAHHRAHYETEGSRGAVKAAPGGHPVVKLLGYSEKPLTLQMFIGTADERNLRPHAFYQVHRITGKMVATASYEAVVSGTKVLEMTLLPENNMAANIDCAGILKLRNSDIELRKGETDIGRKNTRVRLVFRVHVPQGGGKVVSVQAASVPIECSQRSAQELPQVEAYSPSACSVRGGEELVLTGSNFLPDSKVVFIERGPDGKLQWEEEATVNRLQSNEVTLTLTVPEYSNKRVSRPVQVYFYVSNGRRKRSPTQSFRFLPVICKEEPLPDSSLRGFPSASATPFGTDMDFSPPRPPYPSYPHEDPACETPYLSEGFGYGMPPLYPQTGPPPSYRPGLRMFPETRGTTVSEIIGRDLSGFPAPPGEEPPA

SEQ ID NO: 7414 - protein, 901 aa, Homo sapiens
MGAASCEDEELEFKLVFGEEKEAPPLGAGGLGEELDSEDAPPCCRLALGEPPPYGAAPIGIPRPPPPRPGMHSPPPRPAPSPGTWESQPARSVRLGGPGGGAGGAGGGRVLECPSIRITSISPTPEPPAALEDNPDAWGDGSPRDYPPPEGFGGYREAGGQGGGAFFSPSPGSSSLSSWSFFSDASDEAALYAACDEVESELNEAASRFGLGSPLPSPRASPRPWTPEDPWSLYGPSPGGRGPEDSWLLLSAPGPTPASPRPASPCGKRRYSSSGTPSSASPALSRRGSLGEEGSEPPPPPPLPLARDPGSPGPFDYVGAPPAESIPQKTRRTSSEQAVALPRSEEPASCNGKLPLGAEESVAPPGGSRKEVAGMDYLAVPSPLAWSKARIGGHSPIFRTSALPPLDWPLPSQYEQLELRIEVQPRAHHRAHYETEGSRGAVKAAPGGHPVVKLLGYSEKPLTLQMFIGTADERNLRPHAFYQVHRITGKMVATASYEAVVSGTKVLEMTLLPENNMAANIDCAGILKLRNSDIELRKGETDIGRKNTRVRLVFRVHVPQGGGKVVSVQAASVPIECSQRSAQELPQVEAYSPSACSVRGGEELVLTGSNFLPDSKVVFIERGPDGKLQWEEEATVNRLQSNEVTLTLTVPEYSNKRVSRPVQVYFYVSNGRRKRSPTQSFRFLPVICKEEPLPDSSLRGFPSASATPFGTDMDFSPPRPPYPSYPHEDPACETPYLSEGFGYGMPPLYPQTGPPPSYRPGLRMFPETRGTTGCAQPPAVSFLPRPFPSDPYGGRGSSFSLGLPFSPPAPFRPPPLPASPPLEGPFPSQSDVHPLPAEGYNKVGPGYGPGEGAPEQEKSRGGYSSGFRDSVPIQGITLEEGGCGTGGCECECVQEIALHVC

SEQ ID NO: 7415 - protein, 832 aa, Homo sapiens
MHSPPPRPAPSPGTWESQPARSVRLGGPGGGAGGAGGGRVLECPSIRITSISPTPEPPAALEDNPDAWGDGSPRDYPPPEGFGGYREAGGQGGGAFFSPSPGSSSLSSWSFFSDASDEAALYAACDEVESELNEAASRFGLGSPLPSPRASPRPWTPEDPWSLYGPSPGGRGPEDSWLLLSAPGPTPASPRPASPCGKRRYSSSGTPSSASPALSRRGSLGEEGSEPPPPPPLPLARDPGSPGPFDYVGAPPAESIPQKTRRTSSEQAVALPRSEEPASCNGKLPLGAEESVAPPGGSRKEVAGMDYLAVPSPLAWSKARIGGHSPIFRTSALPPLDWPLPSQYEQLELRIEVQPRAHHRAHYETEGSRGAVKAAPGGHPVVKLLGYSEKPLTLQMFIGTADERNLRPHAFYQVHRITGKMVATASYEAVVSGTKVLEMTLLPENNMAANIDCAGILKLRNSDIELRKGETDIGRKNTRVRLVFRVHVPQGGGKVVSVQAASVPIECSQRSAQELPQVEAYSPSACSVRGGEELVLTGSNFLPDSKVVFIERGPDGKLQWEEEATVNRLQSNEVTLTLTVPEYSNKRVSRPVQVYFYVSNGRRKRSPTQSFRFLPVICKEEPLPDSSLRGFPSASATPFGTDMDFSPPRPPYPSYPHEDPACETPYLSEGFGYGMPPLYPQTGPPPSYRPGLRMFPETRGTTGCAQPPAVSFLPRPFPSDPYGGRGSSFSLGLPFSPPAPFRPPPLPASPPLEGPFPSQSDVHPLPAEGYNKVGPGYGPGEGAPEQEKSRGGYSSGFRDSVPIQGITLEEVSEIIGRDLSGFPAPPGEEPPA

SEQ ID NO: 7416 - protein, 794 aa, Homo sapiens
MGAASCEDEELEFKLVFGEEKEAPPLGAGGLGEELDSEDAPPCCRLALGEPPPYGAAPIGIPRPPPPRPGMHSPPPRPAPSPGTWESQPARSVRLGGPGGGAGGAGGGRVLECPSIRITSISPTPEPPAALEDNPDAWGDGSPRDYPPPEGFGGYREAGGQGGGAFFSPSPGSSSLSSWSFFSDASDEAALYAACDEVESELNEAASRFGLGSPLPSPRASPRPWTPEDPWSLYGPSPGGRGPEDSWLLLSAPGPTPASPRPASPCGKRRYSSSGTPSSASPALSRRGSLGEEGSEPPPPPPLPLARDPGSPGPFDYVGAPPAESIPQKTRRTSSEQAVALPRSEEPASCNGKLPLGAEESVAPPGGSRKEVAGMDYLAVPSPLAWSKARIGGHSPIFRTSALPPLDWPLPSQYEQLELRIEVQPRAHHRAHYETEGSRGAVKAAPGGHPVVKLLGYSEKPLTLQMFIGTADERNLRPHAFYQVHRITGKMVATASYEAVVSGTKVLEMTLLPENNMAANIDCAGILKLRNSDIELRKGETDIGRKNTRVRLVFRVHVPQGGGKVVSVQAASVPIECSQRSAQELPQVEAYSPSACSVRGGEELVLTGSNFLPDSKVVFIERGPDGKLQWEEEATVNRLQSNEVTLTLTVPEYSNKRVSRPVQVYFYVSNGRRKRSPTQSFRFLPVICKEEPLPDSSLRGFPSASATPFGTDMDFSPPRPPYPSYPHEDPACETPYLSEGFGYGMPPLYPQTGPPPSYRPGLRMFPETRGTTVSEIIGRDLSGFPAPPGEEPPA

SEQ ID NO: 7417 - protein, 832 aa, Homo sapiens; identical to SEQ ID NO: 7415

SEQ ID NO: 7418 - protein, 329 aa, Homo sapiens
MFIGTADERNLRPHAFYQVHRITGKMVATASYEAVVSGTKVLEMTLLPENNMAANIDCAGILKLRNSDIELRKGETDIGRKNTRVRLVFRVHVPQGGGKVVSVQAASVPIECSQRSAQELPQVEAYSPSACSVRGGEELVLTGSNFLPDSKVVFIERGPDGKLQWEEEATVNRLQSNEVTLTLTVPEYSNKRVSRPVQVYFYVSNGRRKRSPTQSFRFLPVICKEEPLPDSSLRGFPSASATPFGTDMDFSPPRPPYPSYPHEDPACETPYLSEGFGYGMPPLYPQTGPPPSYRPGLRMFPETRGTTVSEIIGRDLSGFPAPPGEEPPA

SEQ ID NO: 7419 - protein, 857 aa, Homo sapiens
MITTLPSLLPASLASISHRVTNLPSNSLSHNPGLSKPDFPGNSSPGLPSSSSPGRDLGAPAGSMGAASCEDEELEFKLVFGEEKEAPPLGAGGLGEELDSEDAPPCCRLALGEPPPYGAAPIGIPRPPPPRPGMHSPPPRPAPSPGTWESQPARSVRLGGPGGGAGGAGGGRVLECPSIRITSISPTPEPPAALEDNPDAWGDGSPRDYPPPEGFGGYREAGGQGGGAFFSPSPGSSSLSSWSFFSDASDEAALYAACDEVESELNEAASRFGLGSPLPSPRASPRPWTPEDPWSLYGPSPGGRGPEDSWLLLSAPGPTPASPRPASPCGKRRYSSSGTPSSASPALSRRGSLGEEGSEPPPPPPLPLARDPGSPGPFDYVGAPPAESIPQKTRRTSSEQAVALPRSEEPASCNGKLPLGAEESVAPPGGSRKEVAGMDYLAVPSPLAWSKARIGGHSPIFRTSALPPLDWPLPSQYEQLELRIEVQPRAHHRAHYETEGSRGAVKAAPGGHPVVKLLGYSEKPLTLQMFIGTADERNLRPHAFYQVHRITGKMVATASYEAVVSGTKVLEMTLLPENNMAANIDCAGILKLRNSDIELRKGETDIGRKNTRVRLVFRVHVPQGGGKVVSVQAASVPIECSQRSAQELPQVEAYSPSACSVRGGEELVLTGSNFLPDSKVVFIERGPDGKLQWEEEATVNRLQSNEVTLTLTVPEYSNKRVSRPVQVYFYVSNGRRKRSPTQSFRFLPVICKEEPLPDSSLRGFPSASATPFGTDMDFSPPRPPYPSYPHEDPACETPYLSEGFGYGMPPLYPQTGPPPSYRPGLRMFPETRGTTVSEIIGRDLSGFPAPPGEEPPA

SEQ ID NO: 7420 - protein, 724 aa, Homo sapiens
MHSPPPRPAPSPGTWESQPARSVRLGGPGGGAGGAGGGRVLECPSIRITSISPTPEPPAALEDNPDAWGDGSPRDYPPPEGFGGYREAGGQGGGAFFSPSPGSSSLSSWSFFSDASDEAALYAACDEVESELNEAASRFGLGSPLPSPRASPRPWTPEDPWSLYGPSPGGRGPEDSWLLLSAPGPTPASPRPASPCGKRRYSSSGTPSSASPALSRRGSLGEEGSEPPPPPPLPLARDPGSPGPFDYVGAPPAESIPQKTRRTSSEQAVALPRSEEPASCNGKLPLGAEESVAPPGGSRKEVAGMDYLAVPSPLAWSKARIGGHSPIFRTSALPPLDWPLPSQYEQLELRIEVQPRAHHRAHYETEGSRGAVKAAPGGHPVVKLLGYSEKPLTLQMFIGTADERNLRPHAFYQVHRITGKMVATASYEAVVSGTKVLEMTLLPENNMAANIDCAGILKLRNSDIELRKGETDIGRKNTRVRLVFRVHVPQGGGKVVSVQAASVPIECSQRSAQELPQVEAYSPSACSVRGGEELVLTGSNFLPDSKVVFIERGPDGKLQWEEEATVNRLQSNEVTLTLTVPEYSNKRVSRPVQVYFYVSNGRRKRSPTQSFRFLPVICKEEPLPDSSLRGFPSASATPFGTDMDFSPPRPPYPSYPHEDPACETPYLSEGFGYGMPPLYPQTGPPPSYRPGLRMFPETRGTTVSEIIGRDLSGFPAPPGEEPPA

SEQ ID NO: 7421 - protein, 143 aa, Homo sapiens
MGAASCEDEELEFKLVFGEEKEAPPLGAGGLGEELDSEDAPPCCRLALGEPPPYGAAPIGIPRPPPPRPGMHSPPPRPAPSPGTWESQPARSVRLGGPGGGAGGAGGGRVLECPSIRITSISPTPEPPAALEDNPDAWGDGSP

SEQ ID NO: 7422 - protein, 807 aa, Homo sapiens
MLSGRDLGAPAGSMGAASCEDEELEFKLVFGEEKEAPPLGAGGLGEELDSEDAPPCCRLALGEPPPYGAAPIGIPRPPPPRPGMHSPPPRPAPSPGTWESQPARSVRLGGPGGGAGGAGGGRVLECPSIRITSISPTPEPPAALEDNPDAWGDGSPRDYPPPEGFGGYREAGGQGGGAFFSPSPGSSSLSSWSFFSDASDEAALYAACDEVESELNEAASRFGLGSPLPSPRASPRPWTPEDPWSLYGPSPGGRGPEDSWLLLSAPGPTPASPRPASPCGKRRYSSSGTPSSASPALSRRGSLGEEGSEPPPPPPLPLARDPGSPGPFDYVGAPPAESIPQKTRRTSSEQAVALPRSEEPASCNGKLPLGAEESVAPPGGSRKEVAGMDYLAVPSPLAWSKARIGGHSPIFRTSALPPLDWPLPSQYEQLELRIEVQPRAHHRAHYETEGSRGAVKAAPGGHPVVKLLGYSEKPLTLQMFIGTADERNLRPHAFYQVHRITGKMVATASYEAVVSGTKVLEMTLLPENNMAANIDCAGILKLRNSDIELRKGETDIGRKNTRVRLVFRVHVPQGGGKVVSVQAASVPIECSQRSAQELPQVEAYSPSACSVRGGEELVLTGSNFLPDSKVVFIERGPDGKLQWEEEATVNRLQSNEVTLTLTVPEYSNKRVSRPVQVYFYVSNGRRKRSPTQSFRFLPVICKEEPLPDSSLRGFPSASATPFGTDMDFSPPRPPYPSYPHEDPACETPYLSEGFGYGMPPLYPQTGPPPSYRPGLRMFPETRGTTVSEIIGRDLSGFPAPPGEEPPA

SEQ ID NO: 7423 - protein, 436 aa, Homo sapiens
MFIGTADERNLRPHAFYQVHRITGKMVATASYEAVVSGTKVLEMTLLPENNMAANIDCAGILKLRNSDIELRKGETDIGRKNTRVRLVFRVHVPQGGGKVVSVQAASVPIECSQRSAQELPQVEAYSPSACSVRGGEELVLTGSNFLPDSKVVFIERGPDGKLQWEEEATVNRLQSNEVTLTLTVPEYSNKRVSRPVQVYFYVSNGRRKRSPTQSFRFLPVICKEEPLPDSSLRGFPSASATPFGTDMDFSPPRPPYPSYPHEDPACETPYLSEGFGYGMPPLYPQTGPPPSYRPGLRMFPETRGTTGCAQPPAVSFLPRPFPSDPYGGRGSSFSLGLPFSPPAPFRPPPLPASPPLEGPFPSQSDVHPLPAEGYNKVGPGYGPGEGAPEQEKSRGGYSSGFRDSVPIQGITLEEGGCGTGGCECECVQEIALHVC

SEQ ID NO: 7424 - protein, 189 aa, Homo sapiens
MDFSPPRPPYPSYPHEDPACETPYLSEGFGYGMPPLYPQTGPPPSYRPGLRMFPETRGTTGCAQPPAVSFLPRPFPSDPYGGRGSSFSLGLPFSPPAPFRPPPLPASPPLEGPFPSQSDVHPLPAEGYNKVGPGYGPGEGAPEQEKSRGGYSSGFRDSVPIQGITLEEGGCGTGGCECECVQEIALHVC

SEQ ID NO: 7425 - protein, 890 aa, Homo sapiens
MPASISSIFPGPTLLLSCGSEELDSEDAPPCCRLALGEPPPYGAAPIGIPRPPPPRPGMHSPPPRPAPSPGTWESQPARSVRLGGPGGGAGGAGGGRVLECPSIRITSISPTPEPPAALEDNPDAWGDGSPRDYPPPEGFGGYREAGGQGGGAFFSPSPGSSSLSSWSFFSDASDEAALYAACDEVESELNEAASRFGLGSPLPSPRASPRPWTPEDPWSLYGPSPGGRGPEDSWLLLSAPGPTPASPRPASPCGKRRYSSSGTPSSASPALSRRGSLGEEGSEPPPPPPLPLARDPGSPGPFDYVGAPPAESIPQKTRRTSSEQAVALPRSEEPASCNGKLPLGAEESVAPPGGSRKEVAGMDYLAVPSPLAWSKARIGGHSPIFRTSALPPLDWPLPSQYEQLELRIEVQPRAHHRAHYETEGSRGAVKAAPGGHPVVKLLGYSEKPLTLQMFIGTADERNLRPHAFYQVHRITGKMVATASYEAVVSGTKVLEMTLLPENNMAANIDCAGILKLRNSDIELRKGETDIGRKNTRVRLVFRVHVPQGGGKVVSVQAASVPIECSQRSAQELPQVEAYSPSACSVRGGEELVLTGSNFLPDSKVVFIERGPDGKLQWEEEATVNRLQSNEVTLTLTVPEYSNKRVSRPVQVYFYVSNGRRKRSPTQSFRFLPVICKEEPLPDSSLRGFPSASATPFGTDMDFSPPRPPYPSYPHEDPACETPYLSEGFGYGMPPLYPQTGPPPSYRPGLRMFPETRGTTGCAQPPAVSFLPRPFPSDPYGGRGSSFSLGLPFSPPAPFRPPPLPASPPLEGPFPSQSDVHPLPAEGYNKVGPGYGPGEGAPEQEKSRGGYSSGFRDSVPIQGITLEEVSEIIGRDLSGFPAPPGEEPPA

SEQ ID NO: 7426 - protein, 915 aa, Homo sapiens
MLSGRDLGAPAGSMGAASCEDEELEFKLVFGEEKEAPPLGAGGLGEELDSEDAPPCCRLALGEPPPYGAAPIGIPRPPPPRPGMHSPPPRPAPSPGTWESQPARSVRLGGPGGGAGGAGGGRVLECPSIRITSISPTPEPPAALEDNPDAWGDGSPRDYPPPEGFGGYREAGGQGGGAFFSPSPGSSSLSSWSFFSDASDEAALYAACDEVESELNEAASRFGLGSPLPSPRASPRPWTPEDPWSLYGPSPGGRGPEDSWLLLSAPGPTPASPRPASPCGKRRYSSSGTPSSASPALSRRGSLGEEGSEPPPPPPLPLARDPGSPGPFDYVGAPPAESIPQKTRRTSSEQAVALPRSEEPASCNGKLPLGAEESVAPPGGSRKEVAGMDYLAVPSPLAWSKARIGGHSPIFRTSALPPLDWPLPSQYEQLELRIEVQPRAHHRAHYETEGSRGAVKAAPGGHPVVKLLGYSEKPLTLQMFIGTADERNLRPHAFYQVHRITGKMVATASYEAVVSGTKVLEMTLLPENNMAANIDCAGILKLRNSDIELRKGETDIGRKNTRVRLVFRVHVPQGGGKVVSVQAASVPIECSQRSAQELPQVEAYSPSACSVRGGEELVLTGSNFLPDSKVVFIERGPDGKLQWEEEATVNRLQSNEVTLTLTVPEYSNKRVSRPVQVYFYVSNGRRKRSPTQSFRFLPVICKEEPLPDSSLRGFPSASATPFGTDMDFSPPRPPYPSYPHEDPACETPYLSEGFGYGMPPLYPQTGPPPSYRPGLRMFPETRGTTGCAQPPAVSFLPRPFPSDPYGGRGSSFSLGLPFSPPAPFRPPPLPASPPLEGPFPSQSDVHPLPAEGYNKVGPGYGPGEGAPEQEKSRGGYSSGFRDSVPIQGITLEEVSEIIGRDLSGFPAPPGEEPPA

SEQ ID NO: 7427 - protein, 190 aa, Homo sapiens
MDFSPPRPPYPSYPHEDPACETPYLSEGFGYGMPPLYPQTGPPPSYRPGLRMFPETRGTTGCAQPPAVSFLPRPFPSDPYGGRGSSFSLGLPFSPPAPFRPPPLPASPPLEGPFPSQSDVHPLPAEGYNKVGPGYGPGEGAPEQEKSRGGYSSGFRDSVPIQGITLEEVSEIIGRDLSGFPAPPGEEPPA

SEQ ID NO: 7428 - protein, 782 aa, Homo sapiens
MPASISSIFPGPTLLLSCGSEELDSEDAPPCCRLALGEPPPYGAAPIGIPRPPPPRPGMHSPPPRPAPSPGTWESQPARSVRLGGPGGGAGGAGGGRVLECPSIRITSISPTPEPPAALEDNPDAWGDGSPRDYPPPEGFGGYREAGGQGGGAFFSPSPGSSSLSSWSFFSDASDEAALYAACDEVESELNEAASRFGLGSPLPSPRASPRPWTPEDPWSLYGPSPGGRGPEDSWLLLSAPGPTPASPRPASPCGKRRYSSSGTPSSASPALSRRGSLGEEGSEPPPPPPLPLARDPGSPGPFDYVGAPPAESIPQKTRRTSSEQAVALPRSEEPASCNGKLPLGAEESVAPPGGSRKEVAGMDYLAVPSPLAWSKARIGGHSPIFRTSALPPLDWPLPSQYEQLELRIEVQPRAHHRAHYETEGSRGAVKAAPGGHPVVKLLGYSEKPLTLQMFIGTADERNLRPHAFYQVHRITGKMVATASYEAVVSGTKVLEMTLLPENNMAANIDCAGILKLRNSDIELRKGETDIGRKNTRVRLVFRVHVPQGGGKVVSVQAASVPIECSQRSAQELPQVEAYSPSACSVRGGEELVLTGSNFLPDSKVVFIERGPDGKLQWEEEATVNRLQSNEVTLTLTVPEYSNKRVSRPVQVYFYVSNGRRKRSPTQSFRFLPVICKEEPLPDSSLRGFPSASATPFGTDMDFSPPRPPYPSYPHEDPACETPYLSEGFGYGMPPLYPQTGPPPSYRPGLRMFPETRGTTVSEIIGRDLSGFPAPPGEEPPA

SEQ ID NO: 7429 - protein, 934 aa, Homo sapiens
MADGGADSAAQRLPEGPGRVAPGRDLGAPAGSMGAASCEDEELEFKLVFGEEKEAPPLGAGGLGEELDSEDAPPCCRLALGEPPPYGAAPIGIPRPPPPRPGMHSPPPRPAPSPGTWESQPARSVRLGGPGGGAGGAGGGRVLECPSIRITSISPTPEPPAALEDNPDAWGDGSPRDYPPPEGFGGYREAGGQGGGAFFSPSPGSSSLSSWSFFSDASDEAALYAACDEVESELNEAASRFGLGSPLPSPRASPRPWTPEDPWSLYGPSPGGRGPEDSWLLLSAPGPTPASPRPASPCGKRRYSSSGTPSSASPALSRRGSLGEEGSEPPPPPPLPLARDPGSPGPFDYVGAPPAESIPQKTRRTSSEQAVALPRSEEPASCNGKLPLGAEESVAPPGGSRKEVAGMDYLAVPSPLAWSKARIGGHSPIFRTSALPPLDWPLPSQYEQLELRIEVQPRAHHRAHYETEGSRGAVKAAPGGHPVVKLLGYSEKPLTLQMFIGTADERNLRPHAFYQVHRITGKMVATASYEAVVSGTKVLEMTLLPENNMAANIDCAGILKLRNSDIELRKGETDIGRKNTRVRLVFRVHVPQGGGKVVSVQAASVPIECSQRSAQELPQVEAYSPSACSVRGGEELVLTGSNFLPDSKVVFIERGPDGKLQWEEEATVNRLQSNEVTLTLTVPEYSNKRVSRPVQVYFYVSNGRRKRSPTQSFRFLPVICKEEPLPDSSLRGFPSASATPFGTDMDFSPPRPPYPSYPHEDPACETPYLSEGFGYGMPPLYPQTGPPPSYRPGLRMFPETRGTTGCAQPPAVSFLPRPFPSDPYGGRGSSFSLGLPFSPPAPFRPPPLPASPPLEGPFPSQSDVHPLPAEGYNKVGPGYGPGEGAPEQEKSRGGYSSGFRDSVPIQGITLEEVSEIIGRDLSGFPAPPGEEPPA

SEQ ID NO: 7430 - protein, 437 aa, Homo sapiens
MFIGTADERNLRPHAFYQVHRITGKMVATASYEAVVSGTKVLEMTLLPENNMAANIDCAGILKLRNSDIELRKGETDIGRKNTRVRLVFRVHVPQGGGKVVSVQAASVPIECSQRSAQELPQVEAYSPSACSVRGGEELVLTGSNFLPDSKVVFIERGPDGKLQWEEEATVNRLQSNEVTLTLTVPEYSNKRVSRPVQVYFYVSNGRRKRSPTQSFRFLPVICKEEPLPDSSLRGFPSASATPFGTDMDFSPPRPPYPSYPHEDPACETPYLSEGFGYGMPPLYPQTGPPPSYRPGLRMFPETRGTTGCAQPPAVSFLPRPFPSDPYGGRGSSFSLGLPFSPPAPFRPPPLPASPPLEGPFPSQSDVHPLPAEGYNKVGPGYGPGEGAPEQEKSRGGYSSGFRDSVPIQGITLEEVSEIIGRDLSGFPAPPGEEPPA

SEQ ID NO: 7431 - protein, 831 aa, Homo sapiens
MHSPPPRPAPSPGTWESQPARSVRLGGPGGGAGGAGGGRVLECPSIRITSISPTPEPPAALEDNPDAWGDGSPRDYPPPEGFGGYREAGGQGGGAFFSPSPGSSSLSSWSFFSDASDEAALYAACDEVESELNEAASRFGLGSPLPSPRASPRPWTPEDPWSLYGPSPGGRGPEDSWLLLSAPGPTPASPRPASPCGKRRYSSSGTPSSASPALSRRGSLGEEGSEPPPPPPLPLARDPGSPGPFDYVGAPPAESIPQKTRRTSSEQAVALPRSEEPASCNGKLPLGAEESVAPPGGSRKEVAGMDYLAVPSPLAWSKARIGGHSPIFRTSALPPLDWPLPSQYEQLELRIEVQPRAHHRAHYETEGSRGAVKAAPGGHPVVKLLGYSEKPLTLQMFIGTADERNLRPHAFYQVHRITGKMVATASYEAVVSGTKVLEMTLLPENNMAANIDCAGILKLRNSDIELRKGETDIGRKNTRVRLVFRVHVPQGGGKVVSVQAASVPIECSQRSAQELPQVEAYSPSACSVRGGEELVLTGSNFLPDSKVVFIERGPDGKLQWEEEATVNRLQSNEVTLTLTVPEYSNKRVSRPVQVYFYVSNGRRKRSPTQSFRFLPVICKEEPLPDSSLRGFPSASATPFGTDMDFSPPRPPYPSYPHEDPACETPYLSEGFGYGMPPLYPQTGPPPSYRPGLRMFPETRGTTGCAQPPAVSFLPRPFPSDPYGGRGSSFSLGLPFSPPAPFRPPPLPASPPLEGPFPSQSDVHPLPAEGYNKVGPGYGPGEGAPEQEKSRGGYSSGFRDSVPIQGITLEEGGCGTGGCECECVQEIALHVC

SEQ ID NO: 7432 - protein, 82 aa, Homo sapiens
MDFSPPRPPYPSYPHEDPACETPYLSEGFGYGMPPLYPQTGPPPSYRPGLRMFPETRGTTVSEIIGRDLSGFPAPPGEEPPA

SEQ ID NO: 7433 - protein, 969 aa, Homo sapiens
MAEDDPYLGRPEQMFHLDPSLTHTIFNPEVFQPQMALPTADGPYLQILEQPKQRGFRFRYVCEGPSHGGLPGASSEKNKKSYPQVKICNYVGPAKVIVQLVTNGKNIHLHAHSLVGKHCEDGICTVTAGPKDMVVGFANLGILHVTKKKVFETLEARMTEACIRGYNPGLLVHPDLAYLQAEGGGDRQLGDREKELIRQAALQQTKEMDLSVVRLMFTAFLPDSTGSFTRRLEPVVSDAIYDSKAPNASNLKIVRMDRTAGCVTGGEEIYLLCDKVQKDDIQIRFYEEEENGGVWEGFGDFSPTDVHRQFAIVFKTPKYKDINITKPASVFVQLRRKSDLETSEPKPFLYYPEIKDKEEVQRKRQKLMPNFSDSFGGGSGAGAGGGGMFGSGGGGGGTGSTGPGYSFPHYGFPTYGGITFHPGTTKSNAGMKHGTMDTESKKDPEGCDKSDDKNTVNLFGKVIETTEQDQEPSEATVGNGEVTLTYATGTKEESAGVQDNLFLEKAMQLAKRHANALFDYAVTGDVKMLLAVQRHLTAVQDENGDSVLHLAIIHLHSQLVRDLLEVTSGLISDDIINMRNDLYQTPLHLAVITKQEDVVEDLLRAGADLSLLDRLGNSVLHLAAKEGHDKVLSILLKHKKAALLLDHPNGDGLNAIHLAMMSNSLPCLLLLVAAGADVNAQEQKSGRTALHLAVEHDNISLAGCLLLEGDAHVDSTTYDGTTPLHIAAGRGSTRLAALLKAAGADPLVENFEPLYDLDDSWENAGEDEGVVPGTTPLDMATSWQVFDILNGKPYEPEFTSDDLLAQGDMKQLAEDVKLQLYKLLEIPDPDKNWATLAQKLGLGILNNAFRLSPAPSKTLMDNYEVSGGTVRELVEALRQMGYTEAIEVIQAASSPVKTTSQAHSLPLSPASTRQQIDELRDSDSVCDSGVETSFRKLSFTESLTSGASLLTLNKMPHDYGQEGPLEGKI

SEQ ID NO: 7434 - protein, 968 aa, Homo sapiens
MAEDDPYLGRPEQMFHLDPSLTHTIFNPEVFQPQMALPTDGPYLQILEQPKQRGFRFRYVCEGPSHGGLPGASSEKNKKSYPQVKICNYVGPAKVIVQLVTNGKNIHLHAHSLVGKHCEDGICTVTAGPKDMVVGFANLGILHVTKKKVFETLEARMTEACIRGYNPGLLVHPDLAYLQAEGGGDRQLGDREKELIRQAALQQTKEMDLSVVRLMFTAFLPDSTGSFTRRLEPVVSDAIYDSKAPNASNLKIVRMDRTAGCVTGGEEIYLLCDKVQKDDIQIRFYEEEENGGVWEGFGDFSPTDVHRQFAIVFKTPKYKDINITKPASVFVQLRRKSDLETSEPKPFLYYPEIKDKEEVQRKRQKLMPNFSDSFGGGSGAGAGGGGMFGSGGGGGGTGSTGPGYSFPHYGFPTYGGITFHPGTTKSNAGMKHGTMDTESKKDPEGCDKSDDKNTVNLFGKVIETTEQDQEPSEATVGNGEVTLTYATGTKEESAGVQDNLFLEKAMQLAKRHANALFDYAVTGDVKMLLAVQRHLTAVQDENGDSVLHLAIIHLHSQLVRDLLEVTSGLISDDIINMRNDLYQTPLHLAVITKQEDVVEDLLRAGADLSLLDRLGNSVLHLAAKEGHDKVLSILLKHKKAALLLDHPNGDGLNAIHLAMMSNSLPCLLLLVAAGADVNAQEQKSGRTALHLAVEHDNISLAGCLLLEGDAHVDSTTYDGTTPLHIAAGRGSTRLAALLKAAGADPLVENFEPLYDLDDSWENAGEDEGVVPGTTPLDMATSWQVFDILNGKPYEPEFTSDDLLAQGDMKQLAEDVKLQLYKLLEIPDPDKNWATLAQKLGLGILNNAFRLSPAPSKTLMDNYEVSGGTVRELVEALRQMGYTEAIEVIQAASSPVKTTSQAHSLPLSPASTRQQIDELRDSDSVCDSGVETSFRKLSFTESLTSGASLLTLNKMPHDYGQEGPLEGKI

SEQ ID NO: 7435 - protein, 968 aa, Homo sapiens; identical to SEQ ID NO: 7434

SEQ ID NO: 7436 - protein, 145 aa, Homo sapiens
MAEDDPYLGRPEQMFHLDPSLTHTIFNPEVFQPQMALPTADGPYLQILEQPKQRGFRFRYVCEGPSHGGLPGASSEKNKKSYPQVKICNYVGPAKVIVQLVTNGKNIHLHAHSLVGKHCEDGICTVTAGPKDMVVGFANLGILHV

SEQ ID NO: 7437 - protein, 74 aa, Homo sapiens
MKRTTSFRMAEDDPYLGRPEQMFHLDPSLTHTIFNPEVFQPQMALPTDGPYLQILEQPKQRGFRFRYVCEGPSH

SEQ ID NO: 7438 - protein, 317 aa, Homo sapiens
MFQAAERPQEWAMEGPRDGLKKERLLDDRHDSGLDSMKDEEYEQMVKELQEIRLEPQEVPRGSEPWKQQLTEDGDSFLHLAIIHEEKALTMEVIRQVKGDLAFLNFQNNLQQTPLHLAVITNQPEIAEALLGAGCDPELRDFRGNTPLHLACEQGCLASVGVLTQSCTTPHLHSILKATNYNGHTCLHLASIHGYLGIVELLVSLGADVNAQEPCNGRTALHLAVDLQNPDLVSLLLKCGADVNRVTYQGYSPYQLTWGRPSTRIQQQLGQLTLENLQMLPESEDEESYDTESEFTEFTEDELPYDDCVFGGQRLTL

SEQ ID NO: 7439 - protein, 1158 aa, Homo sapiens
MTHGEELGSDVHQDSIVLTYLEGLLMHQAAGGSGTAVDKKSAGHNEEDQNFNISGSAFPTCQSNGPVLNTHTYQGSGMLHLKKARLLQSSEDWNAAKRKRLSDSIMNLNVKKEALLAGMVDSVPKGKQDSTLLASLLQSFSSRLQTVALSQQIRQSLKEQGYALSHDSLKVEKDLRCYGVASSHLKTLLKKSKVKDQKPDTNLPDVTKNLIRDRFAESPHHVGQSGTKVMSEPLSCAARLQAVASMVEKRASPATSPKPSVACSQLALLLSSEAHLQQYSREHALKTQNANQAASERLAAMARLQENGQKDVGSYQLPKGMSSHLNGQARTSSSKLMASKSSATVFQNPMGIIPSSPKNAGYKNSLERNNIKQAANNSLLLHLLKSQTIPKPMNGHSHSERGSIFEESSTPTTIDEYSDNNPSFTDDSSGDESSYSNCVPIDLSCKHRTEKSESDQPVSLDNFTQSLLNTWDPKVPDVDIKEDQDTSKNSKLNSHQKVTLLQLLLGHKNEENVEKNTSPQGVHNDVSKFNTQNYARTSVIESPSTNRTTPVSTPPLLTSSKAGSPINLSQHSLVIKWNSPPYVCSTQSEKLTNTASNHSMDLTKSKDPPGEKPAQNEGAQNSATFSASKLLQNLAQCGMQSSMSVEEQRPSKQLLTGNTDKPIGMIDRLNSPLLSNKTNAVEENKAFSSQPTGPEPGLSGSEIENLLERRTVLQLLLGNPNKGKSEKKEKTPLRDESTQEHSERALSEQILMVKIKSEPCDDLQIPNTNVHLSHDAKSAPFLGMAPAVQRSAPALPVSEDFKSEPVSPQDFSFSKNGLLSRLLRQNQDSYLADDSDRSHRNNEMALLESKNLCMVPKKRKLYTEPLENPFKKMKNNIVDAANNHSAPEVLYGSLLNQEELKFSRNDLEFKYPAGHGSASESEHRSWARESKSFNVLKQLLLSENCVRDLSPHRSNSVADSKKKGHKNNVTNSKPEFSISSLNGLMYSSTQPSSCMDNRTFSYPGVVKTPVSPTFPEHLGCAGSRPESGLLNGCSMPSEKGPIKWVITDAEKNEYEKDSPRLTKTNPILYYMLQKGGNSVTSRETQDKDIWREASSAESVSQVTAKEELLPTAETKASFFNLRSPYNSHMGNNASRPHSANGEVYGLLGSVLTIKKESE

SEQ ID NO: 7440 - protein, 1158 aa, Homo sapiens; identical to SEQ ID NO: 7439

SEQ ID NO: 7441 - protein, 1158 aa, Homo sapiens; identical to SEQ ID NO: 7439

SEQ ID NO: 7442 - protein, 66 aa, Homo sapiens
MTHGEELGSDVHQDSIVLTYLEGLLMHQAAGGSGTAVDKKSAGHNEEDQNFNISGSAFPTCQSNGP

SEQ ID NO: 7443 - protein, 778 aa, Homo sapiens
MDSKESLTPGREENPSSVLAQERGDVMDFYKTLRGGATVKVSASSPSLAVASQSDSKQRRLLVDFPKGSVSNAQQPDLSKAVSLSMGLYMGETETKVMGNDLGFPQQGQISLSSGETDLKLLEESIANLNRSTSVPENPKSSASTAVSAAPTEKEFPKTHSDVSSEQQHLKGQTGTNGGNVKLYTTDQSTFDILQDLEFSSGSPGKETNESPWRSDLLIDENCLLSPLAGEDDSFLLEGNSNEDCKPLILPDTKPKIKDNGDLVLSSPSNVTLPQVKTEKEDFIELCTPGVIKQEKLGTVYCQASFPGANIIGNKMSAISVHGVSTSGGQMYHYDMNTASLSQQQDQKPIFNVIPPIPVGSENWNRCQGSGDDNLTSLGTLNFPGRTVFSNGYSSPSMRPDVSSPPSSSSTATTGPPPKLCLVCSDEASGCHYGVLTCGSCKVFFKRAVEGRQHNYLCAGRNDCIIDKIRRKNCPACRYRKCLQAGMNLEARKTKKKIKGIQQATTGVSQETSENPGNKTIVPATLPQLTPTLVSLLEVIEPEVLYAGYDSSVPDSTWRIMTTLNMLGGRQVIAAVKWAKAIPGFRNLHLDDQMTLLQYSWMFLMAFALGWRSYRQSSANLLCFAPDLIINEQRMTLPCMYDQCKHMLYVSSELHRLQVSYEEYLCMKTLLLLSSVPKDGLKSQELFDEIRMTYIKELGKAIVKREGNSSQNWQRFYQLTKLLDSMHEVVENLLNYCFQTFLDKTMSIEFPEMLAEIITNQIPKYSNGNIKKLLFHQK

SEQ ID NO: 7444 - protein, 777 aa, Homo sapiens
MDSKESLTPGREENPSSVLAQERGDVMDFYKTLRGGATVKVSASSPSLAVASQSDSKQRRLLVDFPKGSVSNAQQPDLSKAVSLSMGLYMGETETKVMGNDLGFPQQGQISLSSGETDLKLLEESIANLNRSTSVPENPKSSASTAVSAAPTEKEFPKTHSDVSSEQQHLKGQTGTNGGNVKLYTTDQSTFDILQDLEFSSGSPGKETNESPWRSDLLIDENCLLSPLAGEDDSFLLEGNSNEDCKPLILPDTKPKIKDNGDLVLSSPSNVTLPQVKTEKEDFIELCTPGVIKQEKLGTVYCQASFPGANIIGNKMSAISVHGVSTSGGQMYHYDMNTASLSQQQDQKPIFNVIPPIPVGSENWNRCQGSGDDNLTSLGTLNFPGRTVFSNGYSSPSMRPDVSSPPSSSSTATTGPPPKLCLVCSDEASGCHYGVLTCGSCKVFFKRAVEGQHNYLCAGRNDCIIDKIRRKNCPACRYRKCLQAGMNLEARKTKKKIKGIQQATTGVSQETSENPGNKTIVPATLPQLTPTLVSLLEVIEPEVLYAGYDSSVPDSTWRIMTTLNMLGGRQVIAAVKWAKAIPGFRNLHLDDQMTLLQYSWMFLMAFALGWRSYRQSSANLLCFAPDLIINEQRMTLPCMYDQCKHMLYVSSELHRLQVSYEEYLCMKTLLLLSSVPKDGLKSQELFDEIRMTYIKELGKAIVKREGNSSQNWQRFYQLTKLLDSMHEVVENLLNYCFQTFLDKTMSIEFPEMLAEIITNQIPKYSNGNIKKLLFHQK

SEQ ID NO: 7445 - protein, 593 aa, Homo sapiens
MDSKESLTPGREENPSSVLAQERGDVMDFYKTLRGGATVKVSASSPSLAVASQSDSKQRRLLVDFPKGSVSNAQQPDLSKAVSLSMGLYMGETETKVMGNDLGFPQQGQISLSSGETDLKLLEESIANLNRSTSVPENPKSSASTAVSAAPTEKEFPKTHSDVSSEQQHLKGQTGTNGGNVKLYTTDQSTFDILQDLEFSSGSPGKETNESPWRSDLLIDENCLLSPLAGEDDSFLLEGNSNEDCKPLILPDTKPKIKDNGDLVLSSPSNVTLPQVKTEKEDFIELCTPGVIKQEKLGTVYCQASFPGANIIGNKMSAISVHGVSTSGGQMYHYDMNTASLSQQQDQKPIFNVIPPIPVGSENWNRCQGSGDDNLTSLGTLNFPGRTVFSNGYSSPSMRPDVSSPPSSSSTATTGPPPKLCLVCSDEASGCHYGVLTCGSCKVFFKRAVEGQHNYLCAGRNDCIIDKIRRKNCPACRYRKCLQAGMNLEVVPKDGLKSQELFDEIRMTYIKELGKAIVKREGNSSQNWQRFYQLTKLLDSMHEVVENLLNYCFQTFLDKTMSIEFPEMLAEIITNQIPKYSNGNIKKLLFHQK

SEQ ID NO: 7446 - protein, 777 aa, Homo sapiens; identical to SEQ ID NO: 7444

SEQ ID NO: 7447 - protein, 778 aa, Homo sapiens; identical to SEQ ID NO: 7443

SEQ ID NO: 7448 - protein, 742 aa, Homo sapiens
MDSKESLTPGREENPSSVLAQERGDVMDFYKTLRGGATVKVSASSPSLAVASQSDSKQRRLLVDFPKGSVSNAQQPDLSKAVSLSMGLYMGETETKVMGNDLGFPQQGQISLSSGETDLKLLEESIANLNRSTSVPENPKSSASTAVSAAPTEKEFPKTHSDVSSEQQHLKGQTGTNGGNVKLYTTDQSTFDILQDLEFSSGSPGKETNESPWRSDLLIDENCLLSPLAGEDDSFLLEGNSNEDCKPLILPDTKPKIKDNGDLVLSSPSNVTLPQVKTEKEDFIELCTPGVIKQEKLGTVYCQASFPGANIIGNKMSAISVHGVSTSGGQMYHYDMNTASLSQQQDQKPIFNVIPPIPVGSENWNRCQGSGDDNLTSLGTLNFPGRTVFSNGYSSPSMRPDVSSPPSSSSTATTGPPPKLCLVCSDEASGCHYGVLTCGSCKVFFKRAVEGQHNYLCAGRNDCIIDKIRRKNCPACRYRKCLQAGMNLEARKTKKKIKGIQQATTGVSQETSENPGNKTIVPATLPQLTPTLVSLLEVIEPEVLYAGYDSSVPDSTWRIMTTLNMLGGRQVIAAVKWAKAIPGFRNLHLDDQMTLLQYSWMFLMAFALGWRSYRQSSANLLCFAPDLIINEQRMTLPCMYDQCKHMLYVSSELHRLQVSYEEYLCMKTLLLLSSVPKDGLKSQELFDEIRMTYIKELGKAIVKREGNSSQNWQRFYQLTKLLDSMHENVMWLKPESTSHTLI

SEQ ID NO: 7449 - protein, 380 aa, Homo sapiens
MRPDVSSPPSSSSTATTGPPPKLCLVCSDEASGCHYGVLTCGSCKVFFKRAVEGQHNYLCAGRNDCIIDKIRRKNCPACRYRKCLQAGMNLEARKTKKKIKGIQQATTGVSQETSENPGNKTIVPATLPQLTPTLVSLLEVIEPEVLYAGYDSSVPDSTWRIMTTLNMLGGRQVIAAVKWAKAIPGFRNLHLDDQMTLLQYSWMFLMAFALGWRSYRQSSANLLCFAPDLIINEQRMTLPCMYDQCKHMLYVSSELHRLQVSYEEYLCMKTLLLLSSVPKDGLKSQELFDEIRMTYIKELGKAIVKREGNSSQNWQRFYQLTKLLDSMHEVVENLLNYCFQTFLDKTMSIEFPEMLAEIITNQIPKYSNGNIKKLLFHQK

SEQ ID NO: 7450 - protein, 751 aa, Homo sapiens
MDSKESLTPGREENPSSVLAQERGDVMDFYKTLRGGATVKVSASSPSLAVASQSDSKQRRLLVDFPKGSVSNAQQPDLSKAVSLSMGLYMGETETKVMGNDLGFPQQGQISLSSGETDLKLLEESIANLNRSTSVPENPKSSASTAVSAAPTEKEFPKTHSDVSSEQQHLKGQTGTNGGNVKLYTTDQSTFDILQDLEFSSGSPGKETNESPWRSDLLIDENCLLSPLAGEDDSFLLEGNSNEDCKPLILPDTKPKIKDNGDLVLSSPSNVTLPQVKTEKEDFIELCTPGVIKQEKLGTVYCQASFPGANIIASLSQQQDQKPIFNVIPPIPVGSENWNRCQGSGDDNLTSLGTLNFPGRTVFSNGYSSPSMRPDVSSPPSSSSTATTGPPPKLCLVCSDEASGCHYGVLTCGSCKVFFKRAVEGQHNYLCAGRNDCIIDKIRRKNCPACRYRKCLQAGMNLEARKTKKKIKGIQQATTGVSQETSENPGNKTIVPATLPQLTPTLVSLLEVIEPEVLYAGYDSSVPDSTWRIMTTLNMLGGRQVIAAVKWAKAIPGFRNLHLDDQMTLLQYSWMFLMAFALGWRSYRQSSANLLCFAPDLIINEQRMTLPCMYDQCKHMLYVSSELHRLQVSYEEYLCMKTLLLLSSVPKDGLKSQELFDEIRMTYIKELGKAIVKREGNSSQNWQRFYQLTKLLDSMHEVVENLLNYCFQTFLDKTMSIEFPEMLAEIITNQIPKYSNGNIKKLLFHQK

SEQ ID NO: 7451 - protein, 144 aa, Homo sapiens
MDSKESLTPGREENPSSVLAQERGDVMDFYKTLRGGATVKVSASSPSLAVASQSDSKQRRLLVDFPKGSVSNAQQPDLSKAVSLSMGLYMGETETKVMGNDLGFPQQGQISLSSGETDLKLLEESIANLNRSTSVPENPKSSAS

SEQ ID NO: 7452 - protein, 145 aa, Homo sapiens
MDSKESLTPGREENPSSVLAQERGDVMDFYKTLRGGATVKVSASSPSLAVASQSDSKQRRLLVDFPKGSVSNAQQPDLSKAVSLSMGLYMGETETKVMGNDLGFPQQGQISLSSGETDLKLLEESIANLNRSTSVPENPKSSAST

SEQ ID NO: 7453 - protein, 777 aa, Homo sapiens; identical to SEQ ID NO: 7444

SEQ ID NO: 7454 - protein, 778 aa, Homo sapiens; identical to SEQ ID NO: 7443

SEQ ID NO: 7455 - protein, 145 aa, Homo sapiens; identical to SEQ ID NO: 7452

SEQ ID NO: 7456 - protein, 145 aa, Homo sapiens; identical to SEQ ID NO: 7452

SEQ ID NO: 7457 - protein, 145 aa, Homo sapiens; identical to SEQ ID NO: 7452

SEQ ID NO: 7458 - protein, 637 aa, Homo sapiens
MHDSIRFGNVDMPCVQAQYSPSPPGSSYAAQTYSSEYTTEIMNPDYTKLTMDLGSTEITATATTSLPSISTFVEGYSSNYELKPSCVYQMQRPLIKVEEGRAPSYHHHHHHHHHHHHHHQQQHQQPSIPPASSPEDEVLPSTSMYFKQSPPSTPTTPAFPPQAGALWDEALPSAPGCIAPGPLLDPPMKAVPTVAGARFPLFHFKPSPPHPPAPSPAGGHHLGYDPTAAAALSLPLGAAAAAGSQAAALESHPYGLPLAKRAAPLAFPPLGLTPSPTASSLLGESPSLPSPPSRSSSSGEGTCAVCGDNAACQHYGVRTCEGCKGFFKRTVQKNAKYVCLANKNCPVDKRRRNRCQYCRFQKCLSVGMVKEVVRTDSLKGRRGRLPSKPKSPLQQEPSQPSPPSPPICMMNALVRALTDSTPRDLDYSRYCPTDQAAAGTDAEHVQQFYNLLTASIDVSRSWAEKIPGFTDLPKEDQTLLIESAFLELFVLRLSIRSNTAEDKFVFCNGLVLHRLQCLRGFGEWLDSIKDFSLNLQSLNLDIQALACLSALSMITERHGLKEPKRVEELCNKITSSLKDHQSKGQALEPTESKVLGALVELRKICTLGLQRIFYLKLEDLVSPPSIIDKLFLDTLPF

SEQ ID NO: 7459 - protein, 443 aa, Homo sapiens
MPCVQAQYSPSPPGSSYAAQTYSSEYTTEIMNPDYTKLTMDLGSTEITATATTSLPSISTFVEGYSSNYELKPSCVYQMQRPLIKVEEGRAPSYHHHHHHHHHHHHHHQQQHQQPSIPPASSPEDEVLPSTSMYFKQSPPSTPTTPAFPPQAGALWDEALPSAPGCIAPGPLLDPPMKAVPTVAGARFPLFHFKPSPPHPPAPSPAGGHHLGYDPTAAAALSLPLGAAAAAGSQAAALESHPYGLPLAKRAAPLAFPPLGLTPSPTASSLLGESPSLPSPPSRSSSSGEGTCAVCGDNAACQHYGVRTCEGCKGFFKRTVQKNAKYVCLANKNCPVDKRRRNRCQYCRFQKCLSVGMVKEVVRTDSLKGRRGRLPSKPKSPLQQEPSQPSPPSPPICMMNALVRALTDSTPRDLDYSRVSFMISCFQMNDQGLYLWLLVIRVD

SEQ ID NO: 7460 - protein, 297 aa, Homo sapiens
MKAVPTVAGARFPLFHFKPSPPHPPAPSPAGGHHLGYDPTAAAALSLPLGAAAAAGSQAAALESHPYGLPLAKRAAPLAFPPLGLTPSPTASSLLGESPSLPSPPSRSSSSGEGTCAVCGDNAACQHYGVRTCEGCKGFFKRTVQKNAKYVCLANKNCPVDKRRRNRCQYCRFQKCLSVGMVKEVVRTDSLKGRRGRLPSKPKSPLQQEPSQPSPPSPPICMMNALVRALTDSTPRDLDYSRVSFMISCFQMNDQGLYLWLLVIRVLDSFHTFSIFLASFSNSVHPLQQIIFALLNL

SEQ ID NO: 7461 - protein, 626 aa, Homo sapiens
MPCVQAQYSPSPPGSSYAAQTYSSEYTTEIMNPDYTKLTMDLGSTEITATATTSLPSISTFVEGYSSNYELKPSCVYQMQRPLIKVEEGRAPSYHHHHHHHHHHHHHHQQQHQQPSIPPASSPEDEVLPSTSMYFKQSPPSTPTTPAFPPQAGALWDEALPSAPGCIAPGPLLDPPMKAVPTVAGARFPLFHFKPSPPHPPAPSPAGGHHLGYDPTAAAALSLPLGAAAAAGSQAAALESHPYGLPLAKRAAPLAFPPLGLTPSPTASSLLGESPSLPSPPSRSSSSGEGTCAVCGDNAACQHYGVRTCEGCKGFFKRTVQKNAKYVCLANKNCPVDKRRRNRCQYCRFQKCLSVGMVKEVVRTDSLKGRRGRLPSKPKSPLQQEPSQPSPPSPPICMMNALVRALTDSTPRDLDYSRYCPTDQAAAGTDAEHVQQFYNLLTASIDVSRSWAEKIPGFTDLPKEDQTLLIESAFLELFVLRLSIRSNTAEDKFVFCNGLVLHRLQCLRGFGEWLDSIKDFSLNLQSLNLDIQALACLSALSMITERHGLKEPKRVEELCNKITSSLKDHQSKGQALEPTESKVLGALVELRKICTLGLQRIFYLKLEDLVSPPSIIDKLFLDTLPF

SEQ ID NO: 7462 - protein, 208 aa, Homo sapiens
MGNAQERPSETIDRERKRLVETLQADSGLLLDALLARGVLTGPEYEALDALPDAERRVRRLLLLVQGKGEAACQELLRCAQRTAGAPDPAWDWQHVGPGYRDRSYDPPCPGHWTPEAPGSGTTCPGLPRASDPDEAGGPEGSEAVQSGTPEEPEPELEAEASKEAEPEPEPEPELEPEAEAEPEPELEPEPDPEPEPDFEERDESEDS

SEQ ID NO: 7463 - protein, 208 aa, Homo sapiens; identical to SEQ ID NO: 7462

SEQ ID NO: 7464 - protein, 710 aa, Homo sapiens
MVKLAKAGKNQGDPKKMAPPPKEVEEDSEDEEMSEDEEDDSSGEEVVIPQKKGKKAAATSAKKVVVSPTKKVAVATPAKKAAVTPGKKAAATPAKKTVTPAKAVTTPGKKGATPGKALVATPGKKGAAIPAKGAKNGKNAKKEDSDEEEDDDSEEDEEDDEDEDEDEDEIEPAAMKAAAAAPASEDEDDEDDEDDEDDDDDEEDDSEEEAMETTPAKGKKAAKVVPVKAKNVAEDEDEEEDDEDEDDDDDEDDEDDDDEDDEEEEEEEEEEPVKEAPGKRKKEMAKQKAAPEAKKQKVEGTEPTTAFNLFVGNLNFNKSAPELKTGISDVFAKNDLAVVDVRIGMTRKFGYVDFESAEDLEKALELTGLKVFGNEIKLEKPKGKDSKKERDARTLLAKNLPYKVTQDELKEVFEDAAEIRLVSKDGKSKGIAYIEFKTEADAEKTFEEKQGTEIDGRSISLYYTGEKGQNQDYRGGKNSTWSGESKTLVLSNLSYSATEETLQEVFEKATFIKVPQNQNGKSKGYAFIEFASFEDAKEALNSCNKREIEGRAIRLELQGPRGSPNARSQPSKTLFVKGLSEDTTEETLKESFDGSVRARIVTDRETGSSKGFGFVDFNSEEDAKAAKEAMEDGEIDGNKVTLDWAKPKGEGGFGGRGGGRGGFGGRGGGRGGRGGFGGRGRGGFGGRGGFRGGRGGGGDHKPQGKKTKFE

SEQ ID NO: 7465 - protein, 482 aa, Homo sapiens
MVKLAKAGKNQGDPKKMAPPPKEVEEDSEDEEMSEDEEDDSSGEEVVIPQKKGKKAAATSAKKVVVSPTKKVAVATPAKKAAVTPGKKAAATPAKKTVTPAKAVTTPGKKGATPGKALVATPGKKGAAIPAKGAKNGKNAKKEDSDEEEDDDSEEDEEDDEDEDEDEDEIEPAAMKAAAAAPASEDEDDEDDEDDEDGKSKGIAYIEFKTEADAEKTFEEKQGTEIDGRSISLYYTGEKGQNQDYRGGKNSTWSGESKTLVLSNLSYSATEETLQEVFEKATFIKVPQNQNGKSKGYAFIEFASFEDAKEALNSCNKREIEGRAIRLELQGPRGSPNARSQPSKTLFVKGLSEDTTEETLKESFDGSVRARIVTDRETGSSKGFGFVDFNSEEDAKAAKEAMEDGEIDGNKVTLDWAKPKGEGGFGGRGGGRGGFGGRGGGRGGRGGFGGRGRGGFGGRGGFRGGRGGGGDHKPQGKKTKFE

SEQ ID NO: 7466 - protein, 602 aa, Homo sapiens
MVKLAKAGKNQGDPKKMAPPPKEVEEDSEDEEMSEDEEDDSSGEELNDDFYQTTMHTLWKKGKKAAATSAIPAKGAKNGKNAKKEDSDEEEDDDSEEDEEDDEDEDEDEDEIEPAAMKAAAAAPASEDEDDEDDEDDEDDDDDEEDDDDDEDDEEEEEEEEEEPVKEAPGKRKKEMAKQKAAPEAKKQKVEGTEPTTAFNLFVGNLNFNKSAPELKTGISDVFAKNDLAVVDVRIGMTRKFGYVDFESAEDLEKALELTGLKVFGNEIKLEKPKGKDSKKERDARTLLAKNLPYKVTQDELKEVFEDAAEIRLVSKDGKSKGIAYIEFKTEADAEKTFEEKQGTEIDGRSISLYYTGEKGQNQDYRGGKNSTWSGESKTLVLSNLSYSATEETLQEVFEKATFIKVPQNQNGKSKGYAFIEFASFEDAKEALNSCNKREIEGRAIRLELQGPRGSPNARSQPSKTLFVKGLSEDTTEETLKESFDGSVRARIVTDRETGSSKGFGFVDFNSEEDAKAAKEAMEDGEIDGNKVTLDWAKPKGEGGFGGRGGGRGGFGGRGGGRGGRGGFGGRGRGGFGGRGGFRGGRGGGGDHKPQGKKTKFE

SEQ ID NO: 7467 - protein, 294 aa, Homo sapiens
MEDSMDMDMSPLRPQNYLFGCELKADKDYHFKVDNDENEHQLSLRTVSLGAGAKDELHIVEAEAMNYEGSPIKVTLATLKMSVQPTVSLGGFEITPPVVLRLKCGSGPVHISGQHLVAVEEDAESEDEEEEDVKLLSISGKRSAPGGGSKVPQKKVKLAADEDDDDDDEEDDDEDDDDDDFDDEEAEEKAPVKKSIRDTPAKNAQKSNQNGKDSKPSSTPRSKGQESFKKQEKTPKTPKGPSSVEDIKAKMQASIEKGGSLPKVEAKFINYVKNCFRMTDQEAIQDLWQWRKSL

SEQ ID NO: 7468 - protein, 265 aa, Homo sapiens
MEDSMDMDMSPLRPQNYLFGCELKADKDYHFKVDNDENEHQLSLRTVSLGAGAKDELHIVEAEAMNYEGSPIKVTLATLKMSVQPTVSLGGFEITPPVVLRLKCGSGPVHISGQHLVAVEEDAESEDEEEEDVKLLSISGKRSAPGGGSKVPQKKVKLAADEDDDDDDEEDDDEDDDDDDFDDEEAEEKAPVKKGQESFKKQEKTPKTPKGPSSVEDIKAKMQASIEKGGSLPKVEAKFINYVKNCFRMTDQEAIQDLWQWRKSL

SEQ ID NO: 7469 - protein, 259 aa, Homo sapiens
MEDSMDMDMSPLRPQNYLFGCELKADKDYHFKVDNDENEHQLSLRTVSLGAGAKDELHIVEAEAMNYEGSPIKVTLATLKMSVQPTVSLGGFEITPPVVLRLKCGSGPVHISGQHLVAVEEDAESEDEEEEDVKLLSISGKRSAPGGGSKVPQKKVKLAADEDDDDDDEEDDDEDDDDDDFDDEEAEEKAPVKKSIRDTPAKNAQKSNQNGKDSKPSSTPRSKGQESFKKQEKTPKTPKGPSSVEDIKAKMQASIEKAH

SEQ ID NO: 7470 - protein, 294 aa, Homo sapiens; identical to SEQ ID NO: 7467

SEQ ID NO: 7471 - protein, 953 aa, Homo sapiens
MEEQGHSEMEIIPSESHPHIQLLKSNRELLVTHIRNTQCLVDNLLKNDYFSAEDAEIVCACPTQPDKVRKILDLVQSKGEEVSEFFLYLLQQLADAYVDLRPWLLEIGFSPSLLTQSKVVVNTDPVSRYTQQLRHHLGRDSKFVLCYAQKEELLLEEIYMDTIMELVGFSNESLGSLNSLACLLDHTTGILNEQGETIFILGDAGVGKSMLLQRLQSLWATGRLDAGVKFFFHFRCRMFSCFKESDRLCLQDLLFKHYCYPERDPEEVFAFLLRFPHVALFTFDGLDELHSDLDLSRVPDSSCPWEPAHPLVLLANLLSGKLLKGASKLLTARTGIEVPRQFLRKKVLLRGFSPSHLRAYARRMFPERALQDRLLSQLEANPNLCSLCSVPLFCWIIFRCFQHFRAAFEGSPQLPDCTMTLTDVFLLVTEVHLNRMQPSSLVQRNTRSPVETLHAGRDTLCSLGQVAHRGMEKSLFVFTQEEVQASGLQERDMQLGFLRALPELGPGGDQQSYEFFHLTLQAFFTAFFLVLDDRVGTQELLRFFQEWMPPAGAATTSCYPPFLPFQCLQGSGPAREDLFKNKDHFQFTNLFLCGLLSKAKQKLLRHLVPAAALRRKRKALWAHLFSSLRGYLKSLPRVQVESFNQVQAMPTFIWMLRCIYETQSQKVGQLAARGICANYLKLTYCNACSADCSALSFVLHHFPKRLALDLDNNNLNDYGVRELQPCFSRLTVLRLSVNQITDGGVKVLSEELTKYKIVTYLGLYNNQITDVGARYVTKILDECKGLTHLKLGKNKITSEGGKYLALAVKNSKSISEVGMWGNQVGDEGAKAFAEALRNHPSLTTLSLASNGISTEGGKSLARALQQNTSLEILWLTQNELNDEVAESLAEMLKVNQTLKHLWLIQNQITAKGTAQLADALQSNTGITEICLNGNLIKPEEAKVYEDEKRIICF

SEQ ID NO: 7472 - protein, 60 aa, Homo sapiens
MEEQGHSEMEIIPSESHPHIQLLKSNRELLVTHIRNTQCLVDNLLKNDYFSAEDAEIVCA

SEQ ID NO: 7473 - protein, 60 aa, Homo sapiens; identical to SEQ ID NO: 7472

SEQ ID NO: 7474 - protein, 45 aa, Homo sapiens
MEEQGHSEMEIIPSESHPHIQLLKSNRELLVTHIRNTQCLVDNLL

SEQ ID NO: 7475 - protein, 60 aa, Homo sapiens; identical to SEQ ID NO: 7472

SEQ ID NO: 7476 - protein, 249 aa, Homo sapiens
MEEQGHSEMEIIPSESHPHIQLLKSNRELLVTHIRNTQCLVDNLLKNDYFSAEDAEIVCACPTQPDKVRKILDLVQSKGEEVSEFFLYLLQQLADAYVDLRPWLLEIGFSPSLLTQSKVVVNTDPVSRYTQQLRHHLGRDSKFVLCYAQKEELLLEEIYMDTIMELVGFSNESLGSLNSLACLLDHTTGILNEQAASRKVTGCVCRTCSSSTTATQSGTPRRCLPSCCASPTWPSSPSMAWTSCTRTWT

SEQ ID NO: 7477 - protein, 779 aa, Homo sapiens
MEEQGHSEMEIIPSESHPHIQLLKSNRELLVTHIRNTQCLVDNLLKNDYFSAEDAEIVCACPTQPDKVRKILDLVQSKGEEVSEFFLYLLQQLADAYVDLRPWLLEIGFSPSLLTQSKVVVNTDPVSRYTQQLRHHLGRDSKFVLCYAQKEELLLEEIYMDTIMELVGFSNESLGSLNSLACLLDHTTGILNEQGETIFILGDAGVGKSMLLQRLQSLWATGRLDAGVKFFFHFRCRMFSCFKESDRLCLQDLLFKHYCYPERDPEEVFAFLLRFPHVALFTFDGLDELHSDLDLSRVPDSSCPWEPAHPLVLLANLLSGKLLKGASKLLTARTGIEVPRQFLRKKVLLRGFSPSHLRAYARRMFPERALQDRLLSQLEANPNLCSLCSVPLFCWIIFRCFQHFRAAFEGSPQLPDCTMTLTDVFLLVTEVHLNRMQPSSLVQRNTRSPVETLHAGRDTLCSLGQVAHRGMEKSLFVFTQEEVQASGLQERDMQLGFLRALPELGPGGDQQSYEFFHLTLQAFFTAFFLVLDDRVGTQELLRFFQEWMPPAGAATTSCYPPFLPFQCLQGSGPAREDLFKNKDHFQFTNLFLCGLLSKAKQKLLRHLVPAAALRRKRKALWAHLFSSLRGYLKSLPRVQVESFNQVQAMPTFIWMLRCIYETQSQKVGQLAARGICANYLKLTYCNACSADCSALSFVLHHFPKRLALDLDNNNLNDYGVRELQPCFSRLTVLRLSVNQITDGGVKVLSEELTKYKIVTYLGLWKSVDTICFKKQGLLK

SEQ ID NO: 7478 - protein, 164 aa, Homo sapiens
MKCKPNQTRTYDPEGFKKRAACLCFRSEREDEVLLVSSSRYPDRWIVPGGGMEPEEEPGGAAVREVYEEAGVKGKLGRLLGVFEQNQDRKHRTYVYVLTVTELLEDWEDSVSIGRKREWFKVEDAIKVLQCHKPVHAEYLEKLKLGGSPTNGNSMAPSSPDSDP

SEQ ID NO: 7479 - protein, 263 aa, Homo sapiens
MSLYCGIACRRKFFWCYRLLSTYVTKTRYLFELKEDDDACKKAQQTGAFYLFHSLAPLLQTSAHQYLAPRHSLLELERLLGKFGQDAQRIEDSVLIGCSEQQEAWFALDLGLDSSFSISASLHKPEMETELKGSFIELRKALFQLNARDASLLSTAQALLRWHDAHQFCSRSGQPTKKNVAGSKRVCPSNNIIYYPQIQVNLRELETAAWFSHDEVATALKRKGPYTQQQNGTFPFWLPPKLAISHQLIKEWVEKQTCSSLPA

SEQ ID NO: 7480 - protein, 352 aa, Homo sapiens
MSLYCGIACRRKFFWCYRLLSTYVTKTRYLFELKEDDDACKKAQQTGAFYLFHSLAPLLQTSAHQYLAPRHSLLELERLLGKFGQDAQRIEDSVLIGCSEQQEAWFALDLGLDSSFSISASLHKPEMETELKGSFIELRKALFQLNARDASLLSTAQALLRWHDAHQFCSRSGQPTKKNVAGSKRVCPSNNIIYYPQMAPVAITLVSDGTRCLLARQSSFPKGMYSALAGFCDIGESVEETIRREVAEEVGLEVESLQYYASQHWPFPSGSLMIACHATVKPGQTEIQVNLRELETAAWFSHDEVATALKRKGPYTQQQNGTFPFWLPPKLAISHQLIKEWVEKQTCSSLPA

SEQ ID NO: 7481 - protein, 235 aa, Homo sapiens
MSLYCGIACRRKFFWCYRLLSTYVTKTRYLFELKEDDDACKKAQQTGAFYLFHSLAPLLQTSAHQYLAPRHSLLELERLLGKFGQDAQRIEDSVLIGCSEQQEAWFALDLGLDSSFSISASLHKPEMETELKGSFIELRKALFQLNARDASLLSTAQALLRWHDAHQFCSRSGQPTKKNVAGSKRVCPSNNIIYYPQVKVWKRPSAEKLQKRWDWRWKACSTMHPSIGPSLVAHS

SEQ ID NO: 7482 - protein, 155 aa, Homo sapiens
MAPVAITLVSDGTRCLLARQSSFPKGMYSALAGFCDIGESVEETIRREVAEEVGLEVESLQYYASQHWPFPSGSLMIACHATVKPGQTEIQVNLRELETAAWFSHDEVATALKRKGPYTQQQNGTFPFWLPPKLAISHQLIKEWVEKQTCSSLPA

SEQ ID NO: 7483 - protein, 226 aa, Homo sapiens
METELKGSFIELRKALFQLNARDASLLSTAQALLRWHDAHQFCSRSGQPTKKNVAGSKRVCPSNNIIYYPQMAPVAITLVSDGTRCLLARQSSFPKGMYSALAGFCDIGESVEETIRREVAEEVGLEVESLQYYASQHWPFPSGSLMIACHATVKPGQTEIQVNLRELETAAWFSHDEVATALKRKGPYTQQQNGTFPFWLPPKLAISHQLIKEWVEKQTCSSLPA

SEQ ID NO: 7484 - protein, 238 aa, Homo sapiens
MLGQPAPLERFASRRPQVLAVRTVCDLVLGKMDKDCEMKRTTLDSPLGKLELSGCEQGLHEIKLLGKGTSAADAVEVPAPAAVLGGPEPLMQCTAWLNAYFHQPEAIEEFPVPALHHPVFQQESFTRQVLWKLLKVVKFGEVISYQQLAALAGNPKAARAVGGAMRGNPVPILIPCHRVVCSSGAVGNYSGGLAVKEWLLAHEGHRLGKPGLGGSSGLAGAWLKGAGATSGSPPAGRN

SEQ ID NO: 7485 - protein, 522 aa, Homo sapiens
MSSRPLESPPPYRPDEFKPNHYAPSNDIYGGEMHVRPMLSQPAYSFYPEDEILHFYKWTSPPGVIRILSMLIIVMCIAIFACVASTLAWDRGYGTSLLGGSVGYPYGGSGFGSYGSGYGYGYGYGYGYGGYTDPRAAKGFMLAMAAFCFIAALVIFVTSVIRSEMSRTRRYYLSVIIVSAILGIMVFIATIVYIMGVNPTAQSSGSLYGSQIYALCNQFYTPAATGLYVDQYLYHYCVVDPQEAIAIVLGFMIIVAFALIIFFAVKTRRKMDRYDKSNILWDKEHIYDEQPPNVEEWVKNVSAGTQDVPSPPSDYVERVDSPMAYSSNGKVNDKRFYPESSYKSTPVPEVVQELPLTSPVDDFRQPRYSSGGNFETPSKRAPAKGRAGRSKRTEQDHYETDYTTGGESCDELEEDWIREYPPITSDQQRQLYKRNFDTGLQEYKSLQSELDEINKELSRLDKELDDYREESEEYMAAADEYNRLKQVKGSADYKSKKNHCKQLKSKLSHIKKMVGDYDRQKT

SEQ ID NO: 7486 - protein, 468 aa, Homo sapiens
MSSRPLESPPPYRPDEFKPNHYAPSNDIYGGEMHVRPMLSQPAYSFYPEDEILHFYKWTSPPGVIRILSMLIIVMCIAIFACVASTLAWDRGYGTSLLGGSVGYPYGGSGFGSYGSGYGYGYGYGYGYGGYTDPRAAKGFMLAMAAFCFIAALVIFVTSVIRSEMSRTRRYYLSVIIVSAILGIMVFIATIVYIMGVNPTAQSSGSLYGSQIYALCNQFYTPAATGLYVDQYLYHYCVVDPQEVKNVSAGTQDVPSPPSDYVERVDSPMAYSSNGKVNDKRFYPESSYKSTPVPEVVQELPLTSPVDDFRQPRYSSGGNFETPSKRAPAKGRAGRSKRTEQDHYETDYTTGGESCDELEEDWIREYPPITSDQQRQLYKRNFDTGLQEYKSLQSELDEINKELSRLDKELDDYREESEEYMAAADEYNRLKQVKGSADYKSKKNHCKQLKSKLSHIKKMVGDYDRQKT

SEQ ID NO: 7487 - protein, 522 aa, Homo sapiens; identical to SEQ ID NO: 7485

SEQ ID NO: 7488 - protein, 271 aa, Homo sapiens
MIIVAFALIIFFAVKTRRKMDRYDKSNILWDKEHIYDEQPPNVEEWVKNVSAGTQDVPSPPSDYVERVDSPMAYSSNGKVNDKRFYPESSYKSTPVPEVVQELPLTSPVDDFRQPRYSSGGNFETPSKRAPAKGRAGRSKRTEQDHYETDYTTGGESCDELEEDWIREYPPITSDQQRQLYKRNFDTGLQEYKSLQSELDEINKELSRLDKELDDYREESEEYMAAADEYNRLKQVKGSADYKSKKNHCKQLKSKLSHIKKMVGDYDRQKT

SEQ ID NO: 7489 - protein, 200 aa, Homo sapiens
MAYSSNGKVNDKRFYPESSYKSTPVPEVVQELPLTSPVDDFRQPRYSSGGNFETPSKRAPAKGRAGRSKRTEQDHYETDYTTGGESCDELEEDWIREYPPITSDQQRQLYKRNFDTGLQEYKSLQSELDEINKELSRLDKELDDYREESEEYMAAADEYNRLKQVKGSADYKSKKNHCKQLKSKLSHIKKMVGDYDRQKT

SEQ ID NO: 7490 - protein, 368 aa, Homo sapiens
MQPGSSRCEEETPSLLWGLDPVFLAFAKLYIRDILDMKESRQVPGVFLYNGHPIKQVDVLGTVIGVRERDAFYSYGVDDSTGVINCICWKKLNTESVSAAPSAARELSLTSQLKKLQETIEQKTKIEIGDTIRVRGSIRTYREEREIHATTYYKVDDPVWNIQIARMLELPTIYRKVYDQPFHSSALEKEEALSNPGALDLPSLTSLLSEKAKEFLMENRVQSFYQQELEMVESLLSLANQPVIHSASSDQVNFKKDTTSKAIHSIFKNAIQLLQEKGLVFQKDDGFDNLYYVTREDKDLHRKIHRIIQQDCQKPNHMEKGCHFLHILACARLSIRPGLSEAVLQQVLELLEDQSDIVSTMEHYYTAF

SEQ ID NO: 7491 - protein, 368 aa, Homo sapiens; identical to SEQ ID NO: 7490

SEQ ID NO: 7492 - protein, 345 aa, Homo sapiens
MGVCGYLFLPWKCLVVVSLRLLFLVPTGVPVRSGDATFPKAMDNVTVRQGESATLRCTIDDRVTRVAWLNRSTILYAGNDKWSIDPRVIILVNTPTQYSIMIQNVDVYDEGPYTCSVQTDNHPKTSRVHLIVQVPPQIMNISSDITVNEGSSVTLLCLAIGRPEPTVTWRHLSVKEGQGFVSEDEYLEISDIKRDQSGEYECSALNDVAAPDVRKVKITVNYPPYISKAKNTGVSVGQKGILSCEASAVPMAEFQWFKEETRLATGLDGMRIENKGRMSTLTFFNVSEKDYGNYTCVATNKLGNTNASITLYGPGAVIDGVNSASRALACLWLSGTLLAHFFIKF

SEQ ID NO: 7493 - protein, 312 aa, Homo sapiens
MYHPAYWVVFSATTALLFIPGVPVRSGDATFPKAMDNVTVRQGESATLRCTIDDRVTRVAWLNRSTIMIQNVDVYDEGPYTCSVQTDNHPKTSRVHLIVQVPPQIMNISSDITVNEGSSVTLLCLAIGRPEPTVTWRHLSVKEGQGFVSEDEYLEISDIKRDQSGEYECSALNDVAAPDVRKVKITVNYPPYISKAKNTGVSVGQKGILSCEASAVPMAEFQWFKEETRLATGLDGMRIENKGRMSTLTFFNVSEKDYGNYTCVATNKLGNTNASITLYGPGAVIDGVNSASRALACLWLSGTLLAHFFIKF

SEQ ID NO: 7494 - protein, 338 aa, Homo sapiens
MYHPAYWVVFSATTALLFIPGVPVRSGDATFPKAMDNVTVRQGESATLRCTIDDRVTRVAWLNRSTILYAGNDKWSIDPRVIILVNTPTQYSIMIQNVDVYDEGPYTCSVQTDNHPKTSRVHLIVQVPPQIMNISSDITVNEGSSVTLLCLAIGRPEPTVTWRHLSVKEGQGFVSEDEYLEISDIKRDQSGEYECSALNDVAAPDVRKVKITVNYPPYISKAKNTGVSVGQKGILSCEASAVPMAEFQWFKEETRLATGLDGMRIENKGRMSTLTFFNVSEKDYGNYTCVATNKLGNTNASITLYGPGAVIDGVNSASRALACLWLSGTLLAHFFIKF

SEQ ID NO: 7495 - protein, 354 aa, Homo sapiens
MGVCGYLFLPWKCLVVVSLRLLFLVPTGVPVRSGDATFPKAMDNVTVRQGESATLRCTIDDRVTRVAWLNRSTILYAGNDKWSIDPRVIILVNTPTQYSIMIQNVDVYDEGPYTCSVQTDNHPKTSRVHLIVQVPPQIMNISSDITVNEGSSVTLLCLAIGRPEPTVTWRHLSVKEGQGFVSEDEYLEISDIKRDQSGEYECSALNDVAAPDVRKVKITVNYPPYISKAKNTGVSVGQKGILSCEASAVPMAEFQWFKEETRLATGLDGMRIENKGRMSTLTFFNVSEKDYGNYTCVATNKLGNTNASITLYEISPSSAVAGPGAVIDGVNSASRALACLWLSGTLLAHFFIKF

SEQ ID NO: 7496 - protein, 553 aa, Homo sapiens
MSNNGLDIQDKPPAPPMRNTSTMIGAGSKDAGTLNHGSKPLPPNPEEKKKKDRFYRSILPGDKTNKKKEKERPEISLPSDFEHTIHVGFDAVTGEFTGMPEQWARLLQTSNITKSEQKKNPQAVLDVLEFYNSKKTSNSQKYMSFTDKSAEDYNSSNALNVKAVSETPAVPPVSEDEDDDDDDATPPPVIAPRPEHTKSVYTRSVIEPLPVTPTRDVATSPISPTENNTTPPDALTRNTEKQKKKPKMSDEEILEKLRSIVSVGDPKKKYTRFEKIGQGASGTVYTAMDVATGQEVAIKQMNLQQQPKKELIINEILVMRENKNPNIVNYLDSYLVGDELWVVMEYLAGGSLTDVVTETCMDEGQIAAVCRECLQALEFLHSNQVIHRDIKSDNILLGMDGSVKLTDFGFCAQITPEQSKRSTMVGTPYWMAPEVVTRKAYGPKVDIWSLGIMAIEMIEGEPPYLNENPLRALYLIATNGTPELQNPEKLSAIFRDFLNRCLEMDVEKRGSAKELLQVRKLRFQVFSNFSMIAASIPEDCQAPLQPHSTDCCS

SEQ ID NO: 7497 - protein, 545 aa, Homo sapiens
MSNNGLDIQDKPPAPPMRNTSTMIGAGSKDAGTLNHGSKPLPPNPEEKKKKDRFYRSILPGDKTNKKKEKERPEISLPSDFEHTIHVGFDAVTGEFTGMPEQWARLLQTSNITKSEQKKNPQAVLDVLEFYNSKKTSNSQKYMSFTDKSAEDYNSSNALNVKAVSETPAVPPVSEDEDDDDDDATPPPVIAPRPEHTKSVYTRSVIEPLPVTPTRDVATSPISPTENNTTPPDALTRNTEKQKKKPKMSDEEILEKLRSIVSVGDPKKKYTRFEKIGQGASGTVYTAMDVATGQEVAIKQMNLQQQPKKELIINEILVMRENKNPNIVNYLDSYLVGDELWVVMEYLAGGSLTDVVTETCMDEGQIAAVCRECLQALEFLHSNQVIHRDIKSDNILLGMDGSVKLTDFGFCAQITPEQSKRSTMVGTPYWMAPEVVTRKAYGPKVDIWSLGIMAIEMIEGEPPYLNENPLRALYLIATNGTPELQNPEKLSAIFRDFLNRCLEMDVEKRGSAKELLQHQFLKIAKPLSSLTPLIAAAKEATKNNH

SEQ ID NO: 7498 - protein, 99 aa, Homo sapiens
MSNNGLDIQDKPPAPPMRNTSTMIGAGSKDAGTLNHGSKPLPPNPEEKKKKDRFYRSILPGDKTNKKKEKERPEISLPSDFEHTIHVGFDAVTGEFTGM

SEQ ID NO: 7499 - protein, 26 aa, Homo sapiens
MSNNGLDIQDKPPAPPMRNTSTMIGA

SEQ ID NO: 7500 - protein, 89 aa, Homo sapiens
MSNNGLDIQDKPPAPPMRNTSTMIGAGSKDAGTLNHGSKPLPPNPEEKKKKDRFYRSILPGDKTNKKKEKERPEISLPSDFEHTIHVGF

SEQ ID NO: 7501 - protein, 63 aa, Homo sapiens
MSNNGLDIQDKPPAPPMRNTSTMIGAGSKDAGTLNHGSKPLPPNPEEKKKKDRFYRSILPGDK

SEQ ID NO: 7502 - protein, 106 aa, Homo sapiens
MSNNGLDIQDKPPAPPMRNTSTMIGAGSKDAGTLNHGSKPLPPNPEEKKKKDRFYRSILPGDKTNKKKEKERPEISLPSDFEHTIHVGFDAVTGEFTGMPEQWARL

SEQ ID NO: 7503 - protein, 522 aa, Homo sapiens
MSNNGLDIQDKPPAPPMRNTSTMIGAGSKDAGTLNHGSKPLPPNPEEKKKKDRFYRSILPGDKTNKKKEKERPEISLPSDFEHTIHVGFDAVTGEFTGMPEQWARLLQTSNITKSEQKKNPQAVLDVLEFYNSKKTSNSQKYMSFTDKSAEDYNSSNALNVKAVSETPAVPPVSEDEDDDDDDATPPPVIAPRPEHTKSVYTRSVIEPLPVTPTRDVATSPISPTENNTTPPDALTRNTEKQKKKPKMSDEEILEKLRSIVSVGDPKKKYTRFEKIGQGASGTVYTAMDVATGQEVAIKQMNLQQQPKKELIINEILVMRENKNPNIVNYLDSYLVGDELWVVMEYLAGGSLTDVVTETCMDEGQIAAVCRECLQALEFLHSNQVIHRDIKSDNILLGMDGSVKLTDFGFCAQITPEQSKRSTMVGTPYWMAPEVVTRKAYGPKVDIWSLGIMAIEMIEGEPPYLNENPLRALYLIATNGTPELQNPEKLSAIFRDFLNRCLEMDVEKRGSAKELLQHSSRL

SEQ ID NO: 7504 - protein, 438 aa, Homo sapiens
MFGKRKKRVEISAPSNFEHRVHTGFDQHEQKFTGLPRQWQSLIEESARRPKPLVDPACITSIQPGAPKGEPHDVAPNGPSAGGLAIPQSSSSSSRPPTRARGAPSPGVLGPHASEPQLAPPACTPAAPAVPGPPGPRSPQREPQRVSHEQFRAALQLVVDPGDPRSYLDNFIKIGEGSTGIVCIATVRSSGKLVAVKKMDLRKQQRRELLFNEVVIMRDYQHENVVEMYNSYLVGDELWVVMEFLEGGALTDIVTHTRMNEEQIAAVCLAVLQALSVLHAQGVIHRDIKSDSILLTHDGRVKLSDFGFCAQVSKEVPRRKSLVGTPYWMAPELISRLPYGPEVDIWSLGIMVIEMVDGEPPYFNEPPLKAMKMIRDNLPPRLKNLHKVSPSLKGFLDRLLVRDPAQRATAAELLKHPFLAKAGPPASIVPLMRQNRTR

SEQ ID NO: 7505 - protein, 591 aa, Homo sapiens
MFGKRKKRVEISAPSNFEHRVHTGFDQHEQKFTGLPRQWQSLIEESARRPKPLVDPACITSIQPGAPKTIVRGSKGAKDGALTLLLDEFENMSVTRSNSLRRDSPPPPARARQENGMPEEPATTARGGPGKAGSRGRFAGHSEAGGGSGDRRRAGPEKRPKSSREGSGGPQESSRDKRPLSGPDVGTPQPAGLASGAKLAAGRPFNTYPRADTDHPSRGAQGEPHDVAPNGPSAGGLAIPQSSSSSSRPPTRARGAPSPGVLGPHASEPQLAPPACTPAAPAVPGPPGPRSPQREPQRVSHEQFRAALQLVVDPGDPRSYLDNFIKIGEGSTGIVCIATVRSSGKLVAVKKMDLRKQQRRELLFNEVVIMRDYQHENVVEMYNSYLVGDELWVVMEFLEGGALTDIVTHTRMNEEQIAAVCLAVLQALSVLHAQGVIHRDIKSDSILLTHDGRVKLSDFGFCAQVSKEVPRRKSLVGTPYWMAPELISRLPYGPEVDIWSLGIMVIEMVDGEPPYFNEPPLKAMKMIRDNLPPRLKNLHKVSPSLKGFLDRLLVRDPAQRATAAELLKHPFLAKAGPPASIVPLMRQNRTR

SEQ ID NO: 7506 - protein, 395 aa, Homo sapiens [sequence omitted]

SEQ ID NO: 7507 - protein, 591 aa, Homo sapiens; identical to SEQ ID NO: 7505

SEQ ID NO: 7508 - protein, 591 aa, Homo sapiens; identical to SEQ ID NO: 7505

SEQ ID NO: 7509 - protein, 347 aa, Homo sapiens
MTWPLTGHQRGAWPSPSPPPPPPGLPPEPEVPPALECWDPTPQSPRSPQREPQRVSHEQFRAALQLVVDPGDPRSYLDNFIKIGEGSTGIVCIATVRSSGKLVAVKKMDLRKQQRRELLFNEVVIMRDYQHENVVEMYNSYLVGDELWVVMEFLEGGALTDIVTHTRMNEEQIAAVCLAVLQALSVLHAQGVIHRDIKSDSILLTHDGRVKLSDFGFCAQVSKEVPRRKSLVGTPYWMAPELISRLPYGPEVDIWSLGIMVIEMVDGEPPYFNEPPLKAMKMIRDNLPPRLKNLHKVSPSLKGFLDRLLVRDPAQRATAAELLKHPFLAKAGPPASIVPLMRQNRTR

SEQ ID NO: 7510 - protein, 591 aa, Homo sapiens; identical to SEQ ID NO: 7505

SEQ ID NO: 7511 - protein, 438 aa, Homo sapiens; identical to SEQ ID NO: 7504

SEQ ID NO: 7512 - protein, 485 aa, Homo sapiens
MAPTIQTQAQREDGHRSGVVCRVKYCNSLPDIPFDPKFITYPFDQNRFVQYKATSLEKQHKHDLLTEPDLGVTIDLINPDTYRIDPNVLLDPADEKLLEEEIQAPTSSKRSQQHAKVVPWMRKTEYISTEFNRYGISNEKPEVKIGVSVKQQFTEEEIYKDRDSQITAIEKTFEDAQKSISQHYSKPRVTPVEVMPVFPDFKMWINPCAQVIFDSDPAPKDTSGAAALEMMSQAMIRGMMDEEGNQFVAYFLPVEETLKKRKRDQEEEMDYAPDDVYDYKIAREYNWNVKNKASKGYEENYFFIFREGDGVYYNELETRVRLSKRRAKAGVQSGTNALLVVKHRDMNEKELEAQEARKAQLENHEPEEEEEEEMETEEKEAGGSVMLILRTMPTLMMRTEDRPKVAVTMIQTAAAMGVASGAGATAAAPVPSPVAASTRPRRMAVKLQLLIPVKLIVTVTESQGIQGWFRHHYCEQQSTFLVVCL

SEQ ID NO: 7513 - protein, 531 aa, Homo sapiens
MAPTIQTQAQREDGHRPNSHRTLPERSGVVCRVKYCNSLPDIPFDPKFITYPFDQNRFVQYKATSLEKQHKHDLLTEPDLGVTIDLINPDTYRIDPNVLLDPADEKLLEEEIQAPTSSKRSQQHAKVVPWMRKTEYISTEFNRYGISNEKPEVKIGVSVKQQFTEEEIYKDRDSQITAIEKTFEDAQKSISQHYSKPRVTPVEVMPVFPDFKMWINPCAQVIFDSDPAPKDTSGAAALEMMSQAMIRGMMDEEGNQFVAYFLPVEETLKKRKRDQEEEMDYAPDDVYDYKIAREYNWNVKNKASKGYEENYFFIFREGDGVYYNELETRVRLSKRRAKAGVQSGTNALLVVKHRDMNEKELEAQEARKAQLENHEPEEEEEEEMETEEKEAGGSDEEQEKGSSSEKEGSEDEHSGSESEREEGDRDEASDKSGSGEDESSEDEARAARDKEEIFGSDADSEDDADSDDEDRGQAQGGSDNDSDSGSNGGGQRSRSHSRSASPFPSGSEHSAQEDGSEAAASDSSEADSDSD

SEQ ID NO: 7514 - protein, 462 aa, Homo sapiens
MAPTIQTQAQREDGHRSGVVCRVKYCNSLPDIPFDPKFITYPFDQNRFVQYKATSLEKQHKHDLLTEPDLGVTIDLINPDTYRIDPNVLLDPADEKLLEEEIQAPTSSKRSQQHAKVVPWMRKTEYISTEFNRYGISNEKPEVKIGVSVKQQFTEEEIYKDRDSQITAIEKTFEDAQKSMWINPCAQVIFDSDPAPKDTSGAAALEMMSQAMIRGMMDEEGNQFVAYFLPVEETLKKRKRDQEEEMDYAPDDVYDYKIAREYNWNVKNKASKGYEENYFFIFREGDGVYYNELETRVRLSKRRAKAGVQSGTNALLVVKHRDMNEKELEAQEARKAQLENHEPEEEEEEEMETEEKEAGGSVMLILRTMPTLMMRTEDRPKVAVTMIQTAAAMGVASGAGATAAAPVPSPVAASTRPRRMAVKLQLLIPVKLIVTVTESQGIQGWFRHHYCEQQSTFLVVCL

SEQ ID NO: 7515 - protein, 288 aa, Homo sapiens
MATGPIPTGLCLRGLEWSAESSTAIASLISPSTPSSSPTPSTRTVLLDPADEKLLEEEIQAPTSSKRSQQHAKVVPWMRKTEYISTEFNRYGISNEKPEVKIGVSVKQQFTEEEIYKDRDSQITAIEKTFEDAQKSISQHYSKPRVTPVEVMPVFPDFKMWINPCAQVIFDSDPAPKDTSGAAALEMMSQAMIRGMMDEEGNQFVAYFLPVEETLKKRKRDQEEEMDYAPDDVYDYKIAREYNWNVKNKASKGYEENYFFIFREGDGVYYNELETSIQYSHMLYNLVA

SEQ ID NO: 7516 - protein, 391 aa, Homo sapiens
MDLEKNYPTPRTSRTGHGGVNQLGGVFVNGRPLPDVVRQRIVELAHQGVRPCDISRQLRVSHGCVSKILGRYYETGSIKPGVIGGSKPKVATPKVVEKIAEYKRQNPTMFAWEIRDRLLAERVCDNDTVPSVSSINRIIRTKVQQPPNQPVPASSHSIVSTGSVTQVSSVSTDSAGSSYSISGILGITSPSADTNKRKRDEGIQESPVPNGHSLPGRDFLRKQMRGDLFTQQQLEVLDRVFERQHYSDIFTTTEPIKPEQTTEYSAMASLAGGLDDMKANLASPTPADIGSSVPGPQSYPIVTGRDLASTTLPGYPPHVPPAGQGSYSAPTLTGMVPGSEFSGSPYSHPQYSSYNDSWRFPNPGLLGSPYYYSAAARGAAPPAAATAYDRH

SEQ ID NO: 7517 - protein, 288 aa, Homo sapiens
MDLEKNYPTPRTSRTGHGGVNQLGGVFVNGRPLPDVVRQRIVELAHQGVRPCDISRQLRVSHGCVSKILGRYYETGSIKPGVIGGSKPKVATPKVVEKIAEYKRQNPTMFAWEIRDRLLAERVCDNDTVPSVSSINRIIRTKVQQPPNQPVPASSHSIVSTGSVTQVSSVSTDSAGSSYSISGILGITSPSADTNKRKRDEGIQESPVPNGHSLPGRDFLRKQMRGDLFTQQQLEVLDRVFERQHYSDIFTTTEPIKPEQAVTWRARPSPGTLHTSPPLDRAATQHRR

SEQ ID NO: 7518 - protein, 328 aa, Homo sapiens
MDLEKNYPTPRTSRTGHGGVNQLGGVFVNGRPLPDVVRQRIVELAHQGVRPCDISRQLRVSHGCVSKILGRYYETGSIKPGVIGGSKPKVATPKVVEKIAEYKRQNPTMFAWEIRDRLLAERVCDNDTVPSVSSINRIIRTKVQQPPNQPVPASSHSIVSTGSVTQVSSVSTDSAGSSYSISGILGITSPSADTNKRKRDEGIQESPVPNGHSLPGRDFLRKQMRGDLFTQQQLEVLDRVFERQHYSDIFTTTEPIKPEQTTEYSAMASLAGGLDDMKANLASPTPADIGSSVPGPQSYPIVTGSPYYYSAAARGAAPPAAATAYDRH

SEQ ID NO: 7519 - protein, 302 aa, Homo sapiens
MFAWEIRDRLLAERVCDNDTVPSVSSINRIIRTKVQQPPNQPVPASSHSIVSTGSVTQVSSVSTDSAGSSYSISGILGITSPSADTNKRKRDEGIQESPVPNGHSLPGRDFLRKQMRGDLFTQQQLEVLDRVFERQHYSDIFTTTEPIKPEQWCPVLMRQYLVQPQAVLFQTTEYSAMASLAGGLDDMKANLASPTPADIGSSVPGPQSYPIVTGRDLASTTLPGYPPHVPPAGQGSYSAPTLTGMVPGSEFSGSPYSHPQYSSYNDSWRFPNPGLLGSPYYYSAAARGAAPPAAATAYDRH

SEQ ID NO: 7520 - protein, 357 aa, Homo sapiens
MDLEKNYPTPRTSRTGHGGVNQLGGVFVNGRPLPDVVRQRIVELAHQGVRPCDISRQLRVSHGCVSKILGRYYETGSIKPGVIGGSKPKVATPKVVEKIAEYKRQNPTMFAWEIRDRLLAERVCDNDTVPSVSSINRIIRTKVQQPPNQPVPASSHSIVSTGSVTQVSSVSTDSAGSSYSISGILGITSPSADTNKRKRDEGIQESPVPNGHSLPGRDFLRKQMRGDLFTQQQLEVLDRVFERQHYSDIFTTTEPIKPEQTTEYSAMASLAGGLDDMKANLASPTPADIGSSVPGPQSYPIVTGSEFSGSPYSHPQYSSYNDSWRFPNPGLLGSPYYYSAAARGAAPPAAATAYDRH

SEQ ID NO: 7521 - protein, 362 aa, Homo sapiens
MDLEKNYPTPRTSRTGHGGVNQLGGVFVNGRPLPDVVRQRIVELAHQGVRPCDISRQLRVSHGCVSKILGRYYETGSIKPGVIGGSKPKVATPKVVEKIAEYKRQNPTMFAWEIRDRLLAERVCDNDTVPSVSSINRIIRTKVQQPPNQPVPASSHSIVSTGSVTQVSSVSTDSAGSSYSISGILGITSPSADTNKRKRDEGIQESPVPNGHSLPGRDFLRKQMRGDLFTQQQLEVLDRVFERQHYSDIFTTTEPIKPEQTTEYSAMASLAGGLDDMKANLASPTPADIGSSVPGPQSYPIVTGRDLASTTLPGYPPHVPPAGQGSYSAPTLTGMVPGSPYYYSAAARGAAPPAAATAYDRH

SEQ ID NO: 7522 - protein, 348 aa, Homo sapiens
MDLEKNYPTPRTSRTGHGGVNQLGGVFVNGRPLPDVVRQRIVELAHQGVRPCDISRQLRVSHGCVSKILGRYYETGSIKPGVIGGSKPKVATPKVVEKIAEYKRQNPTMFAWEIRDRLLAERVCDNDTVPSVSSINRIIRTKVQQPPNQPVPASSHSIGIQESPVPNGHSLPGRDFLRKQMRGDLFTQQQLEVLDRVFERQHYSDIFTTTEPIKPEQTTEYSAMASLAGGLDDMKANLASPTPADIGSSVPGPQSYPIVTGRDLASTTLPGYPPHVPPAGQGSYSAPTLTGMVPGSEFSGSPYSHPQYSSYNDSWRFPNPGLLGSPYYYSAAARGAAPPAAATAYDRH

SEQ ID NO: 7523 - protein, 291 aa, Homo sapiens
MDLEKNYPTPRTSRTGHGGVNQLGGVFVNGRPLPDVVRQRIVELAHQGVRPCDISRQLRVSHGCVSKILGRIIRTKVQQPPNQPVPASSHSIVSTGSVTQVSSVSTDSAGSSYSISGILGITSPSADTNKRKRDEGIQESPVPNGHSLPGRDFLRKQMRGDLFTQQQLEVLDRVFERQHYSDIFTTTEPIKPEQTTEYSAMASLAGGLDDMKANLASPTPADIGSSVPGPQSYPIVTGSEFSGSPYSHPQYSSYNDSWRFPNPGLLGSPYYYSAAARGAAPPAAATAYDRH

SEQ ID NO: 7524 - protein, 319 aa, Homo sapiens
MDLEKNYPTPRTSRTGHGGVNQLGGVFVNGRPLPDVVRQRIVELAHQGVRPCDISRQLRVSHGCVSKILGRYYETGSIKPGVIGGSKPKVATPKVVEKIAEYKRQNPTMFAWEIRDRLLAERVCDNDTVPSVSSINRIIRTKVQQPPNQPVPASSHSIGIQESPVPNGHSLPGRDFLRKQMRGDLFTQQQLEVLDRVFERQHYSDIFTTTEPIKPEQTTEYSAMASLAGGLDDMKANLASPTPADIGSSVPGPQSYPIVTGRDLASTTLPGYPPHVPPAGQGSYSAPTLTGMVPGSPYYYSAAARGAAPPAAATAYDRH

SEQ ID NO: 7525 - protein, 283 aa, Homo sapiens
MFAWEIRDRLLAERVCDNDTVPSVSSINRIIRTKVQQPPNQPVPASSHSIVSTGSVTQVSSVSTDSAGSSYSISGILGITSPSADTNKRKRDEGIQESPVPNGHSLPGRDFLRKQMRGDLFTQQQLEVLDRVFERQHYSDIFTTTEPIKPEQTTEYSAMASLAGGLDDMKANLASPTPADIGSSVPGPQSYPIVTGRDLASTTLPGYPPHVPPAGQGSYSAPTLTGMVPGSEFSGSPYSHPQYSSYNDSWRFPNPGLLGSPYYYSAAARGAAPPAAATAYDRH

SEQ ID NO: 7526 - protein, 307 aa, Homo sapiens
MDLEKNYPTPRTSRTGHGGVNQLGGVFVNGRPLPDVVRQRIVELAHQGVRPCDISRQLRVSHGCVSKILGRYYETGSIKPGVIGGSKPKVATPKVVEKIAEYKRQNPTMFAWEIRDRLLAERVCDNDTVPSVSSINRIIRTKVQQPPNQPVPASSHSIVSTGSVTQVSSVSTDSAGSSYSISGILGITSPSADTNKRKRDEGIQESPVPNGHSLPGRDFLRKQMRGDLFTQQQLEVLDRVFERQHYSDIFTTTEPIKPEQWCPVLMRQYLVQPQAVLFQAVTWRARPSPGTLHTSPPLDRAATQHRR

SEQ ID NO: 7527 - protein, 398 aa, Homo sapiens
MPHNSIRSGHGGLNQLGGAFVNGRPLPEVVRQRIVDLAHQGVRPCDISRQLRVSHGCVSKILGRYYETGSIRPGVIGGSKPKVATPKVVEKIGDYKRQNPTMFAWEIRDRLLAEGVCDNDTVPSVSSINRIIRTKVQQPFNLPMDSCVATKSLSPGHTLIPSSAVTPPESPQSDSLGSTYSINGLLGIAQPGSDKRKMDDSDQDSCRLSIDSQSSSSGPRKHLRTDAFSQHHLEPLECPFERQHYPEAYASPSHTKGEQGLYPLPLLNSTLDDGKATLTPSNTPLGRNLSTHQTYPVVAAPPFWICSKSAPGSRPSMPFPMLPPCTGSSRARPSSQGERWWGPRCPDTHPTSPPADRAAMPPLPSQAWWQEVNTLAMPMATPPTPPTARPGASPTPAC

SEQ ID NO: 7528 - protein, 321 aa, Homo sapiens
MPHNSIRSGHGGLNQLGGAFVNGRPLPEVVRQRIVDLAHQGVRPCDISRQLRVSHGCVSKILGRYYETGSIRPGVIGGSKPKVATPKVVEKIGDYKRQNPTMFAWEIRDRLLAEGVCDNDTVPSVSSINRIIRTKVQQPFNLPMDSCVATKSLSPGHTLIPSSAVTPPESPQSDSLGSTYSINGLLGIAQPGSDKRKMDDSDQDSCRLSIDSQSSSSGPRKHLRTDAFSQHHLEPLECPFERQHYPEAYASPSHTKGEQGERWWGPRCPDTHPTSPPADRAAMPPLPSQAWWQEVNTLAMPMATPPTPPTARPGASPTPAC

SEQ ID NO: 7529 - protein, 398 aa, Homo sapiens; identical to SEQ ID NO: 7527

SEQ ID NO: 7530 - protein, 287 aa, Homo sapiens
MPHNSIRSGHGGLNQLGGAFVNGRPLPEVVRQRIVDLAHQGVRPCDISRQLRVSHGCVSKILGRYYETGSIRPGVIGGSKPKVATPKVVEKIGDYKRQNPTMFAWEIRDRLLAEGVCDNDTVPSVSSINRIIRTKVQQPFNLPMDSCVATKSLSPGHTLIPSSAVTPPESPQSDSLGSTYSINGLLGIAQPGSDKRKMDDSDQDSCRLSIDSQSSSSGPRKHLRTDAFSQHHLEPLECPFERQHYPEAYASPSHTKGEQEVNTLAMPMATPPTPPTARPGASPTPAC

SEQ ID NO: 7531 - protein, 450 aa, Homo sapiens
MPHNSIRSGHGGLNQLGGAFVNGRPLPEVVRQRIVDLAHQGVRPCDISRQLRVSHGCVSKILGRYYETGSIRPGVIGGSKPKVATPKVVEKIGDYKRQNPTMFAWEIRDRLLAEGVCDNDTVPSVSSINRIIRTKVQQPFNLPMDSCVATKSLSPGHTLIPSSAVTPPESPQSDSLGSTYSINGLLGIAQPGSDKRKMDDSDQDSCRLSIDSQSSSSGPRKHLRTDAFSQHHLEPLECPFERQHYPEAYASPSHTKGEQGLYPLPLLNSTLDDGKATLTPSNTPLGRNLSTHQTYPVVADPHSPFAIKQETPEVSSSSSTPSSLSSSAFLDLQQVGSGVPPFNAFPHAASVYGQFTGQALLSGREMVGPTLPGYPPHIPTSGQGSYASSAIAGMVAGSEYSGNAYGHTPYSSYSEAWRFPNSSLLSSPYYYSSTSRPSAPPTTATAFDHL

SEQ ID NO: 7532 - protein, 189 aa, Homo sapiens
MASKRALVILAKGAEEMETVIPVDVMRRAGIKVTVAGLAGKDPVQCSRDVVICPDASLEDAKKEGPYDVVVLPGGNLGAQNLSESAAVKEILKEQENRKGLIAAICAGPTALLAHEIGFGSKVTTHPLAKDKMMNGGHYTYSENRVEKDGLILTSRGPGTSFEFALAIVEALNGKEVAAQVKAPLVLKD

SEQ ID NO: 7533 - protein, 189 aa, Homo sapiens; identical to SEQ ID NO: 7532

SEQ ID NO: 7534 - protein, 189 aa, Homo sapiens; identical to SEQ ID NO: 7532

SEQ ID NO: 7535 - protein, 189 aa, Homo sapiens; identical to SEQ ID NO: 7532

SEQ ID NO: 7536 - protein, 1186 aa, Homo sapiens [sequence omitted]

SEQ ID NO: 7537 - protein, 1447 aa, Homo sapiens
MASAGNAAEPQDRGGGGSGCIGAPGRPAGGGRRRRTGGLRRAAAPDRDYLHRPSYCDAAFALEQISKGKATGRKAPLWLRAKFQRLLFKLGCYIQKNCGKFLVVGLLIFGAFAVGLKAANLETNVEELWVEVGGRVSRELNYTRQKIGEEAMFNPQLMIQTPKEEGANVLTTEALLQHLDSALQASRVHVYMYNRQWKLEHLCYKSGELITETGYMDQIIEYLYPCLIITPLDCFWEGAKLQSGTAYLLGKPPLRWTNFDPLEFLEELKKINYQVDSWEEMLNKAEVGHGYMDRPCLNPADPDCPATAPNKNSTKPLDMALVLNGGCHGLSRKYMHWQEELIVGGTVKNSTGKLVSAHALQTMFQLMTPKQMYEHFKGYEYVSHINWNEDKAAAILEAWQRTYVEVVHQSVAQNSTQKVLSFTTTTLDDILKSFSDVSVIRVASGYLLMLAYACLTMLRWDCSKSQGAVGLAGVLLVALSVAAGLGLCSLIGISFNAATTQVLPFLALGVGVDDVFLLAHAFSETGQNKRIPFEDRTGECLKRTGASVALTSISNVTAFFMAALIPIPALRAFSLQAAVVVVFNFAMVLLIFPAILSMDLYRREDRRLDIFCCFTSPCVSRVIQVEPQAYTDTHDNTRYSPPPPYSSHSFAHETQITMQSTVQLRTEYDPHTHVYYTTAEPRSEISVQPVTVTQDTLSCQSPESTSSTRDLLSQFSDSSLHCLEPPCTKWTLSSFAEKHYAPFLLKPKAKVVVIFLFLGLLGVSLYGTTRVRDGLDLTDIVPRETREYDFIAAQFKYFSFYNMYIVTQKADYPNIQHLLYDLHRSFSNVKYVMLEENKQLPKMWLHYFRDWLQGLQDAFDSDWETGKIMPNNYKNGSDDGVLAYKLLVQTGSRDKPIDISQLTKQRLVDADGIINPSAFYIYLTAWVSNDPVAYAASQANIRPHRPEWVHDKADYMPETRLRIPAAEPIEYAQFPFYLNGLRDTSDFVEAIEKVRTICSNYTSLGLSSYPNGYPFLFWEQYIGLRHWLLLFISVVLACTFLVCAVFLLNPWTAGIIVMVLALMTVELFGMMGLIGIKLSAVPVVILIASVGIGVEFTVHVALAFLTAIGDKNRRAVLALEHMFAPVLDGAVSTLLGVLMLAGSEFDFIVRYFFAVLAILTILGVLNGLVLLPVLLSFFGPYPEVSPANGLNRLPTPSPEPPPSVVRFAMPPGHTHSGSDSSDSEYSSQTTVSGLSEELRHYEAQQGAGGPAHQVIVEATENPVFAHSTVVHPESRHHPPSNPRQQPHLDSGSLPPGRQGQQPRRDPPREGLWPPPYRPRRDAFEISTEGHSGPSNRARWGPRGARSHNPRNPASTAMGSSVPGYCQPITTVTASASVTVAVHPPPVPGPGRNPRGGLCPGYPETDHGLFEDPHVPFHVRCERRDSKVEVIELQDVECEERPRGSSSN

SEQ ID NO: 7538 - protein, 352 aa, Homo sapiens
KAEVGHGYMDRPCLNPADPDCPATAPNKNSTKPLDMALVLNGGCHGLSRKYMHWQEELIVGGTVKNSTGKLVSAHALQTMFQLMTPKQMYEHFKGYEYVSHINWNEDKAAAILEAWQRTYVEVVHQSVAQNSTQKVLSFTTTTLDDILKSFSDVSVIRVASGYLLMVLPFLALGVGVDDVFLLAHAFSETGQNKRIPFEDRTGECLKRTGASVALTSISNVTAFFMAALIPIPALRAFSLQAAVVVVFNFAMVLLIFPAILSMDLYRREDRRLDIFCCFTSPCVSRVIQVEPQAYTDTHDNTRYSPPPPYSSHSFAHETQITMQSTVQLRTEYDPHTHVYYTTAEPRSEISV

SEQ ID NO: 7539 - protein, 1446 aa, Homo sapiens
MELLNRNRLVIVSPRCTPPKASGGPARRGFYTFRSFCKDGGGGEEEEENGGEEKDDRGDKETRSDKGKATGRKAPLWLRAKFQRLLFKLGCYIQKNCGKFLVVGLLIFGAFAVGLKAANLETNVEELWVEVGGRVSRELNYTRQKIGEEAMFNPQLMIQTPKEEGANVLTTEALLQHLDSALQASRVHVYMYNRQWKLEHLCYKSGELITETGYMDQIIEYLYPCLIITPLDCFWEGAKLQSGTAYLLGKPPLRWTNFDPLEFLEELKKINYQVDSWEEMLNKAEVGHGYMDRPCLNPADPDCPATAPNKNSTKPLDMALVLNGGCHGLSRKYMHWQEELIVGGTVKNSTGKLVSAHALQTMFQLMTPKQMYEHFKGYEYVSHINWNEDKAAAILEAWQRTYVEVVHQSVAQNSTQKVLSFTTTTLDDILKSFSDVSVIRVASGYLLMLAYACLTMLRWDCSKSQGAVGLAGVLLVALSVAAGLGLCSLIGISFNAATTQVLPFLALGVGVDDVFLLAHAFSETGQNKRIPFEDRTGECLKRTGASVALTSISNVTAFFMAALIPIPALRAFSLQAAVVVVFNFAMVLLIFPAILSMDLYRREDRRLDIFCCFTSPCVSRVIQVEPQAYTDTHDNTRYSPPPPYSSHSFAHETQITMQSTVQLRTEYDPHTHVYYTTAEPRSEISVQPVTVTQDTLSCQSPESTSSTRDLLSQFSDSSLHCLEPPCTKWTLSSFAEKHYAPFLLKPKAKVVVIFLFLGLLGVSLYGTTRVRDGLDLTDIVPRETREYDFIAAQFKYFSFYNMYIVTQKADYPNIQHLLYDLHRSFSNVKYVMLEENKQLPKMWLHYFRDWLQGLQDAFDSDWETGKIMPNNYKNGSDDGVLAYKLLVQTGSRDKPIDISQLTKQRLVDADGIINPSAFYIYLTAWVSNDPVAYAASQANIRPHRPEWVHDKADYMPETRLRIPAAEPIEYAQFPFYLNGLRDTSDFVEAIEKVRTICSNYTSLGLSSYPNGYPFLFWEQYIGLRHWLLLFISVVLACTFLVCAVFLLNPWTAGIIVMVLALMTVELFGMMGLIGIKLSAVPVVILIASVGIGVEFTVHVALAFLTAIGDKNRRAVLALEHMFAPVLDGAVSTLLGVLMLAGSEFDFIVRYFFAVLAILTILGVLNGLVLLPVLLSFFGPYPEVSPANGLNRLPTPSPEPPPSVVRFAMPPGHTHSGSDSSDSEYSSQTTVSGLSEELRHYEAQQGAGGPAHQVIVEATENPVFAHSTVVHPESRHHPPSNPRQQPHLDSGSLPPGRQGQQPRRDPPREGLWPPPYRPRRDAFEISTEGHSGPSNRARWGPRGARSHNPRNPASTAMGSSVPGYCQPITTVTASASVTVAVHPPPVPGPGRNPRGGLCPGYPETDHGLFEDPHVPFHVRCERRDSKVEVIELQDVECEERPRGSSSN

SEQ ID NO: 7540 - protein, 585 aa, Homo sapiens
PCRKSSALNSPKAAVVVVFNFAMVLLIFPAILSMDLYRREDRRLDIFCCFTSPCVSRVIQVEPQAYTDTHDNTRYSPPPPYSSHSFAHETQITMQSTVQLRTEYDPHTHVYYTTAEPRSEISVQPVTVTQDTLSCQSPESTSSTRDLLSQFSDSSLHCLEPPCTKWTLSSFAEKHYAPFLLKPKAKVVVIFLFLGLLGVSLYGTTRVRDGLDLTDIVPRETREYDFIAAQFKYFSFYNMYIVTQKADYPNIQHLLYDLHRSFSNVKYVMLEENKQLPKMWLHYFRDWLQGLQDAFDSDWETGKIMPNNYKNGSDDGVLAYKLLVQTGSRDKPIDISQLTKQRLVDADGIINPSAFYIYLTAWVSNDPVAYAASQANIRPHRPEWVHDKADYMPETRLRIPAAEPIEYAQFPFYLNGLRDTSDFVEAIEKVRTICSNYTSLGLSSYPNGYPFLFWEQYIGLRHWLLLFISVVLACTFLVCAVFLLNPWTAGIIVMVLALMTVELFGMMGLIGIKLSAVPVVILIASVGIGVEFTVHVALAFLTAIGDKNRRAVLALEHMFAPVLDGAVSTLLGVLMLAGSEFDFIV

SEQ ID NO: 7541 - protein, 242 aa, Homo sapiens
MPPGHTHSGSDSSDSEYSSQTTVSGLSEELRHYEAQQGAGGPAHQVIVEATENPVFAHSTVVHPESRHHPPSNPRQQPHLDSGSLPPGRQGQQPRRDPPREGLWPPPYRPRRDAFEISTEGHSGPSNRARWGPRGARSHNPRNPASTAMGSSVPGYCQPITTVTASASVTVAVHPPPVPGPGRNPRGGLCPGYPETDHGLFEDPTCLSTSGVRGGIRRWKSLSCRTWNARRGPGEAAPTEGD

SEQ ID NO: 7542 - protein, 486 aa, Homo sapiens
GKATGRKAPLWLRAKFQRLLFKLGCYIQKNCGKFLVVGLLIFGAFAVGLKAANLETNVEELWVEVGGRVSRELNYTRQKIGEEAMFNPQLMIQTPKEEGANVLTTEALLQHLDSALQASRVHVYMYNRGKPPLRWTNFDPLEFLEELKKINYQVDSWEEMLNKAEVGHGYMDRPCLNPADPDCPATAPNKNSTKPLDMALVLNGGCHGLSRKYMHWQEELIVGGTVKNSTGKLVSAHALQTMFQLMTPKQMYEHFKGYEYVSHINWNEDKAAAILEAWQRTYVEVVHQSVAQNSTQKVLSFTTTTLDDILKSFSDVSVIRVASGYLLMLAYACLTMLRWDCSKSQGAVGLAGVLLVALSVAAGLGLCSLIGISFNAATTQVLPFLALGVGVDDVFLLAHAFSETGQNKRIPFEDRTGECLKRTGASVALTSISNVTAFFMAALIPIPALRAFSLQYILMAHRGRLSFNDTLWCGGLKSYMRFPYEE

SEQ ID NO: 7543 - protein, 1296 aa, Homo sapiens
MFNPQLMIQTPKEEGANVLTTEALLQHLDSALQASRVHVYMYNRQWKLEHLCYKSGELITETGYMDQIIEYLYPCLIITPLDCFWEGAKLQSGTAYLLGKPPLRWTNFDPLEFLEELKKINYQVDSWEEMLNKAEVGHGYMDRPCLNPADPDCPATAPNKNSTKPLDMALVLNGGCHGLSRKYMHWQEELIVGGTVKNSTGKLVSAHALQTMFQLMTPKQMYEHFKGYEYVSHINWNEDKAAAILEAWQRTYVEVVHQSVAQNSTQKVLSFTTTTLDDILKSFSDVSVIRVASGYLLMLAYACLTMLRWDCSKSQGAVGLAGVLLVALSVAAGLGLCSLIGISFNAATTQVLPFLALGVGVDDVFLLAHAFSETGQNKRIPFEDRTGECLKRTGASVALTSISNVTAFFMAALIPIPALRAFSLQAAVVVVFNFAMVLLIFPAILSMDLYRREDRRLDIFCCFTSPCVSRVIQVEPQAYTDTHDNTRYSPPPPYSSHSFAHETQITMQSTVQLRTEYDPHTHVYYTTAEPRSEISVQPVTVTQDTLSCQSPESTSSTRDLLSQFSDSSLHCLEPPCTKWTLSSFAEKHYAPFLLKPKAKVVVIFLFLGLLGVSLYGTTRVRDGLDLTDIVPRETREYDFIAAQFKYFSFYNMYIVTQKADYPNIQHLLYDLHRSFSNVKYVMLEENKQLPKMWLHYFRDWLQGLQDAFDSDWETGKIMPNNYKNGSDDGVLAYKLLVQTGSRDKPIDISQLTKQRLVDADGIINPSAFYIYLTAWVSNDPVAYAASQANIRPHRPEWVHDKADYMPETRLRIPAAEPIEYAQFPFYLNGLRDTSDFVEAIEKVRTICSNYTSLGLSSYPNGYPFLFWEQYIGLRHWLLLFISVVLACTFLVCAVFLLNPWTAGIIVMVLALMTVELFGMMGLIGIKLSAVPVVILIASVGIGVEFTVHVALAFLTAIGDKNRRAVLALEHMFAPVLDGAVSTLLGVLMLAGSEFDFIVRYFFAVLAILTILGVLNGLVLLPVLLSFFGPYPEVSPANGLNRLPTPSPEPPPSVVRFAMPPGHTHSGSDSSDSEYSSQTTVSGLSEELRHYEAQQGAGGPAHQVIVEATENPVFAHSTVVHPESRHHPPSNPRQQPHLDSGSLPPGRQGQQPRRDPPREGLWPPPYRPRRDAFEISTEGHSGPSNRARWGPRGARSHNPRNPASTAMGSSVPGYCQPITTVTASASVTVAVHPPPVPGPGRNPRGGLCPGYPETDHGLFEDPHVPFHVRCERRDSKVEVIELQDVECEERPRGSSSN

SEQ ID NO: 7544 - protein, 1296 aa, Homo sapiens; identical to SEQ ID NO: 7543

SEQ ID NO: 7545 - protein, 1296 aa, Homo sapiens; identical to SEQ ID NO: 7543

SEQ ID NO: 7546 - protein, 1381 aa, Homo sapiens
MGKATGRKAPLWLRAKFQRLLFKLGCYIQKNCGKFLVVGLLIFGAFAVGLKAANLETNVEELWVEVGGRVSRELNYTRQKIGEEAMFNPQLMIQTPKEEGANVLTTEALLQHLDSALQASRVHVYMYNRQWKLEHLCYKSGELITETGYMDQIIEYLYPCLIITPLDCFWEGAKLQSGTAYLLGKPPLRWTNFDPLEFLEELKKINYQVDSWEEMLNKAEVGHGYMDRPCLNPADPDCPATAPNKNSTKPLDMALVLNGGCHGLSRKYMHWQEELIVGGTVKNSTGKLVSAHALQTMFQLMTPKQMYEHFKGYEYVSHINWNEDKAAAILEAWQRTYVEVVHQSVAQNSTQKVLSFTTTTLDDILKSFSDVSVIRVASGYLLMLAYACLTMLRWDCSKSQGAVGLAGVLLVALSVAAGLGLCSLIGISFNAATTQVLPFLALGVGVDDVFLLAHAFSETGQNKRIPFEDRTGECLKRTGASVALTSISNVTAFFMAALIPIPALRAFSLQAAVVVVFNFAMVLLIFPAILSMDLYRREDRRLDIFCCFTSPCVSRVIQVEPQAYTDTHDNTRYSPPPPYSSHSFAHETQITMQSTVQLRTEYDPHTHVYYTTAEPRSEISVQPVTVTQDTLSCQSPESTSSTRDLLSQFSDSSLHCLEPPCTKWTLSSFAEKHYAPFLLKPKAKVVVIFLFLGLLGVSLYGTTRVRDGLDLTDIVPRETREYDFIAAQFKYFSFYNMYIVTQKADYPNIQHLLYDLHRSFSNVKYVMLEENKQLPKMWLHYFRDWLQGLQDAFDSDWETGKIMPNNYKNGSDDGVLAYKLLVQTGSRDKPIDISQLTKQRLVDADGIINPSAFYIYLTAWVSNDPVAYAASQANIRPHRPEWVHDKADYMPETRLRIPAAEPIEYAQFPFYLNGLRDTSDFVEAIEKVRTICSNYTSLGLSSYPNGYPFLFWEQYIGLRHWLLLFISVVLACTFLVCAVFLLNPWTAGIIVMVLALMTVELFGMMGLIGIKLSAVPVVILIASVGIGVEFTVHVALAFLTAIGDKNRRAVLALEHMFAPVLDGAVSTLLGVLMLAGSEFDFIVRYFFAVLAILTILGVLNGLVLLPVLLSFFGPYPEVSPANGLNRLPTPSPEPPPSVVRFAMPPGHTHSGSDSSDSEYSSQTTVSGLSEELRHYEAQQGAGGPAHQVIVEATENPVFAHSTVVHPESRHHPPSNPRQQPHLDSGSLPPGRQGQQPRRDPPREGLWPPPYRPRRDAFEISTEGHSGPSNRARWGPRGARSHNPRNPASTAMGSSVPGYCQPITTVTASASVTVAVHPPPVPGPGRNPRGGLCPGYPETDHGLFEDPHVPFHVRCERRDSKVEVIELQDVECEERPRGSSSN

SEQ ID NO: 7547 - protein, 1381 aa, Homo sapiens; identical to SEQ ID NO: 7546

SEQ ID NO: 7548 - protein, 84 aa, Homo sapiens
MGKATGRKAPLWLRAKFQRLLFKLGCYIQKNCGKFLVVGLLIFGAFAVGLKAANLETNVEELWVEEVNLLCGGQTSTLWNSWKS

SEQ ID NO: 7549 - protein, 174 aa, Homo sapiens
MFNPQLMIQTPKEEGANVLTTEALLQHLDSALQASRVHVYMYNRQWKLEHLCYKSGELITETGYMDQIIEYLYPCLIITPLDCFWEGAKLQSGTAYLLGKPPLRWTNFDPLEFLEELKKINYQVDSWEEMLNKAEVGHGYMDRPCLNPADPDCPATAPNKNSTKPLDMALVLNG

SEQ ID NO: 7550 - protein, 174 aa, Homo sapiens; identical to SEQ ID NO: 7549

SEQ ID NO: 7551 - protein, 92 aa, Homo sapiens
MFNPQLMIQTPKEEGANVLTTEALLQHLDSALQASRVHVYMYNRQWKLEHLCYKSGELITETGYMDQIIEYLYPCLIITPLDCFWEGAKLQS

SEQ ID NO: 7552 - protein, 174 aa, Homo sapiens; identical to SEQ ID NO: 7549

SEQ ID NO: 7553 - protein, 174 aa, Homo sapiens; identical to SEQ ID NO: 7549

SEQ ID NO: 7554 - protein, 591 aa, Homo sapiens
MDDLDALLADLESTTSHISKRPVFLSEETPYSYPTGNHTYQEIAVPPPVPPPPSSEALNGTILDPLDQWQPSSSRFIHQQPQSSSPVYGSSAKTSSVSNPQDSVGSPCSRVGEEEHVYSFPNKQKSAEPSPTVMSTSLGSNLSELDRLLLELNAVQHNPPGFPADEANSSPPLPGALSPLYGVPETNSPLGGKAGPLTKEKPKRNGGRGLEDVRPSVESLLDELESSVPSPVPAITVNQGEMSSPQRVTSTQQQTRISASSATRELDELMASLSDFKIQGLEQRADGERCWAAGWPRDGGRSSPGGQDEGGFMAQGKTGSSSPPGGPPKPGSQLDSMLGSLQSDLNKLGVATVAKGVCGACKKPIAGQVVTAMGKTWHPEHFVCTHCQEEIGSRNFFERDGQPYCEKDYHNLFSPRCYYCNGPILDKVVTALDRTWHPEHFFCAQCGAFFGPEGFHEKDGKAYCRKDYFDMFAPKCGGCARAILENYISALNTLWHPECFVCRECFTPFVNGSFFEHDGQPYCEVHYHERRGSLCSGCQKPITGRCITAMAKKFHPEHFVCAFCLKQLNKGTFKEQNDKPYCQNCFLKLFC

SEQ ID NO: 7555 - protein, 605 aa, Homo sapiens
MDDLDALLADLESTTSHISKRPVFLSEETPYSYPTGNHTYQEIAVPPPVPPPPSSEALNGTILDPLDQWQPSSSRFIHQQPQSSSPVYGSSAKTSSVSNPQDSVGSPCSRVGEEEHVYSFPNKQKSAEPSPTVMSTSLGSNLSELDRLLLELNAVQHNPPGFPADEANSSPPLPGALSPLYGVPETNSPLGGKAGPLTKEKPKRNGGRGLEDVRPSVESLLDELESSVPSPVPAITVNQGEMSSPQRVTSTQQQTRISASSATRELDELMASLSDFKGSWPLEEVVLLVSISSSVQEGEKYPHPCAARHRTPSLRSPDQPPPCPQFMAQGKTGSSSPPGGPPKPGSQLDSMLGSLQSDLNKLGVATVAKGVCGACKKPIAGQVVTAMGKTWHPEHFVCTHCQEEIGSRNFFERDGQPYCEKDYHNLFSPRCYYCNGPILDKVVTALDRTWHPEHFFCAQCGAFFGPEGFHEKDGKAYCRKDYFDMFAPKCGGCARAILENYISALNTLWHPECFVCRECFTPFVNGSFFEHDGQPYCEVHYHERRGSLCSGCQKPITGRCITAMAKKFHPEHFVCAFCLKQLNKGTFKEQNDKPYCQNCFLKLFC

SEQ ID NO: 7556 - protein, 233 aa, Homo sapiens [sequence omitted]

SEQ ID NO: 7557 - protein, 403 aa, Homo sapiens
MSAPSSTGPQYCPGLPSRKEATPEGRPETCLLPSSPQAQRPIQGLEQRADGERCWAAGWPRDGGRSSPGGQDEGGGSWPLEEVVLLVSISSSVQEGEKYPHPCAARHRTPSLRSPDQPPPCPQFMAQGKTGSSSPPGGPPKPGSQLDSMLGSLQSDLNKLGVATVAKGVCGACKKPIAGQVVTAMGKTWHPEHFVCTHCQEEIGSRNFFERDGQPYCEKDYHNLFSPRCYYCNGPILDKVVTALDRTWHPEHFFCAQCGAFFGPEGFHEKDGKAYCRKDYFDMFAPKCGGCARAILENYISALNTLWHPECFVCRECFTPFVNGSFFEHDGQPYCEVHYHERRGSLCSGCQKPITGRCITAMAKKFHPEHFVCAFCLKQLNKGTFKEQNDKPYCQNCFLKLFC

SEQ ID NO: 7558 - protein, 557 aa, Homo sapiens
MDDLDALLADLESTTSHISKRPVFLSEETPYSYPTGNHTYQEIAVPPPVPPPPSSEALNGTILDPLDQWQPSSSRFIHQQPQSSSPVYGSSAKTSSVSNPQDSVGSPCSRVGEEEHVYSFPNKQKSAEPSPTVMSTSLGSNLSELDRLLLELNAVQHNPPGFPADEANSSPPLPGALSPLYGVPETNSPLGGKAGPLTKEKPKRNGGRGLEDVRPSVESLLDELESSVPSPVPAITVNQGEMSSPQRVTSTQQQTRISASSATRELDELMASLSDFKFMAQGKTGSSSPPGGPPKPGSQLDSMLGSLQSDLNKLGVATVAKGVCGACKKPIAGQVVTAMGKTWHPEHFVCTHCQEEIGSRNFFERDGQPYCEKDYHNLFSPRCYYCNGPILDKVVTALDRTWHPEHFFCAQCGAFFGPEGFHEKDGKAYCRKDYFDMFAPKCGGCARAILENYISALNTLWHPECFVCRECFTPFVNGSFFEHDGQPYCEVHYHERRGSLCSGCQKPITGRCITAMAKKFHPEHFVCAFCLKQLNKGTFKEQNDKPYCQNCFLKLFC

SEQ ID NO: 7559 - protein, 424 aa, Homo sapiens
MSTSLGSNLSELDRLLLELNAVQHNPPGFPADEANSSPPLPGALSPLYGVPETNSPLGGKAGPLTKEKPKRNGGRGLEDVRPSVESLLDELESSVPSPVPAITVNQGEMSSPQRVTSTQQQTRISASSATRELDELMASLSDFKFMAQGKTGSSSPPGGPPKPGSQLDSMLGSLQSDLNKLGVATVAKGVCGACKKPIAGQVVTAMGKTWHPEHFVCTHCQEEIGSRNFFERDGQPYCEKDYHNLFSPRCYYCNGPILDKVVTALDRTWHPEHFFCAQCGAFFGPEGFHEKDGKAYCRKDYFDMFAPKCGGCARAILENYISALNTLWHPECFVCRECFTPFVNGSFFEHDGQPYCEVHYHERRGSLCSGCQKPITGRCITAMAKKFHPEHFVCAFCLKQLNKGTFKEQNDKPYCQNCFLKLFC

SEQ ID NO: 7560 - protein, 316 aa, Homo sapiens [sequence omitted]

SEQ ID NO: 7561 - protein, 330 aa, Homo sapiens
MPHSVTLRGPSPWGFRLVGGRDFSAPLTISRVHAGSKAALAALCPGDLIQAINGESTELMTHLEAQNRIKGCHDHLTLSVSRPEGRSWPSAPDDSKAQAHRIHIDPEIQDGSPTTSRRPSGTGTGPEDGRPSLGSPYGQPPRFPVPHNGSSEATLPAQMSTLHVSPPPSADPARGLPRSRDCRVDLGSEVYRMLREPAEPVAAEPKQSGSFRYLQGMLEAGEGGDWPGPGGPRNLKPTASKLGAPLSGLQGLPECTRCGHGIVGTIVKARDKLYHPECFMCSDCGLNLKQRGYFFLDERLYCESHAKARVKPPEGYDVVAVYPNAKVELV

SEQ ID NO: 7562 - protein, 246 aa, Homo sapiens
MPHSVTLRGPSPWGFRLVGGRDFSAPLTISRVHAGSKAALAALCPGDLIQAINGESTELMTHLEAQNRIKGCHDHLTLSVSRPEGRSWPSAPDDSKAQAHRIHIDPEIQDGSPTTSRRPSGTGTGPEDGRPSLGSPYGQPPRFPVPHNGSSEATLPAQMSTLHVSPPPSADPARGLPRSRDCRVDLGSEVYRMLREPAEPVAAEPKQSGSFRYLQGMLEAGEGGAPSSRHGTSSTIPSASCAVTAA

SEQ ID NO: 7563 - protein, 596 aa, Homo sapiens
MSNYSVSLVGPAPWGFRLQGGKDFNMPLTISSLKDGGKAAQANVRIGDVVLSIDGINAQGMTHLEAQNKIKGCTGSLNMTLQRASAAPKPEPVPVQKGEPKEVVKPVPITSPAVSKVTSTNNMAYNKAPRPFGSVSSPKVTSIPSPSSAFTPAHATTSSHASPSPVAAVTPPLFAASGLHANANLSADQSPSALSAGKTAVNVPRQPTVTSVCSETSQELAEGQRRGSQGDSKQQNGPPRKHIVERYTEFYHVPTHSDASKKRLIEDTEDWRPRTGTTQSRSFRILAQITGTEHLKESEADNTKKANNSQEPSPQLASSVASTRSMPESLDSPTSGRPGVTSLTAAAAFKPVGSTGVIKSPSWQRPNQGVPSTGRISNSATYSGSVAPANSALGQTQPSDQDTLVQRAEHIPAGKRTPMCAHCNQVIRGPFLVALGKSWHPEEFNCAHCKNTMAYIGFVEEKGALYCELCYEKFFAPECGRCQRKILGEVISALKQTWHVSCFVCVACGKPIRNNVFHLEDGEPYCETDYYALFGTICHGCEFPIEAGDMFLEALGYTWHDTCFVCSVCCESLEGQTFFSKKDKPLCKKHAHSVNF

SEQ ID NO: 7564 - protein, 214 aa, Homo sapiens
MSNYSVSLVGPAPWGFRLQGGKDFNMPLTISSLKDGGKAAQANVRIGDVVLSIDGINAQGMTHLEAQNKIKGCTGSLNMTLQRASAAPKPEPVPVQKKTQVTNNPGTVKIPPKRPPRKHIVERYTEFYHVPTHSDASKKRLIEDTEDWRPRTGTTQSRSFRILAQITGTEHLKESEADNTKKAKEKIPLHVFSPKYTKLRDWHHEVSARALNVQ

SEQ ID NO: 7565 - protein, 234 aa, Homo sapiens
MSNYSVSLVGPAPWGFRLQGGKDFNMPLTISSLKDGGKAAQANVRIGDVVLSIDGINAQGMTHLEAQNKIKGCTGSLNMTLQRASAAPKPEPVPVQKPTVTSVCSETSQELAEGQRRGSQGDSKQQNGKIPPKRPPRKHIVERYTEFYHVPTHSDASKKRLIEDTEDWRPRTGTTQSRSFRILAQITGTEHLKESEADNTKKAKEKIPLHVFSPKYTKLRDWHHEVSARALNVQ

SEQ ID NO: 7566 - protein, 487 aa, Homo sapiens
MSNYSVSLVGPAPWGFRLQGGKDFNMPLTISSLKDGGKAAQANVRIGDVVLSIDGINAQGMTHLEAQNKIKGCTGSLNMTLQRASAAPKPEPVPVQKPTVTSVCSETSQELAEGQRRGSQGDSKQQNGPPRKHIVERYTEFYHVPTHSDASKKRLIEDTEDWRPRTGTTQSRSFRILAQITGTEHLKESEADNTKKANNSQEPSPQLASSVASTRSMPESLDSPTSGRPGVTSLTAAAAFKPVGSTGVIKSPSWQRPNQGVPSTGRISNSATYSGSVAPANSALGQTQPSDQDTLVQRAEHIPAGKRTPMCAHCNQVIRGPFLVALGKSWHPEEFNCAHCKNTMAYIGFVEEKGALYCELCYEKFFAPECGRCQRKILGEVISALKQTWHVSCFVCVACGKPIRNNVFHLEDGEPYCETDYYALFGTICHGCEFPIEAGDMFLEALGYTWHDTCFVCSVCCESLEGQTFFSKKDKPLCKKHAHSVNF

SEQ ID NO: 7567 - protein, 234 aa, Homo sapiens
MSNYSVSLVGPAPWGFRLQGGKDFNMPLTISSLKDGGKAAQANVRIGDVVLSIDGINAQGMTHLEAQNKIKGCTGSLNMTLQRASAAPKPEPVPVQKPTVTSVCSETSQELAEGQRRGSQGDSKQQNGPVPRKIPPRKHIVERYTEFYHVPTHSDASKKRLIEDTEDWRPRTGTTQSRSFRILAQITGTEHLKESEADNTKKAKEKIPLHVFSPKYTKLRDWHHEVSARALNVQ

SEQ ID NO: 7568 - protein, 214 aa, Homo sapiens
MSNYSVSLVGPAPWGFRLQGGKDFNMPLTISSLKDGGKAAQANVRIGDVVLSIDGINAQGMTHLEAQNKIKGCTGSLNMTLQRASAAPKPEPVPVQKVTQKRESRSSRRTAPGLPPRKHIVERYTEFYHVPTHSDASKKRLIEDTEDWRPRTGTTQSRSFRILAQITGTEHLKESEADNTKKAKEKIPLHVFSPKYTKLRDWHHEVSARALNVQ

SEQ ID NO: 7569 - protein, 474 aa, Homo sapiens
MAYNKAPRPFGSVSSPKVTSIPSPSSAFTPAHATTSSHASPSPVAAVTPPLFAASGLHANANLSADQSPSALSAGKTAVNVPRQPTVTSVCSETSQELAEGQRRGSQGDSKQQNGPPRKHIVERYTEFYHVPTHSDASKKRLIEDTEDWRPRTGTTQSRSFRILAQITGTEHLKESEADNTKKANNSQEPSPQLASSVASTRSMPESLDSPTSGRPGVTSLTAAAAFKPVGSTGVIKSPSWQRPNQGVPSTGRISNSATYSGSVAPANSALGQTQPSDQDTLVQRAEHIPAGKRTPMCAHCNQVIRGPFLVALGKSWHPEEFNCAHCKNTMAYIGFVEEKGALYCELCYEKFFAPECGRCQRKILGEVISALKQTWHVSCFVCVACGKPIRNNVFHLEDGEPYCETDYYALFGTICHGCEFPIEAGDMFLEALGYTWHDTCFVCSVCCESLEGQTFFSKKDKPLCKKHAHSVNF

SEQ ID NO: 7570 - protein, 136 aa, Homo sapiens
MSNYSVSLVGPAPWGFRLQGGKDFNMPLTISSAGVQWRNLGSPQPPSPEFKRFSCLSLPSSWDYRHVPPRLANFVFLVETKFPYVGQAGLELPTSGDLPTSASQSAKITGVSHRAWPTLFYTLLFFATIYPEIILY

SEQ ID NO: 7571 - protein, 222 aa, Homo sapiens
MDSFKVVLEGPAPWGFRLQGGKDFNVPLSISRLTPGGKAAQAGVAVGDWVLSIDGENAGSLTHIEAQNKIRACGERLSLGLSRAQPVQSKPQKASAPAADPPRYTFAPSVSLNKTARPFGAPPPADSAPQQNGQPLRPLVPDASKQRLMENTEDWRPRPGTGQSRSFRILAHLTGTEFMQDPDEEHLKKSREKYVLELQSPRYTRLRDWHHQRSAHVLNVQS

SEQ ID NO: 7572 - protein, 457 aa, Homo sapiens
MDSFKVVLEGPAPWGFRLQGGKDFNVPLSISRLTPGGKAAQAGVAVGDWVLSIDGENAGSLTHIEAQNKIRACGERLSLGLSRAQPVQSKPQKASAPAADPPRYTFAPSVSLNKTARPFGAPPPADSAPQQNGQPLRPLVPDASKQRLMENTEDWRPRPGTGQSRSFRILAHLTGTEFMQDPDEEHLKKSSQVPRTEAPAPASSTPQEPWPGPTAPSPTSRPPWAVDPAFAERYAPDKTSTVLTRHSQPATPTPLQSRTSIVQAAAGGVPGGGSNNGKTPVCHQCHKVIRGRYLVALGHAYHPEEFVCSQCGKVLEEGGFFEEKGAIFCPPCYDVRYAPSCAKCKKKITGEIMHALKMTWHVHCFTCAACKTPIRNRAFYMEEGVPYCERDYEKMFGTKCHGCDFKIDAGDRFLEALGFSWHDTCFVCAICQINLEGKTFYSKKDRPLCKSHAFSHV

SEQ ID NO: 7573 - protein, 287 aa, Homo sapiens
MDSFKVVLEGPAPWGFRLQGGKDFNVPLSISRLTPGGKAAQAGVAVGDWVLSIDGENAGSLTHIEAQNKIRACGERLSLGLSRAQPVQSKPQKASAPAADPPRYTFAPSVSLNKTARPFGAPPPADSAPQQNGQPLRPLVPDASKQRLMENTEDWRPRPGTGQSRSFRILAHLTGTEFMQDPDEEHLKKSRPYRPQPYQPPALGCGPCVCRALCPGQNEHSADPAQPAGHAHAAAEPHLHCAGSCRRGARRGQQQRQDSRVSPVPQGHPGPLPGGAGPRVPPGGVCV

SEQ ID NO: 7574 - protein, 423 aa, Homo sapiens
MDSFKVVLEGPAPWGFRLQGGKDFNVPLSISRLTPGGKAAQAGVAVGDWVLSIDGENAGSLTHIEAQNKIRACGERLSLGLSRAQPVQSKPQKVQTPDKQPLRPLVPDASKQRLMENTEDWRPRPGTGQSRSFRILAHLTGTEFMQDPDEEHLKKSSQVPRTEAPAPASSTPQEPWPGPTAPSPTSRPPWAVDPAFAERYAPDKTSTVLTRHSQPATPTPLQSRTSIVQAAAGGVPGGGSNNGKTPVCHQCHKVIRGRYLVALGHAYHPEEFVCSQCGKVLEEGGFFEEKGAIFCPPCYDVRYAPSCAKCKKKITGEIMHALKMTWHVHCFTCAACKTPIRNRAFYMEEGVPYCERDYEKMFGTKCHGCDFKIDAGDRFLEALGFSWHDTCFVCAICQINLEGKTFYSKKDRPLCKSHAFSHV

SEQ ID NO: 7575 - protein, 173 aa, Homo sapiens
MDSFKVVLEGPAPWGFRLQGGKDFNVPLSISRLTPGGKAAQAGVAVGDWVLSIDGENAGSLTHIEAQNKIRACGERLSLGLSRAQPVQSKPQKASAPAADPPRYTFAPSVSLNKTARPFGAPPPADSAPQQNGQPLRPLVPDASKQRLMENTEDWRPRPGTGQSRSFRILAHL

SEQ ID NO: 7576 - protein, 90 aa, Homo sapiens
MDSFKVVLEGPAPWGFRLQGGKDFNVPLSISRLTPGGKAAQAGVAVGDWVLSIDGENAGSLTHIEAQNKIRACGERLSLGLSRAQPVQSK

SEQ ID NO: 7577 - protein, 163 aa, Homo sapiens
MADEEKLPPGWEKRMSRSSGRVYYFNHITNASQWERPSGNSSSGGKNGQGEPARVRCSHLLVKHSQSRRPSSWRQEKITRTKEEALELINGYIQKIKSGEEDFESLASQFSDCSSAKARGDLGAFSRGQMQKPFEDASFALRTGEMSGPVFTDSGIHIILRTE

SEQ ID NO: 7578 - protein, 45 aa, Homo sapiens
MQKPFEDASFALRTGEMSGPVFTDSGIHIILRTECWRQTRGPNCF

SEQ ID NO: 7579 - protein, 145 aa, Homo sapiens
MADEEKLPPGWEKRMSRSSGRVYYFNHITNASQWERPSGNSSSGGKNGQGEPARVRCSHLLVKHSQSRRPSSWRQEKITRTKEEALELINGYIQKIKSGEEDFESLASQFSDCSSAKARGDLGAFSRGAQGMGLTRLGDPYHPEG

SEQ ID NO: 7580 - protein, 186 aa, Homo sapiens
MTMVDTEMPFWPTNFGISSVDLSVMEDHSHSFDIKPFTTVDFSSISTPHYEDIPFTRTDPVVADYKYDLKLQEYQSAIKVEPASPPYYSEKTQLYNKPHEEPSNSLMAIECRVCGDKASGFHYGVHACEGCKGFFRRTIRLKLIYDRCDLNCRIHKKSRNKCQYCRFQKCLAVGMSHNEELQKDSY

SEQ ID NO: 7581 - protein, 583 aa, Homo sapiens
MGGLEKKKYERGSATNYITRNKARKKLQLSLADFRRLCILKGIYPHEPKHKKKVNKGSTAARTFYLIKDIRFLLHEPIVNKFREYKVFVRKLRKAYGKSEWNTVERLKDNKPNYKLDHIIKERYPTFIDALRDLDDALSMCFLFSTFPRTGKCHVQTIQLCRRLTVEFMHYIIAARALRKVFLSIKGIYYQAEVLGQPIVWITPYAFSHDHPTDVDYRVMATFTEFYTTLLGFVNFRLYQLLNLHYPPKLEGQAQAEAKAGEGTYALDSESCMEKLAALSASLARVVVPATEEEAEVDEFPTDGEEDRRKELEAQEKHKKLFEGLKFFLNREVPREALAFIIRSFGGEVSWDKSLCIGATYDVTDSRITHQIVDRPGQQTSVIGRCYVQPQWVFDSVNARLLLPVAEYFSGVQLPPHLSPFVTEKEGDYVPPEKLKLLALQRGEDPGNLNESEEEEEEDDNNEGDGDEEGENEEEEEDAEAGSEKEEEARLAALEEQRMEGKKPRVMAGTLKLEDKQRLAQEEESEAKRLAIMMMKKREKYLYQKIMFGKRRKIREANKLAEKRKAHDEAVRSEKKAKKARPE

SEQ ID NO: 7582 - protein, 588 aa, Homo sapiens
MGGLEKKKYERGSATNYITRNKARKKLQLSLADFRRLCILKGIYPHEPKHKKKVNKGSTAARTFYLIKDIRFLLHEPIVNKFREYKVFVRKLRKAYGKSEWNTVERLKDNKPNYKLDHIIKERYPTFIDALRDLDDALSMCFLFSTFPRTGKCHVQTIQLCRRLTVEFMHYIIAARALRKVFLSIKGIYYQAEVLGQPIVWITPYAFSHDHPTDVDYRVMATFTEFYTTLLGFVNFRLYQLLNLHYPPKLEGQAQAEAKAGEGTYALDSESCMEKLAALSASLARVVVPATEEEAEVDEFPTDGEMSAQEEDRRKELEAQEKHKKLFEGLKFFLNREVPREALAFIIRSFGGEVSWDKSLCIGATYDVTDSRITHQIVDRPGQQTSVIGRCYVQPQWVFDSVNARLLLPVAEYFSGVQLPPHLSPFVTEKEGDYVPPEKLKLLALQRGEDPGNLNESEEEEEEDDNNEGDGDEEGENEEEEEDAEAGSEKEEEARLAALEEQRMEGKKPRVMAGTLKLEDKQRLAQEEESEAKRLAIMMMKKREKYLYQKIMFGKRRKIREANKLAEKRKAHDEAVRSEKKAKKARPE

SEQ ID NO: 7583 - protein, 449 aa, Homo sapiens
MCFLFSTFPRTGKCHVQTIQLCRRLTVEFMHYIIAARALRKVFLSIKGIYYQAEVLGQPIVWITPYAFSHDHPTDVDYRVMATFTEFYTTLLGFVNFRLYQLLNLHYPPKLEGQAQAEAKAGEGTYALDSESCMEKLAALSASLARVVVPATEEEAEVDEFPTDGEMSAQEEDRRKELEAQEKHKKLFEGLKFFLNREVPREALAFIIRSFGGEVSWDKSLCIGATYDVTDSRITHQIVDRPGQQTSVIGRCYVQPQWVFDSVNARLLLPVAEYFSGVQLPPHLSPFVTEKEGDYVPPEKLKLLALQRGEDPGNLNESEEEEEEDDNNEGDGDEEGENEEEEEDAEAGSEKEEEARLAALEEQRMEGKKPRVMAGTLKLEDKQRLAQEEESEAKRLAIMMMKKREKYLYQKIMFGKRRKIREANKLAEKRKAHDEAVRSEKKAKKARPE

SEQ ID NO: 7584 - protein, 449 aa, Homo sapiens; identical to SEQ ID NO: 7583

SEQ ID NO: 7585 - protein, 1717 aa, Homo sapiens
MEPAAAATVQRLPELGREDRASAPAAAAAAAAAAAAAAAALAAAAGGGRSPEPALTPAAPSGGNGSGSGAREEAPGEAPPGPLPGRAGGAGRRRRRGAPQPIAGGAAPVPGAGGGANSLLLRRGRLKRNLSAAAAAASSSSSSSAAAASHSPGAAGLPASCSASASLCTRSLDRKTLLLKHRQTLQLQPSDRDWVRHQLQRGCVHVFDRHMASTYLRPVLCTLDTTAGEVAARLLQLGHKGGGVVKVLGQGPGAAAAREPAEPPPEAGPRLAPPEPRDSEVPPARSAPGAFGGPPRAPPADLPLPVGGPGGWSRRASPAPSDSSPGEPFVGGPVSSPRAPRPVVSDTESFSLSPSAESVSDRLDPYSSGGGSSSSSEELEADAASAPTGVPGQPRRPGHPAQPLPLPQTASSPQPQQKAPRAIDSPGGAVREGSCEEKAAAAVAPGGLQSTPGRSGVTAEKAPPPPPPPTLYVQLHGETTRRLEAEEKPLQIQNDYLFQLGFGELWRVQEEGMDSEIGCLIRFYAGKPHSTGSSERIQLSGMYNVRKGKMQLPVNRWTRRQVILCGTCLIVSSVKDSLTGKMHVLPLIGGKVEEVKKHQHCLAFSSSGPQSQTYYICFDTFTEYLRWLRQVSKVASQRISSVDLSCCSLEHLPANLFYSQDLTHLNLKQNFLRQNPSLPAARGLNELQRFTKLKSLNLSNNHLGDFPLAVCSIPTLAELNVSCNALRSVPAAVGVMHNLQTFLLDGNFLQSLPAELENMKQLSYLGLSFNEFTDIPEVLEKLTAVDKLCMSGNCVETLRLQALRKMPHIKHVDLRLNVIRKLIADEVDFLQHVTQLDLRDNKLGDLDAMIFNNIEVLHCERNQLVTLDICGYFLKALYASSNELVQLDVYPVPNYLSYMDVSRNRLENVPEWVCESRKLEVLDIGHNQICELPARLFCNSSLRKLLAGHNQLARLPERLERTSVEVLDVQHNQLLELPPNLLMKADSLRFLNASANKLESLPPATLSEETNSILQELYLTNNSLTDKCVPLLTGHPHLKILHMAYNRLQSFPASKMAKLEELEEIDLSGNKLKAIPTTIMNCRRMHTVIAHSNCIEVFPEVMQLPEIKCVDLSCNELSEVTLPENLPPKLQELDLTGNPRLVLDHKTLELLNNIRCFKIDQPSTGDASGAPAVWSHGYTEASGVKNKLCVAALSVNNFCDNREALYGVFDGDRNVEVPYLLQCTMSDILAEELQKTKNEEEYMVNTFIVMQRKLGTAGQKLGGAAVLCHIKHDPVDPGGSFTLTSANVGKCQTVLCRNGKPLPLSRSYIMSCEEELKRIKQHKAIITEDGKVNGVTESTRILGYTFLHPSVVPRPHVQSVLLTPQDEFFILGSKGLWDSLSVEEAVEAVRNVPDALAAAKKLCTLAQSYGCHDSISAVVVQLSVTEDSFCCCELSAGGAVPPPSPGIFPPSVNMVIKDRPSDGLGVPSSSSGMASEISSELSTSEMSSEVGSTASDEPPPGALSENSPAYPSEQRCMLHPICLSNSFQRQLSSATFSSAFSDNGLDSDDEEPIEGVFTNGSRVEVEVDIHCSRAKEKEKQQHLLQVPAEASDEGIVISANEDEPGLPRKADFSAVGTIGRRRANGSVAPQERSHNVIEVATDAPLRKPGGYFAAPAQPDPDDQFIIPPELEEEVKEIMKHHQEQQQQQQPPPPPQLQPQLPRHYQLDQLPDYYDTPL

SEQ ID NO: 7586 - protein, 1205 aa, Homo sapiens
MDSEIGCLIRFYAGKPHSTGSSERIQLSGMYNVRKGKMQLPVNRWTRRQVILCGTCLIVSSVKDSLTGKMHVLPLIGGKVEEVKKHQHCLAFSSSGPQSQTYYICFDTFTEYLRWLRQVSKVASQRISSVDLSCCSLEHLPANLFYSQDLTHLNLKQNFLRQNPSLPAARGLNELQRFTKLKSLNLSNNHLGDFPLAVCSIPTLAELNVSCNALRSVPAAVGVMHNLQTFLLDGNFLQSLPAELENMKQLSYLGLSFNEFTDIPEVLEKLTAVDKLCMSGNCVETLRLQALRKMPHIKHVDLRLNVIRKLIADEVDFLQHVTQLDLRDNKLGDLDAMIFNNIEVLHCERNQLVTLDICGYFLKALYASSNELVQLDVYPVPNYLSYMDVSRNRLENVPEWVCESRKLEVLDIGHNQICELPARLFCNSSLRKLLAGHNQLARLPERLERTSVEVLDVQHNQLLELPPNLLMKADSLRFLNASANKLESLPPATLSEETNSILQELYLTNNSLTDKCVPLLTGHPHLKILHMAYNRLQSFPASKMAKLEELEEIDLSGNKLKAIPTTIMNCRRMHTVIAHSNCIEVFPEVMQLPEIKCVDLSCNELSEVTLPENLPPKLQELDLTGNPRLVLDHKTLELLNNIRCFKIDQPSTGDASGAPAVWSHGYTEASGVKNKLCVAALSVNNFCDNREALYGVFDGDRNVEVPYLLQCTMSDILAEELQKTKNEEEYMVNTFIVMQRKLGTAGQKLGGAAVLCHIKHDPVDPGGSFTLTSANVGKCQTVLCRNGKPLPLSRSYIMSCEEELKRIKQHKAIITEDGKVNGVTESTRILGYTFLHPSVVPRPHVQSVLLTPQDEFFILGSKGLWDSLSVEEAVEAVRNVPDALAAAKKLCTLAQSYGCHDSISAVVVQLSVTEDSFCCCELSAGGAVPPPSPGIFPPSVNMVIKDRPSDGLGVPSSSSGMASEISSELSTSEMSSEVGSTASDEPPPGALSENSPAYPSEQRCMLHPICLSNSFQRQLSSATFSSAFSDNGLDSDDEEPIEGVFTNGSRVEVEVDIHCSRAKEKEKQQHLLQVPAEASDEGIVISANEDEPGLPRKADFSAVGTIGRRRANGSVAPQERSHNVIEVATDAPLRKPGGYFAAPAQPDPDDQFIIPPELEEEVKEIMKHHQEQQQQQQPPPPPQLQPQLPRHYQLDQLPDYYDTPL

SEQ ID NO: 7587 - protein, 792 aa, Homo sapiens
MHILPLVGGKIEEVKRRQYSLAFSSAGAQAQTYHVSFETLAEYQRWQRQASKVVSQRISTVDLSCYSLEEVPEHLFYSQDITYLNLRHNFMQLERPGGLDTLYKFSQLKGLNLSHNKLGLFPILLCEISTLTELNLSCNGFHDLPSQIGNLLNLQTLCLDGNFLTTLPEELGNLQQLSSLGISFNNFSQIPEVYEKLTMLDRVVMAGNCLEVLNLGVLNRMNHIKHVDLRMNHLKTMVIENLEGNKHITHVDLRDNRLTDLDLSSLCSLEQLHCGRNQLRELTLSGFSLRTLYASSNRLTAVNVYPVPSLLTFLDLSRNLLECVPDWACEAKKIEVLDVSYNLLTEVPVRILSSLSLRKLMLGHNHVQNLPTLVEHIPLEVLDLQHNALTRLPDTLFSKALNLRYLNASANSLESLPSACTGEESLSMLQLLYLTNNLLTDQCIPVLVGHLHLRILHLANNQLQTFPASKLNKLEQLEELNLSGNKLKTIPTTIANCKRLHTLVAHSNNISIFPEILQLPQIQFVDLSCNDLTEILIPEALPATLQDLDLTGNTNLVLEHKTLDIFSHITTLKIDQKPLPTTDSTVTSTFWSHGLAEMAGQRNKLCVSALAMDSFAEGVGAVYGMFDGDRNEELPRLLQCTMADVLLEEVQQSTNDTVFMANTFLVSHRKLGMAGQKLGSSALLCYIRPDTADPASSFSLTVANVGTCQAVLCRGGKPVPLSKVFSLEQDPEEAQRVKDQKAIITEVPEDLKEFQTTDIPVHHCNFRAVLGCLCSASVLGSYAGPAPRWRRT

SEQ ID NO: 7588 - protein, 1323 aa, Homo sapiens
MKRNGSRNCLNRRSRFGSRERDWLREDVKRGCVYLYGADTTTATTTTTTSSSSSSSSSSSDLHLVLCTVETPASEICAGEGRESLYLQLHGDLVRRLEPTERPLQIVYDYLSRLGFDDPVRIQEEATNPDLGCMIRFYGEKPCHMDRLDRILLSGIYNVRKGKTQLHKWAERLVVLCGTCLIVSSVKDCQTGKMHILPLVGGKIEEVKRRQYSLAFSSAGAQAQTYHVSFETLAEYQRWQRQASKVVSQRISTVDLSCYSLEEVPEHLFYSQDITYLNLRHNFMQLERPGGLDTLYKFSQLKGLNLSHNKLGLFPILLCEISTLTELNLSCNGFHDLPSQIGNLLNLQTLCLDGNFLTTLPEELGNLQQLSSLGISFNNFSQIPEVYEKLTMLDRVVMAGNCLEVLNLGVLNRMNHIKHVDLRMNHLKTMVIENLEGNKHITHVDLRDNRLTDLDLSSLCSLEQLHCGRNQLRELTLSGFSLRTLYASSNRLTAVNVYPVPSLLTFLDLSRNLLECVPDWACEAKKIEVLDVSYNLLTEVPVRILSSLSLRKLMLGHNHVQNLPTLVEHIPLEVLDLQHNALTRLPDTLFSKALNLRYLNASANSLESLPSACTGEESLSMLQLLYLTNNLLTDQCIPVLVGHLHLRILHLANNQLQTFPASKLNKLEQLEELNLSGNKLKTIPTTIANCKRLHTLVAHSNNISIFPEILQLPQIQFVDLSCNDLTEILIPEALPATLQDLDLTGNTNLVLEHKTLDIFSHITTLKIDQKPLPTTDSTVTSTFWSHGLAEMAGQRNKLCVSALAMDSFAEGVGAVYGMFDGDRNEELPRLLQCTMADVLLEEVQQSTNDTVFMANTFLVSHRKLGMAGQKLGSSALLCYIRPDTADPASSFSLTVANVGTCQAVLCRGGKPVPLSKVFSLEQDPEEAQRVKDQKAIITEDNKVNGVTCCTRMLGCTYLYPWILPKPHISSTPLTIQDELLILGNKALWEHLSYTEAVNAVRHVQDPLAAAKKLCTLAQSYGCQDNVGAMVVYLNIGEEGCTCEMNGLTLPGPVGFASTTTIKDAPKPATPSSSSGIASEFSSEMSTSEVSSEVGSTASDEHNAGGLDTALLPRPERRCSLHPTPTSGLFQRQPSSATFSSNQSDNGLDSDDDQPVEGVITNGSKVEVEVDIHCCRGRDLENSPPLIESSPTLCSEEHARGSCFGIRRQNSVNSGMLLPMSKDRMELQKSPSTSCLYGKKLSNGSIVPLEDSLNLIEVATEVPKRKTGYFAAPTQMEPEDQFVVPHDLEEEVKEQMKQHQDSRLEPEPHEEDRTEPPEEFDTAL

SEQ ID NO: 7589 - protein, 956 aa, Homo sapiens
MKRNGSRNCLNRRSRFGSRERDWLREDVKRGCVYLYGADTTTATTTTTTSSSSSSSSSSSDLHLVLCTVETPASEICAGEGRESLYLQLHGDLVRRLEPTERPLQIVYDYLSRLGFDDPVRIQEEATNPDLGCMIRFYGEKPCHMDRLDRILLSGIYNVRKGKTQLHKWAERLVVLCGTCLIVSSVKDCQTGKMHILPLVGGKIEEVKRRQYSLAFSSAGAQAQTYHVSFETLAEYQRWQRQASKVVSQRISTVDLSCYSLEEVPEHLFYSQDITYLNLRHNFMQLERPGGLDTLYKFSQLKGLNLSHNKLGLFPILLCEISTLTELNLSCNGFHDLPSQIGNLLNLQTLCLDGNFLTTLPEELGNLQQLSSLGISFNNFSQIPEVYEKLTMLDRVVMAGNCLEVLNLGVLNRMNHIKHVDLRMNHLKTMVIENLEGNKHITHVDLRDNRLTDLDLSSLCSLEQLHCGRNQLRELTLSGFSLRTLYASSNRLTAVNVYPVPSLLTFLDLSRNLLECVPDWACEAKKIEVLDVSYNLLTEVPVRILSSLSLRKLMLGHNHVQNLPTLVEHIPLEVLDLQHNALTRLPDTLFSKALNLRYLNASANSLESLPSACTGEESLSMLQLLYLTNNLLTDQCIPVLVGHLHLRILHLANNQLQTFPASKLNKLEQLEELNLSGNKLKTIPTTIANCKRLHTLVAHSNNISIFPEILQLPQIQFVDLSCNDLTEILIPEALPATLQDLDLTGNTNLVLEHKTLDIFSHITTLKIDQKPLPTTDSTVTSTFWSHGLAEMAGQRNKLCVSALAMDSFAEGVGAVYGMFDGDRNEELPRLLQCTMADVLLEEVQQSTNDTVFMANTFLVSHRKLGMAGQKLGSSALLCYIRPDTADPASSFSLTVANVGTCQAVLCRGGKPVPLSKVFSLEQDPEEAQRVKDQKAIITENWVLNQKHLQDFPGEDK

SEQ ID NO: 7590 - protein, 1256 aa, Homo sapiens
MKRNGSRNCLNRRSRFGSRERDWLREDVKRGCVYLYGADTTTATTTTTTSSSSSSSSSSSDLHLVLCTVETPASEICAGEGRESLYLQLHGDLVRRLEPTERPLQIVYDYLSRLGFDDPVRIQEEATNPDLGCMIRFYGEKPCHMDRLDRILLSGIYNVRKGKTQLHKWAERLVVLCGTCLIVSSVKDCQTGKMHILPLVGGKIEEVKRRQYSLAFSSAGAQAQTYHVSFETLAEYQRWQRQASKVVSQRISTVDLSCYSLEEVPEHLFYSQDITYLNLRHNFMQLERPGGLDTLYKFSQLKGLNLSHNKLGLFPILLCEISTLTELNLSCNGFHDLPSQIGNLLNLQTLCLDGNFLTTLPEELGNLQQLSSLGISFNNFSQIPEVYEKLTMLDRVVMAGNCLEVLNLGVLNRMNHIKHVDLRMNHLKTMVIENLEGNKHITHVDLRDNRLTDLDLSSLCSLEQLHCGRNQLRELTLSGFSLRTLYASSNRLTAVNVYPVPSLLTFLDLSRNLLECVPDWACEAKKIEVLDVSYNLLTEVPVRILSSLSLRKLMLGHNHVQNLPTLVEHIPLEVLDLQHNALTRLPDTLFSKALNKLNKLEQLEELNLSGNKLKTIPTTIANCKRLHTLVAHSNNISIFPEILQLPQIQFVDLSCNDLTEILIPEALPATLQDLDLTGNTNLVLEHKTLDIFSHITTLKIDQKPLPTTDSTVTSTFWSHGLAEMAGQRNKLCVSALAMDSFAEGVGAVYGMFDGDRNEELPRLLQCTMADVLLEEVQQSTNDTVFMANTFLVSHRKLGMAGQKLGSSALLCYIRPDTADPASSFSLTVANVGTCQAVLCRGGKPVPLSKVFSLEQDPEEAQRVKDQKAIITEDNKVNGVTCCTRMLGCTYLYPWILPKPHISSTPLTIQDELLILGNKALWEHLSYTEAVNAVRHVQDPLAAAKKLCTLAQSYGCQDNVGAMVVYLNIGEEGCTCEMNGLTLPGPVGFASTTTIKDAPKPATPSSSSGIASEFSSEMSTSEVSSEVGSTASDEHNAGGLDTALLPRPERRCSLHPTPTSGLFQRQPSSATFSSNQSDNGLDSDDDQPVEGVITNGSKVEVEVDIHCCRGRDLENSPPLIESSPTLCSEEHARGSCFGIRRQNSVNSGMLLPMSKDRMELQKSPSTSCLYGKKLSNGSIVPLEDSLNLIEVATEVPKRKTGYFAAPTQMEPEDQFVVPHDLEEEVKEQMKQHQDSRLEPEPHEEDRTEPPEEFDTAL

SEQ ID NO: 7591 - protein, 423 aa, Homo sapiens
MKRNGSRNCLNRRSRFGSRERDWLREDVKRGCVYLYGADTTTATTTTTTSSSSSSSSSSSDLHLVLCTVETPASEICAGEGRESLYLQLHGDLVRRLEPTERPLQIVYDYLSRLGFDDPVRIQEEATNPDLGCMIRFYGEKPCHMDRLDRILLSGIYNVRKGKTQLHKWAERLVVLCGTCLIVSSVKDCQTGKMHILPLVGGKIEEVKRRQYSLAFSSAGAQAQTYHVSFETLAEYQRWQRQASKVVSQRISTVDLSCYSLEEVPEHLFYSQDITYLNLRHNFMQLERPGGLDTLYKFSQLKGLNLSHNKLGLFPILLCEISTLTELNLSCNGFHDLPSQIGNLLNLQTLCLDGNFLTTLPEELGNLQQLSSLGISFNNFSQIPEVYEKLTMLDRVVMAGNCLEVLNLGVLNRMNHIKHVDLR

SEQ ID NO: 7592 - protein, 166 aa, Homo sapiens
MAGQRNKLCVSALAMDSFAEGVGAVYGMFDGDRNEELPRLLQCTMADVLLEEVQQSTNDTVFMANTFLVSHRKLGMAGQKLGSSALLCYIRPDTADPASSFSLTVANVGTCQAVLCRGGKPVPLSKVFSLEQDPEEAQRVKDQKAIITENWVLNQKHLQDFPGEDK

SEQ ID NO: 7593 - protein, 1323 aa, Homo sapiens; identical to SEQ ID NO: 7588

SEQ ID NO: 7594 - protein, 403 aa, Homo sapiens [sequence omitted]

SEQ ID NO: 7595 - protein, 176 aa, Homo sapiens
MGKAAAAVAFGAEVGVRLALFAAFLVTELLPPFQRLIQPEEMWLYRNPYVEAEYFPTKPMFVIAFLSPLSLIFLAKFLKKADTRDSRQACLAASLALALNGVFTNTIKLIVGRPRPDFFYRCFPDGLAHSDLMCTGDKDVVNEGRKSFPSGHSSCMNIIWTLPYACFHIIEFNLES

SEQ ID NO: 7596 - protein, 216 aa, Homo sapiens
MGKAAAAVAFGAEVGVRLALFAAFLVTELLPPFQRLIQPEEMWLYRNPYVEAEYFPTKPMFVIAFLSPLSLIFLAKFLKKADTRDSRQACLAASLALALNGVFTNTIKLIVGRPRPDFFYRCFPDGLAHSDLMCTGDKDVVNEGRKSFPSGHSSFAFAGLAFASFYLAGKLHCFTPQGRGKSWRFCAFLSPLLFAAVIALSRTCDYKHHWQGPFKW

SEQ ID NO: 7597 - protein, 264 aa, Homo sapiens [sequence omitted]

SEQ ID NO: 7598 - protein, 361 aa, Homo sapiens
MHGDYTLTLRKGGNNKLIKIFHRDGKYGFSDPLTFSSVVELINHYRNESLAQYNPKLDVKLLYPVSKYQQDQVVKEDNIEAVGKKLHEYNTQFQEKSREYDRLYEEYTRTSQEIQMKRTAIEAFNETIKIFEEQCQTQERYSKEYIEKFKREGNEKEIQRIMHNYDKLKSRISEIIDSRRRLEEDLKKQAAEYREIDKRMNSIKPDLIQLRKTRDQYLMWLTQKGVRQKKLNEWLGNENTEDQYSLVEDDEDLPHHDEKTWNVGSSNRNKAENLLRGKRDGTFLVRESSKQGCYACSVVVDGEVKHCVINKTATGYGFAEPYNLYSSLKELVLHYQHTSLVQHNDSLNVTLAYPVYAQQRR

SEQ ID NO: 7599 - protein, 1068 aa, Homo sapiens
MPPRPSSGELWGIHLMPPRILVECLLPNGMIVTLECLREATLITIKHELFKEARKYPLHQLLQDESSYIFVSVTQEAEREEFFDETRRLCDLRLFQPFLKVIEPVGNREEKILNREIGFAIGMPVCEFDMVKDPEVQDFRRNILNVCKEAVDLRDLNSPHSRAMYVYPPNVESSPELPKHIYNKLDKGQIIVVIWVIVSPNNDKQKYTLKINHDCVPEQVIAEAIRKKTRSMLLSSEQLKLCVLEYQGKYILKVCGCDEYFLEKYPLSQYKYIRSCIMLGRMPNLMLMAKESLYSQLPMDCFTMPSYSRRISTATPYMNGETSTKSLWVINSALRIKILCATYVNVNIRDIDKIYVRTGIYHGGEPLCDNVNTQRVPCSNPRWNEWLNYDIYIPDLPRAARLCLSICSVKGRKGAKEEHCPLAWGNINLFDYTDTLVSGKMALNLWPVPHGLEDLLNPIGVTGSNPNKETPCLELEFDWFSSVVKFPDMSVIEEHANWSVSREAGFSYSHAGLSNRLARDNELRENDKEQLKAISTRDPLSEITEQEKDFLWSHRHYCVTIPEILPKLLLSVKWNSRDEVAQMYCLVKDWPPIKPEQAMELLDCNYPDPMVRGFAVRCLEKYLTDDKLSQYLIQLVQVLKYEQYLDNLLVRFLLKKALTNQRIGHFFFWHLKSEMHNKTVSQRFGLLLESYCRACGMYLKHLNRQVEAMEKLINLTDILKQEKKDETQKVQMKFLVEQMRRPDFMDALQGFLSPLNPAHQLGNLRLEECRIMSSAKRPLWLNWENPDIMSELLFQNNEIIFKNGDDLRQDMLTLQIIRIMENIWQNQGLDLRMLPYGCLSIGDCVGLIEVVRNSHTIMQIQCKGGLKGALQFNSHTLHQWLKDKNKGEIYDAAIDLFTRSCAGYCVATFILGIGDRHNSNIMVKDDGQLFHIDFGHFLDHKKKKFGYKRERVPFVLTQDFLIVISKGAQECTKTREFERFQEMCYKAYLAIRQHANLFINLFSMMLGSGMPELQSFDDIAYIRKTLALDKTEQEALEYFMKQMNDAHHGGWTTKMDWIFHTIKQHALN

SEQ ID NO: 7600 - protein, 118 aa, Homo sapiens
MPPRPSSGELWGIHLMPPRILVECLLPNGMIVTLECLREATLITIKHELFKEARKYPLHQLLQDESSYIFVSVTQEAEREEFFDETRRLCDLRLFQPFLKVIEPVGNREEKILNREIG

SEQ ID NO: 7601 - protein, 21 aa, Homo sapiens
MPPRPSSGELWGIHLMPPRIL

SEQ ID NO: 7602 - protein, 1070 aa, Homo sapiens
MCFSFIMPPAMADILDIWAVDSQIASDGSIPVDFLLPTGIYIQLEVPREATISYIKQMLWKQVHNYPMFNLLMDIDSYMFACVNQTAVYEELEDETRRLCDVRPFLPVLKLVTRSCDPGEKLDSKIGVLIGKGLHEFDSLKDPEVNEFRRKMRKFSEEKILSLVGLSWMDWLKQTYPPEHEPSIPENLEDKLYGGKLIVAVHFENCQDVFSFQVSPNMNPIKVNELAIQKRLTIHGKEDEVSPYDYVLQVSGRVEYVFGDHPLIQFQYIRNCVMNRALPHFILVECCKIKKMYEQEMIAIEAAINRNSSNLPLPLPPKKTRIISHVWENNNPFQIVLVKGNKLNTEETVKVHVRAGLFHGTELLCKTIVSSEVSGKNDHIWNEPLEFDINICDLPRMARLCFAVYAVLDKVKTKKSTKTINPSKYQTIRKAGKVHYPVAWVNTMVFDFKGQLRTGDIILHSWSSFPDELEEMLNPMGTVQTNPYTENATALHVKFPENKKQPYYYPPFDKIIEKAAEIASSDSANVSSRGGKKFLPVLKEILDRDPLSQLCENEMDLIWTLRQDCREIFPQSLPKLLLSIKWNKLEDVAQLQALLQIWPKLPPREALELLDFNYPDQYVREYAVGCLRQMSDEELSQYLLQLVQVLKYEPFLDCALSRFLLERALGNRRIGQFLFWHLRSEVHIPAVSVQFGVILEAYCRGSVGHMKVLSKQVEALNKLKTLNSLIKLNAVKLNRAKGKEAMHTCLKQSAYREALSDLQSPLNPCVILSELYVEKCKYMDSKMKPLWLVYNNKVFGEDSVGVIFKNGDDLRQDMLTLQMLRLMDLLWKEAGLDLRMLPYGCLATGDRSGLIEVVSTSETIADIQLNSSNVAAAAAFNKDALLNWLKEYNSGDDLDRAIEEFTLSCAGYCVASYVLGIGDRHSDNIMVKKTGQLFHIDFGHILGNFKSKFGIKRERVPFILTYDFIHVIQQGKTGNTEKFGRFRQCCEDAYLILRRHGNLFITLFALMLTAGLPELTSVKDIQYLKDSLALGKSEEEALKQFKQKFDEALRESWTTKVNWMAHTVRKDYRS

SEQ ID NO: 7603 - protein, 100 aa, Homo sapiens
MCFSFIMPPAMADILDIWAVDSQIASDGSIPVDFLLPTGIYIQLEVPREATISYIKQMLWKQVHNYPMFNLLMDIDSYMFACVNQTAVYEELEDETRRLC

SEQ ID NO: 7604 - protein, 56 aa, Homo sapiens
MCFSFIMPPAMADILDIWAVDSQIASDGSIPVDFLLPTGIYIQLEVPREATISYIK

SEQ ID NO: 7605 - protein, 1070 aa, Homo sapiens; identical to SEQ ID NO: 7602

SEQ ID NO: 7606 - protein, 131 aa, Homo sapiens
MCFSFIMPPAMADILDIWAVDSQIASDGSIPVDFLLPTGIYIQLEVPREATISYIKQMLWKQVHNYPMFNLLMDIDSYMFACVNQTAVYEELEDETRRLCDVRPFLPVLKLVTRSCDPGEKLDSKIGVLIG

SEQ ID NO: 7607 - protein, 702 aa, Homo sapiens
  VARIANT 1: note = MOD_RES - Any amino acid
XVRAGLFHGTELLCKTIVSSEVSGKNDHIWNEPLEFDINICDLPRMARLCFAVYAVLDKVKTKKSTKTINPSKYQTIRKAGKVHYPVAWVNTMVFDFKGQLRTGDIILHSWSSFPDELEEMLNPMGTVQTNPYTENATALHVKFPENKKQPYYYPPFDKSRGGKKFLPVLKEILDRDPLSQLCENEMDLIWTLRQDCREIFPQSLPKLLLSIKWNKLEDVAQLQALLQIWPKLPPREALELLDFNYPDQYVREYAVGCLRQMSDEELSQYLLQLVQVLKYEPFLDCALSRFLLERALGNRRIGQFLFWHLRSEVHIPAVSVQFGVILEAYCRGSVGHMKVLSKQVEALNKLKTLNSLIKLNAVKLNRAKGKEAMHTCLKQSAYREALSDLQSPLNPCVILSELYVEKCKYMDSKMKPLWLVYNNKVFGEDSVGVIFKNGDDLRQDMLTLQMLRLMDLLWKEAGLDLRMLPYGCLATGDRSGLIEVVSTSETIADIQLNSSNVAAAAAFNKDALLNWLKEYNSGDDLDRAIEEFTLSCAGYCVASYVLGIGDRHSDNIMVKKTGQLFHIDFGHILGNFKSKFGIKRERVPFILTYDFIHVIQQGKTGNTEKFGRFRQCCEDAYLILRRHGNLFITLFALMLTAGLPELTSVKDIQYLKDSLALGKSEEEALKQFKQKFDEALRESWTTKVNWMAHTVRKDYRS

SEQ ID NO: 7608 - protein, 521 aa, Homo sapiens
MDLIWTLRQDCREIFPQSLPKLLLSIKWNKLEDVAQLQALLQIWPKLPPREALELLDFNYPDQYVREYAVGCLRQMSDEELSQYLLQLVQVLKYEPFLDCALSRFLLERALGNRRIGQFLFWHLRSEVHIPAVSVQFGVILEAYCRGSVGHMKVLSKQVEALNKLKTLNSLIKLNAVKLNRAKGKEAMHTCLKQSAYREALSDLQSPLNPCVILSELYVEKCKYMDSKMKPLWLVYNNKVFGEDSVGVIFKNGDVCFPLDLRQDMLTLQMLRLMDLLWKEAGLDLRMLPYGCLATGDRSGLIEVVSTSETIADIQLNSSNVAAAAAFNKDALLNWLKEYNSGDDLDRAIEEFTLSCAGYCVASYVLGIGDRHSDNIMVKKTGQLFHIDFGHILGNFKSKFGIKRERVPFILTYDFIHVIQQGKTGNTEKFGRFRQCCEDAYLILRRHGNLFITLFALMLTAGLPELTSVKDIQYLKDSLALGKSEEEALKQFKQKFDEALRESWTTKVNWMAHTVRKDYRS

SEQ ID NO: 7609 - protein, 1068 aa, Homo sapiens
MPPGVDCPMEFWTKEENQSVVVDFLLPTGVYLNFPVSRNANLSTIKQLLWHRAQYEPLFHMLSGPEAYVFTCINQTAEQQELEDEQRRLCDVQPFLPVLRLVAREGDRVKKLINSQISLLIGKGLHEFDSLCDPEVNDFRAKMCQFCEEAAARRQQLGWEAWLQYSFPLQLEPSAQTWGPGTLRLPNRALLVNVKFEGSEESFTFQVSTKDVPLALMACALRKKATVFRQPLVEQPEDYTLQVNGRHEYLYGSYPLCQFQVQKPRAKPPPIPAKKPSSVSLWSLEQPFRIELIQGSKVNADERMKLVVQAGLFHGNEMLCKTVSSSEVSVCSEPVWKQRLEFDINICDLPRMARLCFALYAVIEKAKKARSTKKKSKKADCPIAWANLMLFDYKDQLKTGERCLYMWPSVPDEKGELLNPTGTVRSNPNTDSAAALLICLPEVAPHPVYYPALEKLPGGMLLASREWRPELLWMRLHAEDSAPSRMIGVAMPGLGVLPGLVQAPGDAECSRLLQILELGRHSECVHVTEEEQLQLREILERRGSGELYEHEKDLVWKLRHEVQEHFPEALARLLLVTKWNKHEDVAQDALPAVSWPELPVLSALELLDFSFPDCHVGSFAIKSLRKLTDDELFQYLLQLVQVLKYESYLDCELTKFLLDRALANRKIGHFLFWHLRSEMHVPSVALRFGLILEAYCRGSTHHMKVLMKQGEALSKLKALNDFVKLSSQKTPKPQTKELMHLCMRQEAYLEALSHLQSPLDPSTLLAEVCVEQCTFMDSKMKPLWIMYSNEEAGSGGSVGIIFKNGDDLRQDMLTLQMIQLMDVLWKQEGLDLRMTPYGCLPTGDRTGLIEVVLRSDTIANIQLNKSNMAATAAFNKDALLNWLKSKNPGEALDRAIEEFTLSCAGYCVATYVLGIGDRHSDNIMIRESGQLFHIDFGHFLGNFKTKFGINRERVPFILTYDFVHVIQQGKTNNSEKFERFRGYCERAYTILRRHGLLFLHLFALMRAAGLPELSCSKDIQYLKDSLALGKTEEEALKHFRVKFNEALRESWKTKVNWLAHNVSKDNRQ

SEQ ID NO: 7610 - protein, 1068 aa, Homo sapiens
MPPGVDCPMEFWTKEENQSVVVDFLLPTGVYLNFPVSRNANLSTIKQLLWHRAQYEPLFHMLSGPEAYVFTCINQTAEQQELEDEQRRLCDVQPFLPVLRLVAREGDRVKKLINSQISLLIGKGLHEFDSLCDPEVNDFRAKMCQFCEEAAARRQQLGWEAWLQYSFPLQLEPSAQTWGPGTLRLPNRALLVNVKFEGSEESFTFQVSTKDVPLALMACALRKKATVFRQPLVEQPEDYTLQVNGRHEYLYGSYPLCQFQVQKPRAKPPPIPAKKPSSVSLWSLEQPFRIELIQGSKVNADERMKLVVQAGLFHGNEMLCKTVSSSEVSVCSEPVWKQRLEFDINICDLPRMARLCFALYAVIEKAKKARSTKKKSKKADCPIAWANLMLFDYKDQLKTGERCLYMWPSVPDEKGELLNPTGTVRSNPNTDSAAALLICLPEVAPHPVYYPALEKLPGGMLLASREWRPELLWMRLHAEDSAPSRMIGVAMPGLGVLPGLVQAPGDAECSRLLQILELGRHSECVHVTEEEQLQLREILERRGSGELYEHEKDLVWKLRHEVQEHFPEALARLLLVTKWNKHEDVAQMLYLLCSWPELPVLSALELLDFSFPDCHVGSFAIKSLRKLTDDELFQYLLQLVQVLKYESYLDCELTKFLLDRALANRKIGHFLFWHLRSEMHVPSVALRFGLILEAYCRGSTHHMKVLMKQGEALSKLKALNDFVKLSSQKTPKPQTKELMHLCMRQEAYLEALSHLQSPLDPSTLLAEVCVEQCTFMDSKMKPLWIMYSNEEAGSGGSVGIIFKNGDDLRQDMLTLQMIQLMDVLWKQEGLDLRMTPYGCLPTGDRTGLIEVVLRSDTIANIQLNKSNMAATAAFNKDALLNWLKSKNPGEALDRAIEEFTLSCAGYCVATYVLGIGDRHSDNIMIRESGQLFHIDFGHFLGNFKTKFGINRERVPFILTYDFVHVIQQGKTNNSEKFERFRGYCERAYTILRRHGLLFLHLFALMRAAGLPELSCSKDIQYLKDSLALGKTEEEALKHFRVKFNEALRESWKTKVNWLAHNVSKDNRQ

SEQ ID NO: 7611 - protein, 1044 aa, Homo sapiens
MPPGVDCPMEFWTKEENQSVVVDFLLPTGVYLNFPVSRNANLSTIKQLLWHRAQYEPLFHMLSGPEAYVFTCINQTAEQQELEDEQRRLCDVQPFLPVLRLVAREGDRVKKLINSQISLLIGKGLHEFDSLCDPEVNDFRAKMCQFCEEAAARRQQLGWEAWLQYSFPLQLEPSAQTWGPGTLRLPNRALLVNVKFEGSEESFTFQVSTKDVPLALMACALRKKATVFRQPLVEQPEDYTLQVNGRHEYLYGSYPLCQFQYICSCLHSGLTPHLTMVHSSSILAMRDEQSNPAPQVQKPRAKPPPIPAKKPSSVSLWSLEQPFRIELIQGSKVNADERMKLVVQAGLFHGNEMLCKTVSSSEVSVCSEPVWKQRLEFDINICDLPRMARLCFALYAVIEKAKKARSTKKKSKKADCPIAWANLMLFDYKDQLKTGERCLYMWPSVPDEKGELLNPTGTVRSNPNTDSAAALLICLPEVAPHPVYYPALEKILELGRHSECVHVTEEEQLQLREILERRGSGELYEHEKDLVWKLRHEVQEHFPEALARLLLVTKWNKHEDVAQMLYLLCSWPELPVLSALELLDFSFPDCHVGSFAIKSLRKLTDDELFQYLLQLVQVLKYESYLDCELTKFLLDRALANRKIGHFLFWHLRSEMHVPSVALRFGLILEAYCRGSTHHMKVLMKQGEALSKLKALNDFVKLSSQKTPKPQTKELMHLCMRQEAYLEALSHLQSPLDPSTLLAEVCVEQCTFMDSKMKPLWIMYSNEEAGSGGSVGIIFKNGDDLRQDMLTLQMIQLMDVLWKQEGLDLRMTPYGCLPTGDRTGLIEVVLRSDTIANIQLNKSNMAATAAFNKDALLNWLKSKNPGEALDRAIEEFTLSCAGYCVATYVLGIGDRHSDNIMIRESGQLFHIDFGHFLGNFKTKFGINRERVPFILTYDFVHVIQQGKTNNSEKFERFRGYCERAYTILRRHGLLFLHLFALMRAAGLPELSCSKDIQYLKDSLALGKTEEEALKHFRVKFNEALRESWKTKVNWLAHNVSKDNRQ

SEQ ID NO: 7612 - protein, 1068 aa, Homo sapiens; identical to SEQ ID NO: 7610

SEQ ID NO: 7613 - protein, 319 aa, Homo sapiens
MIPESSELVVQAGLFHGNEMLCKTVSSSEVSVCSEPVWKQRLEFDINICDLPRMARLCFALYAVIEKAKKARSTKKKSKKADCPIAWANLMLFDYKDQLKTGERCLYMWPSVPDEKGELLNPTGTVRSNPNTDSAAALLICLPEVAPHPVYYPALEKILELGRHSECVHVTEEEQLQLREILERRGSGELYEHEKDLVWKLRHEVQEHFPEALARLLLVTKWNKHEDVAQMLYLLCSWPELPVLSALELLDFSFPDCHVGSFAIKSLRKLTDDELFQYLLQLVQVLKYESYLDCELTKFLLDRALANRKIGHFLFWHLR

SEQ ID NO: 7614 - protein, 1102 aa, Homo sapiens
MELENYKQPVVLREDNCRRRRRMKPRSAAASLSSMELIPIEFVLPTSQRKCKSPETALLHVAGHGNVEQMKAQVWLRALETSVAADFYHRLGPHHFLLLYQKKGQWYEIYDKYQVVQTLDCLRYWKATHRSPGQIHLVQRHPPSEESQAFQRQLTALIGYDVTDVSNVHDDELEFTRRGLVTPRMAEVASRDPKLYAMHPWVTSKPLPEYLWKKIANNCIFIVIHRSTTSQTIKVSPDDTPGAILQSFFTKMAKKKSLMDIPESQSEQDFVLRVCGRDEYLVGETPIKNFQWVRHCLKNGEEIHVVLDTPPDPALDEVRKEEWPLVDDCTGVTGYHEQLTIHGKDHESVFTVSLWDCDRKFRVKIRGIDIPVLPRNTDLTVFVEANIQHGQQVLCQRRTSPKPFTEEVLWNVWLEFSIKIKDLPKGALLNLQIYCGKAPALSSKASAESPSSESKGKVQLLYYVNLLLIDHRFLLRRGEYVLHMWQISGKGEDQGSFNADKLTSATNPDKENSMSISILLDNYCHPIALPKHQPTPDPEGDRVRAEMPNQLRKQLEAIIATDPLNPLTAEDKELLWHFRYESLKHPKAYPKLFSSVKWGQQEIVAKTYQLLARREVWDQSALDVGLTMQLLDCNFSDENVRAIAVQKLESLEDDDVLHYLLQLVQAVKFEPYHDSALARFLLKRGLRNKRIGHFLFWFLRSEIAQSRHYQQRFAVILEAYLRGCGTAMLHDFTQQVQVIEMLQKVTLDIKSLSAEKYDVSSQVISQLKQKLENLQNSQLPESFRVPYDPGLKAGALAIEKCKVMASKKKPLWLEFKCADPTALSNETIGIIFKHGDDLRQDMLILQILRIMESIWETESLDLCLLPYGCISTGDKIGMIEIVKDATTIAKIQQSTVGNTGAFKDEVLNHWLKEKSPTEEKFQAAVERFVYSCAGYCVATFVLGIGDRHNDNIMITETGNLFHIDFGHILGNYKSFLGINKERVPFVLTPDFLFVMGTSGKKTSPHFQKFQDICVKAYLALRHHTNLLIILFSMMLMTGMPQLTSKEDIEYIRDALTVGKNEEDAKKYFLDQIEVCRDKGWTVQFNWFLHLVLGIKQGEKHSA

SEQ ID NO: 7615 - protein, 1102 aa, Homo sapiens; identical to SEQ ID NO: 7614

SEQ ID NO: 7616 - protein, 1102 aa, Homo sapiens; identical to SEQ ID NO: 7614

SEQ ID NO: 7617 - protein, 1686 aa, Homo sapiens
MAQISSNSGFKECPSSHPEPTRAKDVDKEEALQMEAEALAKLQKDRQVTDNQRGFELSSSTRKKAQVYNKQDYDLMVFPESDSQKRALDIDVEKLTQAELEKLLLDDSFETKKTPVLPVTPILSPSFSAQLYFRPTIQRGQWPPGLPGPSTYALPSIYPSTYSKQAAFQNGFNPRMPTFPSTEPIYLSLPGQSPYFSYPLTPATPFHPQGSLPIYRPVVSTDMAKLFDKIASTSEFLKNGKARTDLEITDSKVSNLQVSPKSEDISKFDWLDLDPLSKPKVDNVEVLDHEEEKNVSSLLAKDPWDAVLLEERSTANCHLERKVNGKSLSVATVTRSQSLNIRTTQLAKAQGHISQKDPNGTSSLPTGSSLLQEVEVQNEEMAAFCRSITKLKTKFPYTNHRTNPGYLLSPVTAQRNICGENASVKVSIDIEGFQLPVTFTCDVSSTVEIIIMQALCWVHDDLNQVDVGSYVLKVCGQEEVLQNNHCLGSHEHIQNCRKWDTEIRLQLLTFSAMCQNLARTAEDDETPVDLNKHLYQIEKPCKEAMTRHPVEELLDSYHNQVELALQIENQHRAVDQVIKAVRKICSALDGVETLAITESVKKLKRAVNLPRSKTADVTSLFGGEDTSRSSTRGSLNPENPVQVSINQLTAAIYDLLRLHANSGRSPTDCAQSSKSVKEAWTTTEQLQFTIFAAHGISSNWVSNYEKYYLICSLSHNGKDLFKPIQSKKVGTYKNFFYLIKWDELIIFPIQISQLPLESVLHLTLFGILNQSSGSSPDSNKQRKGPEALGKVSLPLFDFKRFLTCGTKLLYLWTSSHTNSVPGTVTKKGYVMERIVLQVDFPSPAFDIIYTTPQVDRSIIQQHNLETLENDIKGKLLDILHKDSSLGLSKEDKAFLWEKRYYCFKHPNCLPKILASAPNWKWVNLAKTYSLLHQWPALYPLIALELLDSKFADQEVRSLAVTWIEAISDDELTDLLPQFVQALKYEIYLNSSLVQFLLSRALGNIQIAHNLYWLLKDALHDVQFSTRYEHVLGALLSVGGKRLREELLKQTKLVQLLGGVAEKVRQASGSARQVVLQRSMERVQSFFQKNKCRLPLKPSLVAKELNIKSCSFFSSNAVPLKVTMVNADPMGEEINVMFKVGEDLRQDMLALQMIKIMDKIWLKEGLDLRMVIFKCLSTGRDRGMVELVPASDTLRKIQVEYGVTGSFKDKPLAEWLRKYNPSEEEYEKASENFIYSCAGCCVATYVLGICDRHNDNIMLRSTGHMFHIDFGKFLGHAQMFGSFKRDRAPFVLTSDMAYVINGGEKPTIRFQLFVDLCCQAYNLIRKQTNLFLNLLSLMIPSGLPELTSIQDLKYVRDALQPQTTDAEATIFFTRLIESSLGSIATKFNFFIHNLAQLRFSGLPSNDEPILSFSPKTYSFRQDGRIKEVSVFTYHKKYNPDKHYIYVVRILREGQIEPSFVFRTFDEFQELHNKLSIIFPLWKLPGFPNRMVLGRTHIKDVAAKRKIELNSYLQSLMNASTDVAECDLVCTFFHPLLRDEKAEGIARSADAGSFSPTPGQIGGAVKLSISYRNGTLFIMVMHIKDLVTEDGADPNPYVKTYLLPDNHKTSKRKTKISRKTRNPTFNEMLVYSGYSKETLRQRELQLSVLSAESLRENFFLGGVTLPLKDFNLSKETVKWYQLTAATYL

SEQ ID NO: 7618 - protein, 130 aa, Homo sapiens
MAQISSNSGFKECPSSHPEPTRAKDVDKEEALQMEAEALAKLQKDRQVTDNQRGFELSSSTRKKAQVYNKQDYDLMVFPESDSQKRALDIDVEKLTQAELEKLLLDDSFETKKTPVLPVTPILSPSFSAQ

SEQ ID NO: 7619 - protein, 483 aa, Homo sapiens
MAQISSNSGFKECPSSHPEPTRAKDVDKEEALQMEAEALAKLQKDRQVTDNQRGFELSSSTRKKAQVYNKQDYDLMVFPESDSQKRALDIDVEKLTQAELEKLLLDDSFETKKTPVLPVTPILSPSFSAQLYFRPTIQRGQWPPGLPGPSTYALPSIYPSTYSKQAAFQNGFNPRMPTFPSTEPIYLSLPGQSPYFSYPLTPATPFHPQGSLPIYRPVVSTDMAKLFDKIASTSEFLKNGKARTDLEITDSKVSNLQVSPKSEDISKFDWLDLDPLSKPKVDNVEVLDHEEEKNVSSLLAKDPWDAVLLEERSTANCHLERKVNGKSLSVATVTRSQSLNIRTTQLAKAQGHISQKDPNGTSSLPTGSSLLQEVEVQNEEMAAFCRSITKLKTKFPYTNHRTNPGYLLSPVTAQRNICGENASVKVSIDIEGFQLPVTFTCDVSSTVEIIIMQALCWVHDDLNQVDVGSYVLKVCGQEEVLQK

SEQ ID NO: 7620 - protein, 1306 aa, Homo sapiens
MAAFCRSITKLKTKFPYTNHRTNPGYLLSPVTAQRNICGENASVKVSIDIEGFQLPVTFTCDVSSTVEIIIMQALCWVHDDLNQVDVGSYVLKVCGQEEVLQNNHCLGSHEHIQNCRKWDTEIRLQLLTFSAMCQNLARTAEDDETPVDLNKHLYQIEKPCKEAMTRHPVEELLDSYHNQVELALQIENQHRAVDQVIKAVRKICSALDGVETLAITESVKKLKRAVNLPRSKTADVTSLFGGEDTSRSSTRGSLNPENPVQVSINQLTAAIYDLLRLHANSGRSPTDCAQSSKSVKEAWTTTEQLQFTIFAAHGISSNWVSNYEKYYLICSLSHNGKDLFKPIQSKKVGTYKNFFYLIKWDELIIFPIQISQLPLESVLHLTLFGILNQSSGSSPDSNKQRKGPEALGKVSLPLFDFKRFLTCGTKLLYLWTSSHTNSVPGTVTKKGYVMERIVLQVDFPSPAFDIIYTTPQVDRSIIQQHNLETLENDIKGKLLDILHKDSSLGLSKEDKAFLWEKRYYCFKHPNCLPKILASAPNWKWVNLAKTYSLLHQWPALYPLIALELLDSKFADQEVRSLAVTWIEAISDDELTDLLPQFVQALKYEIYLNSSLVQFLLSRALGNIQIAHNLYWLLKDALHDVQFSTRYEHVLGALLSVGGKRLREELLKQTKLVQLLGGVAEKVRQASGSARQVVLQRSMERVQSFFQKNKCRLPLKPSLVAKELNIKSCSFFSSNAVPLKVTMVNADPMGEEINVMFKVGEDLRQDMLALQMIKIMDKIWLKEGLDLRMVIFKCLSTGRDRGMVELVPASDTLRKIQVEYGVTGSFKDKPLAEWLRKYNPSEEEYEKASENFIYSCAGCCVATYVLGICDRHNDNIMLRSTGHMFHIDFGKFLGHAQMFGSFKRDRAPFVLTSDMAYVINGGEKPTIRFQLFVDLCCQAYNLIRKQTNLFLNLLSLMIPSGLPELTSIQDLKYVRDALQPQTTDAEATIFFTRLIESSLGSIATKFNFFIHNLAQLRFSGLPSNDEPILSFSPKTYSFRQDGRIKEVSVFTYHKKYNPDKHYIYVVRILREGQIEPSFVFRTFDEFQELHNKLSIIFPLWKLPGFPNRMVLGRTHIKDVAAKRKIELNSYLQSLMNASTDVAECDLVCTFFHPLLRDEKAEGIARSADAGSFSPTPGQIGGAVKLSISYRNGTLFIMVMHIKDLVTEDGADPNPYVKTYLLPDNHKTSKRKTKISRKTRNPTFNEMLVYSGYSKETLRQRELQLSVLSAESLRENFFLGGVTLPLKDFNLSKETVKWYQLTAATYL

SEQ ID NO: 7621 - protein, 648 aa, Homo sapiens
MAQISSNSGFKECPSSHPEPTRAKDVDKEEALQMEAEALAKLQKDRQVTDNQRGFELSSSTRKKAQVYNKQDYDLMVFPESDSQKRALDIDVEKLTQAELEKLLLDDSFETKKTPVLPVTPILSPSFSAQLYFRPTIQRGQWPPGLPGPSTYALPSIYPSTYSKQAAFQNGFNPRMPTFPSTEPIYLSLPGQSPYFSYPLTPATPFHPQGSLPIYRPVVSTDMAKLFDKIASTSEFLKNGKARTDLEITDSKVSNLQVSPKSEDISKFDWLDLDPLSKPKVDNVEVLDHEEEKNVSSLLAKDPWDAVLLEERSTANCHLERKVNGKSLSVATVTRSQSLNIRTTQLAKAQGHISQKDPNGTSSLPTGSSLLQEVEVQNEEMAAFCRSITKLKTKFPYTNHRTNPGYLLSPVTAQRNICGENASVKVSIDIEGFQLPVTFTCDVSSTVEIIIMQALCWVHDDLNQVDVGSYVLKVCGQEEVLQNNHCLGSHEHIQNCRKWDTEIRLQLLTFSAMCQNLARTAEDDETPVDLNKHLYQIEKPCKEAMTRHPVEELLDSYHNQVELALQIENQHRAVDQVIKAVRKICSALDGVETLAITESVKKLKRAVNLPRSKTADVTSLFGGEDTSRSSTRGSLNPENPVQVSINQL

SEQ ID NO: 7622 - protein, 887 aa, Homo sapiens
MGEAEKFHYIYSCDLDINVQLKIGSLEGKREQKSYKAVLEDPMLKFSGLYQETCSDLYVTCQVFAEGKPLALPVRTSYKAFSTRWNWNEWLKLPVKYPDLPRNAQVALTIWDVYGPGKAVPVGGTTVSLFGKYGMFRQGMHDLKVWPNVEADGSEPTKTPGRTSSTLSEDQMSRLAKLTKAHRQGHMVKVDWLDRLTFREIEMINESEKRSSNFMYLMVEFRCVKCDDKEYGIVYYEKDGDESSPILTSFELVKVPDPQMSMENLVESKHHKLARSLRSGPSDHDLKPNAATRDQLNIIVSYPPTKQLTYEEQDLVWKFRYYLTNQEKALTKFLKCVNWDLPQEAKQALELLGKWKPMDVEDSLELLSSHYTNPTVRRYAVARLRQADDEDLLMYLLQLVQALKYENFDDIKNGLEPTKKDSQSSVSENVSNSGINSAEIDSSQIITSPLPSVSSPPPASKTKEVPDGENLEQDLCTFLISRACKNSTLANYLYWYVIVECEDQDTQQRDPKTHEMYLNVMRRFSQALLKGDKSVRVMRSLLAAQQTFVDRLVHLMKAVQRESGNRKKKNERLQALLGDNEKMNLSDVELIPLPLEPQVKIRGIIPETATLFKSALMPAQLFFKTEDGGKYPVIFKHGDDLRQDQLILQIISLMDKLLRKENLDLKLTPYKVLATSTKHGFMQFIQSVPVAEVLDTEGSIQNFFRKYAPSENGPNGISAEVMDTYVKSCAGYCVITYILGVGDRHLDNLLLTKTGKLFHIDFGYILGRDPKPLPPPMKLNKEMVEGMGGTQSEQYQEFRKQCYTAFLHLRRYSNLILNLFSLMVDANIPDIALEPDKTVKKVQDKFRLDLSDEEAVHYMQSLIDESVHALFAAVVEQIHKFAQYWRK

SEQ ID NO: 7623 - protein, 824 aa, Homo sapiens
MGEAEKFHYIYSCDLDINVQLKIWNEWLKLPVKYPDLPRNAQVALTIWDVYGPGKAVPVGGTTVSLFGKYGMFRQGMHDLKVWPNVEADGSEPTKTPGRTSSTLSEDQMSRLAKLTKAHRQGHMVKVDWLDRLTFREIEMINESEKRSSNFMYLMVEFRCVKCDDKEYGIVYYEKDGDESSPILTSFELVKVPDPQMSMENLVESKHHKLARSLRSGPSDHDLKPNAATRDQLNIIVSYPPTKQLTYEEQDLVWKFRYYLTNQEKALTKFLKCVNWDLPQEAKQALELLGKWKPMDVEDSLELLSSHYTNPTVRRYAVARLRQADDEDLLMYLLQLVQALKYENFDDIKNGLEPTKKDSQSSVSENVSNSGINSAEIDSSQIITSPLPSVSSPPPASKTKEVPDGENLEQDLCTFLISRACKNSTLANYLYWYVIVECEDQDTQQRDPKTHEMYLNVMRRFSQALLKGDKSVRVMRSLLAAQQTFVDRLVHLMKAVQRESGNRKKKNERLQALLGDNEKMNLSDVELIPLPLEPQVKIRGIIPETATLFKSALMPAQLFFKTEDGGKYPVIFKHGDDLRQDQLILQIISLMDKLLRKENLDLKLTPYKVLATSTKHGFMQFIQSVPVAEVLDTEGSIQNFFRKYAPSENGPNGISAEVMDTYVKSCAGYCVITYILGVGDRHLDNLLLTKTGKLFHIDFGYILGRDPKPLPPPMKLNKEMVEGMGGTQSEQYQEFRKQCYTAFLHLRRYSNLILNLFSLMVDANIPDIALEPDKTVKKVQDKFRLDLSDEEAVHYMQSLIDESVHALFAAVVEQIHKFAQYWRK

SEQ ID NO: 7624 - protein, 724 aa, Homo sapiens
MSAEGYQYRALYDYKKEREEDIDLHLGDILTVNKGSLVALGFSDGQEARPEEIGWLNGYNETTGERGDFPGTYVEYIGRKKISPPTPKPRPPRPLPVAPGSSKTEADVEQQALTLPDLAEQFAPPDIAPPLLIKLVEAIEKKGLECSTLYRTQSSSNLAELRQLLDCDTPSVDLEMIDVHVLADAFKRYLLDLPNPVIPAAVYSEMISLAPEVQSSEEYIQLLKKLIRSPSIPHQYWLTLQYLLKHFFKLSQTSSKNLLNARVLSEIFSPMLFRFSAASSDNTENLIKVIEILISTEWNERQPAPALPPKPPKPTTVANNGMNNNMSLQDAEWYWGDISREEVNEKLRDTADGTFLVRDASTKMHGDYTLTLRKGGNNKLIKIFHRDGKYGFSDPLTFSSVVELINHYRNESLAQYNPKLDVKLLYPVSKYQQDQVVKEDNIEAVGKKLHEYNTQFQEKSREYDRLYEEYTRTSQEIQMKRTAIEAFNETIKIFEEQCQTQERYSKEYIEKFKREGNEKEIQRIMHNYDKLKSRISEIIDSRRRLEEDLKKQAAEYREIDKRMNSIKPDLIQLRKTRDQYLMWLTQKGVRQKKLNEWLGNENTEDQYSLVEDDEDLPHHDEKTWNVGSSNRNKAENLLRGKRDGTFLVRESSKQGCYACSVVVDGEVKHCVINKTATGYGFAEPYNLYSSLKELVLHYQHTSLVQHNDSLNVTLAYPVYAQQRR

SEQ ID NO: 7625 - protein, 424 aa, Homo sapiens
MHNLQTLPPKPPKPTTVANNGMNNNMSLQDAEWYWGDISREEVNEKLRDTADGTFLVRDASTKMHGDYTLTLRKGGNNKLIKIFHRDGKYGFSDPLTFSSVVELINHYRNESLAQYNPKLDVKLLYPVSKYQQDQVVKEDNIEAVGKKLHEYNTQFQEKSREYDRLYEEYTRTSQEIQMKRTAIEAFNETIKIFEEQCQTQERYSKEYIEKFKREGNEKEIQRIMHNYDKLKSRISEIIDSRRRLEEDLKKQAAEYREIDKRMNSIKPDLIQLRKTRDQYLMWLTQKGVRQKKLNEWLGNENTEDQYSLVEDDEDLPHHDEKTWNVGSSNRNKAENLLRGKRDGTFLVRESSKQGCYACSVVVDGEVKHCVINKTATGYGFAEPYNLYSSLKELVLHYQHTSLVQHNDSLNVTLAYPVYAQQRR

SEQ ID NO: 7626 - protein, 454 aa, Homo sapiens
MYNTVWNMEDLDLEYAKTDINCGTDLMFYIEMDPPALPPKPPKPTTVANNGMNNNMSLQDAEWYWGDISREEVNEKLRDTADGTFLVRDASTKMHGDYTLTLRKGGNNKLIKIFHRDGKYGFSDPLTFSSVVELINHYRNESLAQYNPKLDVKLLYPVSKYQQDQVVKEDNIEAVGKKLHEYNTQFQEKSREYDRLYEEYTRTSQEIQMKRTAIEAFNETIKIFEEQCQTQERYSKEYIEKFKREGNEKEIQRIMHNYDKLKSRISEIIDSRRRLEEDLKKQAAEYREIDKRMNSIKPDLIQLRKTRDQYLMWLTQKGVRQKKLNEWLGNENTEDQYSLVEDDEDLPHHDEKTWNVGSSNRNKAENLLRGKRDGTFLVRESSKQGCYACSVVVDGEVKHCVINKTATGYGFAEPYNLYSSLKELVLHYQHTSLVQHNDSLNVTLAYPVYAQQRR

SEQ ID NO: 7627 - protein, 732 aa, Homo sapiens
MSAEGYQYRALYDYKKEREEDIDLHLGDILTVNKGSLVALGFSDGQEARPEEIGWLNGYNETTGERGDFPGTYVEYIGRKKISPPTPKPRPPRPLPVAPGSSKTEADVEQQALTLPDLAEQFAPPDIAPPLLIKLVEAIEKKGLECSTLYRTQSSSNLAELRQLLDCDTPSVDLEMIDVHVLADAFKRYLLDLPNPVIPAAVYSEMISLAPEVQSSEEYIQLLKKLIRSPSIPHQYWLTLQYLLKHFFKLSQTSSKNLLNARVLSEIFSPMLFRFSAASSDNTENLIKVIEILISTEWNERQPAPALPPKPPKPTTVANNGMNNNMSLQDAEWYWGDISREEVNEKLRDTADGTFLVRDASTKMHGDYTLTLRKGGNNKLIKIFHRDGKYGFSDPLTFSSVVELINHYRNESLAQYNPKLDVKLLYPVSKYQQDQVVKEDNIEAVGKKLHEYNTQFQEKSREYDRLYEEYTRTSQEIQMKRTAIEAFNETIKIFEEQCQTQERYSKEYIEKFKREGNEKEIQRIMHNYDKLKSRISEIIDSRRRLEEDLKKQAAEYREIDKRMNSIKPDLIQLRKTRDQYLMWLTQKGVRQKKLNEWLGNENTEENFLSCLPSQYSLVEDDEDLPHHDEKTWNVGSSNRNKAENLLRGKRDGTFLVRESSKQGCYACSVVVDGEVKHCVINKTATGYGFAEPYNLYSSLKELVLHYQHTSLVQHNDSLNVTLAYPVYAQQRR

SEQ ID NO: 7628 - protein, 724 aa, Homo sapiens; identical to SEQ ID NO: 7624

SEQ ID NO: 7629 - protein, 137 aa, Homo sapiens
MHGDYTLTLRKGGNNKLIKIFHRDGKYGFSDPLTFSSVVELINHYRNESLAQYNPKLDVKLLYPVSKYQQDQVVKEDNIEAVGKKLHEYNTQFQEKSREYDRLYEEYTRTSQEIQMKRTAIEAFNETIKIFEEQCQT

SEQ ID NO: 7630 - protein, 724 aa, Homo sapiens; identical to SEQ ID NO: 7624

SEQ ID NO: 7631 - protein, 728 aa, Homo sapiens
MAGPEGFQYRALYPFRRERPEDLELLPGDVLVVSRAALQALGVAEGGERCPQSVGWMPGLNERTRQRGDFPGTYVEFLGPVALARPGPRPRGPRPLPARPRDGAPEPGLTLPDLPEQFSPPDVAPPLLVKLVEAIERTGLDSESHYRPELPAPRTDWSLSDVDQWDTAALADGIKSFLLALPAPLVTPEASAEARRALREAAGPVGPALEPPTLPLHRALTLRFLLQHLGRVASRAPALGPAVRALGATFGPLLLRAPPPPSSPPPGGAPDGSEPSPDFPALLVEKLLQEHLEEQEVAPPALPPKPPKAKPASTVLANGGSPPSLQDAEWYWGDISREEVNEKLRDTPDGTFLVRDASSKIQGEYTLTLRKGGNNKLIKVFHRDGHYGFSEPLTFCSVVDLINHYRHESLAQYNAKLDTRLLYPVSKYQQDQIVKEDSVEAVGAQLKVYHQQYQDKSREYDQLYEEYTRTSQELQMKRTAIEAFNETIKIFEEQGQTQEKCSKEYLERFRREGNEKEMQRILLNSERLKSRIAEIHESRTKLEQQLRAQASDNREIDKRMNSLKPDLMQLRKIRDQYLVWLTQKGARQKKINEWLGIKNETEDQYALMEDEDDLPHHEERTWYVGKINRTQAEEMLSGKRDGTFLIRESSQRGCYACSVVVDGDTKHCVIYRTATGFGFAEPYNLYGSLKELVLHYQHASLVQHNDALTVTLAHPVRAPGPGPPPAAR

SEQ ID NO: 7632 - protein, 461 aa, Homo sapiens
MYNTVWSMDRDDADWREVMMPYSTELIFYIEMDPPALPPKPPKPMTSAVPNGMKDSSVSLQDAEWYWGDISREEVNDKLRDMPDGTFLVRDASTKMQGDYTLTLRKGGNNKLIKIYHRDGKYGFSDPLTFNSVVELINHYHHESLAQYNPKLDVKLMYPVSRYQQDQLVKEDNIDAVGKKLQEYHSQYQEKSKEYDRLYEEYTRTSQEIQMKRTAIEAFNETIKIFEEQCHTQEQHSKEYIERFRREGNEKEIERIMMNYDKLKSRLGEIHDSKMRLEQDLKNQALDNREIDKKMNSIKPDLIQLRKIRDQHLVWLNHKGVRQKRLNVWLGIKNEDADENYFINEEDENLPHYDEKTWFVEDINRVQAEDLLYGKPDGAFLIRESSKKGCYACSVVADGEVKHCVIYSTARGYGFAEPYNLYSSLKELVLHYQQTSLVQHNDSLNVRLAYPVHAQMPSLCR

SEQ ID NO: 7633 - protein, 366 aa, Homo sapiens
MYNTVWSMDRDDADWREVMMPYSTELIFYIEMDPPAAEVNDKLRDMPDGTFLVRDASTKMQGDYTLTLRKGGNNKLIKIYHRDGKYGFSDPLTFNSVVELINHYHHESLAQYNPKLDVKLMYPVSRYQQDQLVKEDNIDAVGKKLQEYHSQYQEKSKEYDRLYEEYTRTSQEIQMKRTAIEAFNETIKIFEEQCHTQEQHSKEYIERFRREGNEKEIERWLNHKGVRQKRLNVWLGIKNEDADENYFINEEDENLPHYDEKTWFVEDINRVQAEDLLYGKPDGAFLIRESSKKGCYACSVVADGEVKHCVIYSTARGYGFAEPYNLYSSLKELVLHYQQTSLVQHNDSLNVRLAYPVHAQMPSLCR

SEQ ID NO: 7634 - protein, 402 aa, Homo sapiens
MYNTVWSMDRDDADWREVMMPYSTELIFYIEMDPPALPPKPPKPMTSAVPNGMKDSSVSLQDAEWYWGDISREEVNDKLRDMPDGTFLVRDASTKMQGDYTLTLRKGGNNKLIKIYHRDGKYGFSDPLTFNSVVELINHYHHESLAQYNPKLDVKLMYPVSRYQQDQLVKEDNIDAVGKKLQEYHSQYQEKSKEYDRLYEEYTRTSQEIQMKRTAIEAFNETIKIFEEQCHTQEQHSKEYIERFRREGNEKEIERWLNHKGVRQKRLNVWLGIKNEDADENYFINEEDENLPHYDEKTWFVEDINRVQAEDLLYGKPDGAFLIRESSKKGCYACSVVADGEVKHCVIYSTARGYGFAEPYNLYSSLKELVLHYQQTSLVQHNDSLNVRLAYPVHAQMPSLCR

SEQ ID NO: 7635 - protein, 461 aa, Homo sapiens; identical to SEQ ID NO: 7632

SEQ ID NO: 7636 - protein, 461 aa, Homo sapiens; identical to SEQ ID NO: 7632

SEQ ID NO: 7637 - protein, 402 aa, Homo sapiens; identical to SEQ ID NO: 7634

SEQ ID NO: 7638 - protein, 206 aa, Homo sapiens
MYNTVWSMDRDDADWREVMMPYSTELIFYIEMDPPALPPKPPKPMTSAVPNGMKDSSVSLQDAEWYWGDISREEVNDKLRDMPDGTFLVRDASTKMQGDYTLTLRKGGNNKLIKIYHRDGKYGFSDPLTFNSVVELINHYHHESLAQYNPKLDVKLMYPVSRYQQDQLVKEDNIDAVGKKLQEYHSQYQEKSKEYDRLYEEYTRTS

SEQ ID NO: 7639 - protein, 507 aa, Homo sapiens
MGPSRLVRGPRPQGMRSPYRRPGMGWPRPRFPRMFKCSRRRYQQGLRGRTASSAAINPATRAMGINNTHTDTTIVWIFPPQALPPKPPKPMTSAVPNGMKDSSVSLQDAEWYWGDISREEVNDKLRDMPDGTFLVRDASTKMQGDYTLTLRKGGNNKLIKIYHRDGKYGFSDPLTFNSVVELINHYHHESLAQYNPKLDVKLMYPVSRYQQDQLVKEDNIDAVGKKLQEYHSQYQEKSKEYDRLYEEYTRTSQEIQMKRTAIEAFNETIKIFEEQCHTQEQHSKEYIERFRREGNEKEIERIMMNYDKLKSRLGEIHDSKMRLEQDLKNQALDNREIDKKMNSIKPDLIQLRKIRDQHLVWLNHKGVRQKRLNVWLGIKNEDADENYFINEEDENLPHYDEKTWFVEDINRVQAEDLLYGKPDGAFLIRESSKKGCYACSVVADGEVKHCVIYSTARGYGFAEPYNLYSSLKELVLHYQQTSLVQHNDSLNVRLAYPVHAQMPSLCR

SEQ ID NO: 7640 - protein, 880 aa, Homo sapiens
MQPGATTCTEDRIQHALERCLHGLSLSRRSTSWSAGLCLNCWSLQELVSRDPGHFLILLEQILQKTREVQEKGTYDLLTPLALLFYSTVLCTPHFPPDSDLLLKAASTYHRFLTWPVPYCSICQELLTFIDAELKAPGISYQRLVRAEQGLPIRSHRSSTVTVLLLNPVEVQAEFLAVANKLSTPGHSPHSAYTTLLLHAFQATFGAHCDVPGLHCRLQAKTLAELEDIFTETAEAQELASGIGDAAEARRWLRTKLQAVGEKAGFPGVLDTAKPGKLHTIPIPVARCYTYSWSQDSFDILQEILLKEQELLQPGILGDDEEEEEEEEEVEEDLETDGHCAERDSLLSTSSLASHDSTLSLASSQASGPALSRHLLTSFVSGLSDGMDSGYVEDSEESSSEWPWRRGSQERRGHRRPGQKFIRIYKLFKSTSQLVLRRDSRSLEGSSDTALPLRRAGSLCSPLDEPVSPPSRAQRSRSLPQPKLGTQLPSWLLAPASRPQRRRPFLSGDEDPKASTLRVVVFGSDRISGKVARAYSNLRRLENNRPLLTRFFKLQFFYVPVKRSHGTSPGACPPPRSQTPSPPTDSPRHASPGELGTTPWEESTNDISHYLGMLDPWYERNVLGLMHLPPEVLCQQSLKAEAQALEGSPTQLPILADMLLYYCRFAARPVLLQVYQTELTFITGEKTTEIFIHSLELGHSAATRAIKASGPGSKRLGIDGDREAVPLTLQIIYSKGAISGRSRWSNLEKVCTSVNLNKACRKQEELDSSMEALTLNLTEVVKRQNSKSKKGFNQISTSQIKVDKVQIIGSNSCPFAVCLDQDERKILQSVVRCEVSPCYKPEKSDLSSPPQTPPDLPAQAAPDLCSLLCLPIMTFSGALP

SEQ ID NO: 7641 - protein, 880 aa, Homo sapiens; identical to SEQ ID NO: 7640

SEQ ID NO: 7642 - protein, 148 aa, Homo sapiens
MKLLVLAVLLTVAAADSGISPRAVWQFRKMIKCVIPGSDPFLEYNNYGCYCGLGGSGTPVDELDKCCQTHDNCYDQAKKLDSCKFLLDNPYTHTYSYSCSGSAITCSSKNKECEAFICNCDRNAAICFSKAPYNKAHKNLDTKKYCQS

SEQ ID NO: 7643 - protein, 144 aa, Homo sapiens
MKTLLLLAVIMIFGLLQAHGNLVNFHRMIKLTTGKEAALSYGFYGCHCGVGGRGSPKDATDRCCVTHDCCYKRLEKRGCGTKFLSYKFSNSGSRITCAKQDSCRSQLCECDKAAATCFARNKTTYNKKYQYYSNKHCRGSTPRC

SEQ ID NO: 7644 - protein, 144 aa, Homo sapiens; identical to SEQ ID NO: 7643

SEQ ID NO: 7645 - protein, 145 aa, Homo sapiens
MELALLCGLVVMAGVIPIQGGILNLNKMVKQVTGKMPILSYWPYGCHCGLGGRGQPKDATDWCCQTHDCCYDHLKTQGCSIYKDYYRYNFSQGNIHCSDKGSWCEQQLCACDKEVAFCLKRNLDTYQKRLRFYWRPHCRGQTPGC

SEQ ID NO: 7646 - protein, 142 aa, Homo sapiens
MKSPHVLVFLCLLVALVTGNLVQFGVMIEKMTGKSALQYNDYGCYCGIGGSHWPVDQTDWCCHAHDCCYGRLEKLGCEPKLEKYLFSVSERGIFCAGRTTCQRLTCECDKRAALCFRRNLGTYNRKYAHYPNKLCTGPTPPC

SEQ ID NO: 7647 - protein, 211 aa, Homo sapiens
MADGAKANPKGFKKKVLDRCFSGWRGPRFGASCPSRTSRSSLGMKKFFTVAILAGSVLSTAHGSLLNLKAMVEAVTGRSAILSFVGYGCYCGLGGRGQPKDEVDWCCHAHDCCYQELFDQGCHPYVDHYDHTIENNTEIVCSDLNKTECDKQTCMCDKNMVLCLMNQTYREEYRGFLNVYCQGPTPNCSIYEPPPEEVTCSHQSPAPPAPP

SEQ ID NO: 7648 - protein, 509 aa, Homo sapiens
MGVQAGLFGMLGFLGVALGGSPALRWYRTSCHLTKAVPGNPLGYLSFLAKDAQGLALIHARWDAHRRLQSCSWEDEPELTAAYGALCAHETAWGSFIHTPGPELQRALATLQSQWEACRALEESPAGARKKRAAGQSGVPGGGHQREKRGWTMPGTLWCGVGDSAGNSSELGVFQGPDLCCREHDRCPQNISPLQYNYGIRNYRFHTISHCDCDTRFQQCLQNQHDSISDIVGVAFFNVLEIPCFVLEEQEACVAWYWWGGCRMYGTVPLARLQPRTFYNASWSSRATSPTPSSRSPAPPKPRQKQHLRKGPPHQKGSKRPSKANTTALQDPMVSPRLDVAPTGLQGPQGGLKPQGARWVCRSFRRHLDQCEHQIGPREIEFQLLNSAQEPLFHCNCTRRLARFLRLHSPPEVTNMLWELLGTTCFKLAPPLDCVEGKNCSRDPRAIRVSARHLRRLQQRRHQLQDKGTDERQPWPSEPLRGPMSFYNQCLQLTQAARRPDRQQKSWSQ

SEQ ID NO: 7649 - protein, 749 aa, Homo sapiens
MSFIDPYQHIIVEHQYSHKFTVVVLRATKVTKGAFGDMLDTPDPYVELFISTTPDSRKRTRHFNNDINPVWNETFEFILDPNQENVLEITLMDANYVMDETLGTATFTVSSMKVGEKKEVPFIFNQVTEMVLEMSLEVCSCPDLRFSMALCDQEKTFRQQRKEHIRESMKKLLGPKNSEGLHSARDVPVVAILGSGGGFRAMVGFSGVMKALYESGILDCATYVAGLSGSTWYMSTLYSHPDFPEKGPEEINEELMKNVSHNPLLLLTPQKVKRYVESLWKKKSSGQPVTFTDIFGMLIGETLIHNRMNTTLSSLKEKVNTAQCPLPLFTCLHVKPDVSELMFADWVEFSPYEIGMAKYGTFMAPDLFGSKFFMGTVVKKYEENPLHFLMGVWGSAFSILFNRVLGVSGSQSRGSTMEEELENITTKHIVSNDSSDSDDESHEPKGTENEDAGSDYQSDNQASWIHRMIMALVSDSALFNTREGRAGKVHNFMLGLNLNTSYPLSPLSDFATQDSFDDDELDAAVADPDEFERIYEPLDVKSKKIHVVDSGLTFNLPYPLILRPQRGVDLIISFDFSARPSDSSPPFKELLLAEKWAKMNKLPFPKIDPYVFDREGLKECYVFKPKNPDMEKDCPTIIHFVLANINFRKYRAPGVPRETEEEKEIADFDIFDDPESPFSTFNFQYPNQAFKRLHDLMHFNTLNNIDVIKEAMVESIEYRRQNPSRCSVSLSNVEARRFFNKEFLSKPKA

SEQ ID NO: 7650 - protein, 49 aa, Homo sapiens [sequence omitted]

SEQ ID NO: 7651 - protein, 689 aa, Homo sapiens
MSFIDPYQHIIVEHQYSHKFTVVVLRATKVTKGAFGDMLDTPDPYVELFISTTPDSRKRTRHFNNDINPVWNETFEFILDPNQENVLEITLMDANYVMDETLGTATFTVSSMKVGEKKEVPFIFNQVPVVAILGSGGGFRAMVGFSGVMKALYESGILDCATYVAGLSGSTWYMSTLYSHPDFPEKGPEEINEELMKNVSHNPLLLLTPQKVKRYVESLWKKKSSGQPVTFTDIFGMLIGETLIHNRMNTTLSSLKEKVNTAQCPLPLFTCLHVKPDVSELMFADWVEFSPYEIGMAKYGTFMAPDLFGSKFFMGTVVKKYEENPLHFLMGVWGSAFSILFNRVLGVSGSQSRGSTMEEELENITTKHIVSNDSSDSDDESHEPKGTENEDAGSDYQSDNQASWIHRMIMALVSDSALFNTREGRAGKVHNFMLGLNLNTSYPLSPLSDFATQDSFDDDELDAAVADPDEFERIYEPLDVKSKKIHVVDSGLTFNLPYPLILRPQRGVDLIISFDFSARPSDSSPPFKELLLAEKWAKMNKLPFPKIDPYVFDREGLKECYVFKPKNPDMEKDCPTIIHFVLANINFRKYRAPGVPRETEEEKEIADFDIFDDPESPFSTFNFQYPNQAFKRLHDLMHFNTLNNIDVIKEAMVESIEYRRQNPSRCSVSLSNVEARRFFNKEFLSKPKA

SEQ ID NO: 7652 - protein, 781 aa, Homo sapiens
MAVAEVSRTCLLTVRVLQAHRLPSKDLVTPSDCYVTLWLPTACSHRLQTRTVKNSSSPVWNQSFHFRIHRQLKNVMELKVFDQDLVTGDDPVLSVLFDAGTLRAGEFRRESFSLSPQGEGRLEVEFRLQSLADRGEWLVSNGVLVARELSCLHVQLEETGDQKSSEHRVQLVVPGSCEGPQEASVGTGTFRFHCPACWEQELSIRLQDAPEEQLKAPLSALPSGQVVRLVFPTSQEPLMRVELKKEAGLRELAVRLGFGPCAEEQAFLSRRKQVVAAALRQALQLDGDLQEDEIPVVAIMATGGGIRAMTSLYGQLAGLKELGLLDCVSYITGASGSTWALANLYEDPEWSQKDLAGPTELLKTQVTKNKLGVLAPSQLQRYRQELAERARLGYPSCFTNLWALINEALLHDEPHDHKLSDQREALSHGQNPLPIYCALNTKGQSLTTFEFGEWCEFSPYEVGFPKYGAFIPSELFGSEFFMGQLMKRLPESRICFLEGIWSNLYAANLQDSLYWASEPSQFWDRWVRNQANLDKEQVPLLKIEEPPSTAGRIAEFFTDLLTWRPLAQATHNFLRGLHFHKDYFQHPHFSTWKATTLDGLPNQLTPSEPHLCLLDVGYLINTSCLPLLQPTRDVDLILSLDYNLHGAFQQLQLLGRFCQEQGIPFPPISPSPEEQLQPRECHTFSDPTCPGAPAVLHFPLVSDSFREYSAPGVRRTPEEAAAGEVNLSSSDSPYHYTKVTYSQEDVDKLLHLTHYNVCNNQEQLLEALRQAVQRRRQRRPH

SEQ ID NO: 7653 - protein, 138 aa, Homo sapiens
MKGLLPLAWFLACSVPAVQGGLLDLKSMIEKVTGKNALTNYGFYGCYCGWGGRGTPKDGTDWCCWAHDHCYGRLEEKGCNIRTQSYKYRFAWGVVTCEPGPFCHVNLCACDRKLVYCLKRNLRSYNPQYQYFPNILCS

SEQ ID NO: 7654 - protein, 806 aa, Homo sapiens
MQFFGRLVNTFSGVTNLFSNPFRVKEVAVADYTSSDRVREEGQLILFQNTPNRTWDCVLVNPRNSQSGFRLFQLELEADALVNFHQYSSQLLPFYESSPQVLHTEVLQHLTDLIRNHPSWSVAHLAVELGIRECFHHSRIISCANCAENEEGCTPLHLACRKGDGEILVELVQYCHTQMDVTDYKGETVFHYAVQGDNSQVLQLLGRNAVAGLNQVNNQGLTPLHLACQLGKQEMVRVLLLCNARCNIMGPNGYPIHSAMKFSQKGCAEMIISMDSSQIHSKDPRYGASPLHWAKNAEMARMLLKRGCNVNSTSSAGNTALHVAVMRNRFDCAIVLLTHGANADARGEHGNTPLHLAMSKDNVEMIKALIVFGAEVDTPNDFGETPTFLASKIGRLVTRKAILTLLRTVGAEYCFPPIHGVPAEQGSAAPHHPFSLERAQPPPISLNNLELQDLMHISRARKPAFILGSMRDEKRTHDHLLCLDGGGVKGLIIIQLLIAIEKASGVATKDLFDWVAGTSTGGILALAILHSKSMAYMRGMYFRMKDEVFRGSRPYESGPLEEFLKREFGEHTKMTDVRKPKVMLTGTLSDRQPAELHLFRNYDAPETVREPRFNQNVNLRPPAQPSDQLVWRAARSSGAAPTYFRPNGRFLDGGLLANNPTLDAMTEIHEYNQDLIRKGQANKVKKLSIVVSLGTGRSPQVPVTCVDVFRPSNPWELAKTVFGAKELGKMVVDCCTDPDGRAVDRARAWCEMVGIQYFRLNPQLGTDIMLDEVSDTVLVNALWETEVYIYEHREEFQKLIQLLLSP

SEQ ID NO: 7655 - protein, 427 aa, Homo sapiens
MQFFGRLVNTFSGVTNLFSNPFRVKEVAVADYTSSDRVREEGQLILFQNTPNRTWDCVLVNPRNSQSGFRCANCAENEEGCTPLHLACRKGDGEILVELVQYCHTQMDVTDYKGETVFHYAVQGDNSQVLQLLGRNAVAGLNQVNNQGLTPLHLACQLGKQEMVRVLLLCNARCNIMGPNGYPIHSAMKFSQKGCAEMIISMDSSQIHSKDPRYGASPLHWAKNAEMARMLLKRGCNVNSTSSAGNTALHVAVMRNRFDCAIVLLTHGANADARGEHGNTPLHLAMSKDNVEMIKALIVFGAEVDTPNDFGETPTFLASKIGRLVTRKAILTLLRTVGAEYCFPPIHGVPAEQGSAAPHHPFSLERAQPPPISLNNLGSHPSQAGWWAWGAASDGTTGSHAHLTGPEASVHPGLHEGREADRQNMES

SEQ ID NO: 7656 - protein, 752 aa, Homo sapiens
MQFFGRLVNTFSGVTNLFSNPFRVKEVAVADYTSSDRVREEGQLILFQNTPNRTWDCVLVNPRNSQSGFRLFQLELEADALVNFHQYSSQLLPFYESSPQVLHTEVLQHLTDLIRNHPSWSVAHLAVELGIRECFHHSRIISCANCAENEEGCTPLHLACRKGDGEILVELVQYCHTQMDVTDYKGETVFHYAVQGDNSQVLQLLGRNAVAGLNQVNNQGLTPLHLACQLGKQEMVRVLLLCNARCNIMGPNGYPIHSAMKFSQKGCAEMIISMDSSQIHSKDPRYGASPLHWAKNAEMARMLLKRGCNVNSTSSAGNTALHVAVMRNRFDCAIVLLTHGANADARGEHGNTPLHLAMSKDNVEMIKALIVFGAEVDTPNDFGETPTFLASKIGRQLQDLMHISRARKPAFILGSMRDEKRTHDHLLCLDGGGVKGLIIIQLLIAIEKASGVATKDLFDWVAGTSTGGILALAILHSKSMAYMRGMYFRMKDEVFRGSRPYESGPLEEFLKREFGEHTKMTDVRKPKVMLTGTLSDRQPAELHLFRNYDAPETVREPRFNQNVNLRPPAQPSDQLVWRAARSSGAAPTYFRPNGRFLDGGLLANNPTLDAMTEIHEYNQDLIRKGQANKVKKLSIVVSLGTGRSPQVPVTCVDVFRPSNPWELAKTVFGAKELGKMVVDCCTDPDGRAVDRARAWCEMVGIQYFRLNPQLGTDIMLDEVSDTVLVNALWETEVYIYEHREEFQKLIQLLLSP

SEQ ID NO: 7657 - protein, 479 aa, Homo sapiens
MQFFGRLVNTFSGVTNLFSNPFRVKEVAVADYTSSDRVREEGQLILFQNTPNRTWDCVLVNPRNSQSGFRLFQLELEADALVNFHQYSSQLLPFYESSPQVLHTEVLQHLTDLIRNHPSWSVAHLAVELGIRECFHHSRIISCANCAENEEGCTPLHLACRKGDGEILVELVQYCHTQMDVTDYKGETVFHYAVQGDNSQVLQLLGRNAVAGLNQVNNQGLTPLHLACQLGKQEMVRVLLLCNARCNIMGPNGYPIHSAMKFSQKGCAEMIISMDSSQIHSKDPRYGASPLHWAKNAEMARMLLKRGCNVNSTSSAGNTALHVAVMRNRFDCAIVLLTHGANADARGEHGNTPLHLAMSKDNVEMIKALIVFGAEVDTPNDFGETPTFLASKIGRLVTRKAILTLLRTVGAEYCFPPIHGVPAEQGSAAPHHPFSLERAQPPPISLNNLELQDLMHISRARKPAFILGSMRDEKRTDRT

SEQ ID NO: 7658 - protein, 752 aa, Homo sapiens; identical to SEQ ID NO: 7656

SEQ ID NO: 7659 - protein, 667 aa, Homo sapiens
MQFFGRLVNTFSGVTNLFSNPFRVKEVAVADYTSSDRVREEGQLILFQNTPNRTWDCVLVNPRNSQSGFRLFQLELEADALVNFHQYSSQLGKQEMVRVLLLCNARCNIMGPNGYPIHSAMKFSQKGCAEMIISMDSSQIHSKDPRYGASPLHWAKNAEMARMLLKRGCNVNSTSSAGNTALHVAVMRNRFDCAIVLLTHGANADARGEHGNTPLHLAMSKDNVEMIKALIVFGAEVDTPNDFGETPTFLASKIGRLVTRKAILTLLRTVGAEYCFPPIHGVPAEQGSAAPHHPFSLERAQPPPISLNNLELQDLMHISRARKPAFILGSMRDEKRTHDHLLCLDGGGVKGLIIIQLLIAIEKASGVATKDLFDWVAGTSTGGILALAILHSKSMAYMRGMYFRMKDEVFRGSRPYESGPLEEFLKREFGEHTKMTDVRKPKVMLTGTLSDRQPAELHLFRNYDAPETVREPRFNQNVNLRPPAQPSDQLVWRAARSSGAAPTYFRPNGRFLDGGLLANNPTLDAMTEIHEYNQDLIRKGQANKVKKLSIVVSLGTGRSPQVPVTCVDVFRPSNPWELAKTVFGAKELGKMVVDCCTDPDGRAVDRARAWCEMVGIQYFRLNPQLGTDIMLDEVSDTVLVNALWETEVYIYEHREEFQKLIQLLLSP

SEQ ID NO: 7660 - protein, 166 aa, Homo sapiens
MQFFGRLVNTFSGVTNLFSNPFRVKEVAVADYTSSDRVREEGQLILFQNTPNRTWDCVLVNPRNSQSGFRCANCAENEEGCTPLHLACRKGDGEILVELVQYCHTQMDVTDYKGETVFHYAVQGDNSQVLQLLGRNAVAGLNQVNNQGLTPLHLACQLGKQEMVRV

SEQ ID NO: 7661 - protein, 432 aa, Homo sapiens
MQFFGRLVNTFSGVTNLFSNPFRVKEVAVADYTSSDRVREEGQLILFQNTPNRTWDCVLVNPRNSQSGFRLFQLELEADALVNFHQYSSQLLPFYESSPQVLHTEVLQHLTDLIRNHPSWSVAHLAVELGIRECFHHSRIIRVRSAHQVPGLWELISTHHEIEFSQPPQAVPIARRTRRAAHPCTWPAARVMGRSWWSWCSTATLRWMSPTTRERPSSIMLSRVTILRCCRCAEMIISMDSSQIHSKDPRYGASPLHWAKNAEMARMLLKRGCNVNSTSSAGNTALHVAVMRNRFDCAIVLLTHGANADARGEHGNTPLHLAMSKDNVEMIKALIVFGAEVDTPNDFGETPTFLASKIGRLVTRKAILTLLRTVGAEYCFPPIHGVPAEQGSAAPHHPFSLERAQPPPISLNNLGSHPSQAGWWAWGAASDG

SEQ ID NO: 7662 - protein, 80 aa, Homo sapiens
MQFFGRLVNTFSGVTNLFSNPFRVKEVAVADYTSSDRVREEGQLILFQNTPNRTWDCVLVNPRNSQSGFRLFQLELEADA

SEQ ID NO: 7663 - protein, 165 aa, Homo sapiens
MGPLPVCLPIMLLLLLPSLLLLLLLPGPGSGEASRILRVHRRGILELAGTVGCVGPRTPIAYMKYGCFCGLGGHGQPRDAIDWCCHGHDCCYTRAEEAGCSPKTERYSWQCVNQSVLCGPAENKCQELLCKCDQEIANCLAQTEYNLKYLFYPQFLCEPDSPKCD

SEQ ID NO: 7664 - protein, 165 aa, Homo sapiens; identical to SEQ ID NO: 7663

SEQ ID NO: 7665 - protein, 189 aa, Homo sapiens
MALLSRPALTLLLLLMAAVVRCQEQAQTTDWRATLKTIRNGVHKIDTYLNAALDLLGGEDGLCQYKCSDGSKPFPRYGYKPSPPNGCGSPLFGVHLNIGIPSLTKCCNQHDRCYETCGKSKNDCDEEFQYCLSKICRDVQKTLGLTQHVQACETTVELLFDSVIHLGCKPYLDSQRAACRCHYEEKTDL

SEQ ID NO: 7666 - protein, 70 aa, Homo sapiens
MALLSRPALTLLLLLMAAVVRCQEQAQTTDWRATLKTIRNGVHKIDTYLNAALDLLGGEDGLCQYKCSDA

SEQ ID NO: 7667 - protein, 195 aa, Homo sapiens
MKLASGFLVLWLSLGGGLAQSDTSPDTEESYSDWGLRHLRGSFESVNSYFDSFLELLGGKNGVCQYRCRYGKAPMPRPGYKPQEPNGCGSYFLGLKVPESMDLGIPAMTKCCNQLDVCYDTCGANKYRCDAKFRWCLHSICSDLKRSLGFVSKVEAACDSLVDTVFNTVWTLGCRPFMNSQRAACICAEEEKEEL

SEQ ID NO: 7668 - protein, 1291 aa, Homo sapiens
MAGAASPCANGCGPGAPSDAEVLHLCRSLEVGTVMTLFYSKKSQRPERKTFQVKLETRQITWSRGADKIEGAIDIREIKEIRPGKTSRDFDRYQEDPAFRPDQSHCFVILYGMEFRLKTLSLQATSEDEVNMWIKGLTWLMEDTLQAPTPLQIERWLRKQFYSVDRNREDRISAKDLKNMLSQVNYRVPNMRFLRERLTDLEQRSGDITYGQFAQLYRSLMYSAQKTMDLPFLEASTLRAGERPELCRVSLPEFQQFLLDYQGELWAVDRLQVQEFMLSFLRDPLREIEEPYFFLDEFVTFLFSKENSVWNSQLDAVCPDTMNNPLSHYWISSSHNTYLTGDQFSSESSLEAYARCLRMGCRCIELDCWDGPDGMPVIYHGHTLTTKIKFSDVLHTIKEHAFVASEYPVILSIEDHCSIAQQRNMAQYFKKVLGDTLLTKPVEISADGLPSPNQLKRKILIKHKKLAEGSAYEEVPTSMMYSENDISNSIKNGILYLEDPVNHEWYPHYFVLTSSKIYYSEETSSDQGNEDEEEPKEVSSSTELHSNEKWFHGKLGAGRDGRHIAERLLTEYCIETGAPDGSFLVRESETFVGDYTLSFWRNGKVQHCRIHSRQDAGTPKFFLTDNLVFDSLYDLITHYQQVPLRCNEFEMRLSEPVPQTNAHESKEWYHASLTRAQAEHMLMRVPRDGAFLVRKRNEPNSYAISFRAEGKIKHCRVQQEGQTVMLGNSEFDSLVDLISYYEKHPLYRKMKLRYPINEEALEKIGTAEPDYGALYEGRNPGFYVEANPMPTFKCAVKALFDYKAQREDELTFIKSAIIQNVEKQEGGWWRGDYGGKKQLWFPSNYVEEMVNPVALEPEREHLDENSPLGDLLRGVLDVPACQIAIRPEGKNNRLFVFSISMASVAHWSLDVAADSQEELQDWVKKIREVAQTADARLTEGKIMERRKKIALELSELVVYCRPVPFDEEKIGTERACYRDMSSFPETKAEKYVNKAKGKKFLQYNRLQLSRIYPKGQRLDSSNYDPLPMWICGSQLVALNFQTPDKPMQMNQALFMTGRHCGYVLQPSTMRDEAFDPFDKSSLRGLEPCAISIEVLGARHLPKNGRGIVCPFVEIEVAGAEYDSTKQKTEFVVDNGLNPVWPAKPFHFQISNPEFAFLRFVVYEEDMFSDQNFLAQATFPVKGLKTGYRAVPLKNNYSEDLELASLLIKIDIFPAKQENGDLSPFSGTSLRERGSDASGQLFHGRAREGSFESRYQQPFEDFRISQEHLADHFDSRERRAPRRTRVNGDNRL

SEQ ID NO: 7669 - protein, 1290 aa, Homo sapiens
MAGAASPCANGCGPGAPSDAEVLHLCRSLEVGTVMTLFYSKKSQRPERKTFQVKLETRQITWSRGADKIEGAIDIREIKEIRPGKTSRDFDRYQEDPAFRPDQSHCFVILYGMEFRLKTLSLQATSEDEVNMWIKGLTWLMEDTLQAPTPLQIERWLRKQFYSVDRNREDRISAKDLKNMLSQVNYRVPNMRFLRERLTDLEQRSGDITYGQFAQLYRSLMYSAQKTMDLPFLEASTLRAGERPELCRVSLPEFQQFLLDYQGELWAVDRLQVQEFMLSFLRDPLREIEEPYFFLDEFVTFLFSKENSVWNSQLDAVCPDTMNNPLSHYWISSSHNTYLTGDQFSSESSLEAYARCLRMGCRCIELDCWDGPDGMPVIYHGHTLTTKIKFSDVLHTIKEHAFVASEYPVILSIEDHCSIAQQRNMAQYFKKVLGDTLLTKPVEISADGLPSPNQLKRKILIKHKKLAEGSAYEEVPTSMMYSENDISNSIKNGILYLEDPVNHEWYPHYFVLTSSKIYYSEETSSDQGNEDEEEPKEVSSSTELHSNEKWFHGKLGAGRDGRHIAERLLTEYCIETGAPDGSFLVRESETFVGDYTLSFWRNGKVQHCRIHSRQDAGTPKFFLTDNLVFDSLYDLITHYQQVPLRCNEFEMRLSEPVPQTNAHESKEWYHASLTRAQAEHMLMRVPRDGAFLVRKRNEPNSYAISFRAEGKIKHCRVQQEGQTVMLGNSEFDSLVDLISYYEKHPLYRKMKLRYPINEEALEKIGTAEPDYGALYEGRNPGFYVEANPMPTFKCAVKALFDYKAQREDELTFIKSAIIQNVEKQEGGWWRGDYGGKKQLWFPSNYVEEMVNPVALEPEREHLDENSPLGDLLRGVLDVPACQIAIRPEGKNNRLFVFSISMASVAHWSLDVAADSQEELQDWVKKIREVAQTADARLTEGKIMERRKKIALELSELVVYCRPVPFDEEKIGTERACYRDMSSFPETKAEKYVNKAKGKKFLQYNRLQLSRIYPKGQRLDSSNYDPLPMWICGSQLVALNFQTPDKPMQMNQALFMTGRHCGYVLQPSTMRDEAFDPFDKSSLRGLEPCAISIEVLGARHLPKNGRGIVCPFVEIEVAGAEYDSTKQKTEFVVDNGLNPVWPAKPFHFQISNPEFAFLRFVVYEEDMFSDQNFLAQATFPVKGLKTGYRAVPLKNNYSEDLELASLLIKIDIFPAKENGDLSPFSGTSLRERGSDASGQLFHGRAREGSFESRYQQPFEDFRISQEHLADHFDSRERRAPRRTRVNGDNRL

SEQ ID NO: 7670 - protein, 1291 aa, Homo sapiens; identical to SEQ ID NO: 7668

SEQ ID NO: 7671 - protein, 1265 aa, Homo sapiens
MSTTVNVDSLAEYEKSQIKRALELGTVMTVFSFRKSTPERRTVQVIMETRQVAWSKTADKIEGFLDIMEIKEIRPGKNSKDFERAKAVRQKEDCCFTILYGTQFVLSTLSLAADSKEDAVNWLSGLKILHQEAMNASTPTIIESWLRKQIYSVDQTRRNSISLRELKTILPLINFKVSSAKFLKDKFVEIGAHKDELSFEQFHLFYKKLMFEQQKSILDEFKKDSSVFILGNTDRPDASAVYLHDFQRFLIHEQQEHWAQDLNKVRERMTKFIDDTMRETAEPFLFVDEFLTYLFSRENSIWDEKYDAVDMQDMNNPLSHYWISSSHNTYLTGDQLRSESSPEAYIRCLRMGCRCIELDCWDGPDGKPVIYHGWTRTTKIKFDDVVQAIKDHAFVTSSFPVILSIEEHCSVEQQRHMAKAFKEVFGDLLLTKPTEASADQLPSPSQLREKIIIKHKKLGPRGDVDVNMEDKKDEHKQQGELYMWDSIDQKWTRHYCAIADAKLSFSDDIEQTMEEEVPQDIPPTELHFGEKWFHKKVEKRTSAEKLLQEYCMETGGKDGTFLVRESETFPNDYTLSFWRSGRVQHCRIRSTMEGGTLKYYLTDNLTFSSIYALIQHYRETHLRCAEFELRLTDPVPNPNPHESKPWYYDSLSRGEAEDMLMRIPRDGAFLIRKREGSDSYAITFRARGKVKHCRINRDGRHFVLGTSAYFESLVELVSYYEKHSLYRKMRLRYPVTPELLERYNMERDINSLYDVSRMYVDPSEINPSMPQRTVKALYDYKAKRSDELSFCRGALIHNVSKEPGGWWKGDYGTRIQQYFPSNYVEDISTADFEELEKQIIEDNPLGSLCRGILDLNTYNVVKAPQGKNQKSFVFILEPKQQGDPPVEFATDRVEELFEWFQSIREITWKIDTKENNMKYWEKNQSIAIELSDLVVYCKPTSKTKDNLENPDFREIRSFVETKADSIIRQKPVDLLKYNQKGLTRVYPKGQRVDSSNYDPFRLWLCGSQMVALNFQTADKYMQMNHALFSLNGRTGYVLQPESMRTEKYDPMPPESQRKILMTLTVKVLGARHLPKLGRSIACPFVEVEICGAEYDNNKFKTTVVNDNGLSPIWAPTQEKVTFEIYDPNLAFLRFVVYEEDMFSDPNFLAHATYPIKAVKSGFRSVPLKNGYSEDIELASLLVFCEMRPVLESEEELYSSCRQLRRRQEELNNQLFLYDTHQNLRNANRDALVKEFSVNENQLQLYQEKCNKRLREKRVSNSKFYS

SEQ ID NO: 7672 - protein, 971 aa, Homo sapiens
MSLKNEPRVNTSALQKIAADMSNIIENLDTRELHFEGEEVDYDVSPSDPKIQEVYIPFSAIYNTQGFKEPNIQTYLSGCPIKAQVLEVERFTSTTRVPSINLYTIELTHGEFKWQVKRKFKHFQEFHRELLKYKAFIRIPIPTRRHTFRRQNVREEPREMPSLPRSSENMIREEQFLGRRKQLEDYLTKILKMPMYRNYHATTEFLDISQLSFIHDLGPKGIEGMIMKRSGGHRIPGLNCCGQGRACYRWSKRWLIVKDSFLLYMKPDSGAIAFVLLVDKEFKIKVGKKETETKYGIRIDNLSRTLILKCNSYRHARWWGGAIEEFIQKHGTNFLKDHRFGSYAAIQENALAKWYVNAKGYFEDVANAMEEANEEIFITDWWLSPEIFLKRPVVEGNRWRLDCILKRKAQQGVRIFIMLYKEVELALGINSEYTKRTLMRLHPNIKVMRHPDHVSSTVYLWAHHEKLVIIDQSVAFVGGIDLAYGRWDDNEHRLTDVGSVKRVTSGPSLGSLPPAAMESMESLRLKDKNEPVQNLPIQKSIDDVDSKLKGIGKPRKFSKFSLYKQLHRHHLHDADSISSIDSTSSYFNHYRSHHNLIHGLKPHFKLFHPSSESEQGLTRPHADTGSIRSLQTGVGELHGETRFWHGKDYCNFVFKDWVQLDKPFADFIDRYSTPRMPWHDIASAVHGKAARDVARHFIQRWNFTKIMKSKYRSLSYPFLLPKSQTTAHELRYQVPGSVHANVQLLRSAADWSAGIKYHEESIHAAYVHVIENSRHYIYIENQFFISCADDKVVFNKIGDAIAQRILKAHRENQKYRVYVVIPLLPGFEGDISTGGGNALQAIMHFNYRTMCRGENSILGQLKAELGNQWINYISFCGLRTHAELEGNLVTELIYVHSKLLIADDNTVIIGSANINDRSMLGKRDSEMAVIVQDTETVPSVMDGKEYQAGRFARGLRLQCFRSKMTPGVEDP

SEQ ID NO: 7673 - protein, 597 aa, Homo sapiens
MSLKNEPRVNTSALQKIAADMSNIIENLDTRELHFEGEEVDYDVSPSDPKIQEVYIPFSAIYNTQGFKEPNIQTYLSGCPIKAQVLEVERFTSTTRVPSINLYTIELTHGEFKWQVKRKFKHFQEFHRELLKYKAFIRIPIPTRRHTFRRQNVREEPREMPSLPRSSENMIREEQFLGRRKQLEDYLTKILKMPMYRNYHATTEFLDISQLSFIHDLGPKGIEGMIMKRSGGHRIPGLNCCGQGRACYRWSKRWLIVKDSFLLYMKPDSGAIAFVLLVDKEFKIKVGKKETETKYGIRIDNLSRTLILKCNSYRHARWWGGAIEEFIQKHGTNFLKDHRFGSYAAIQENALAKWYVNAKGYFEDVANAMEEANEEIFITDWWLSPEIFLKRPVVEGNRWRLDCILKRKAQQGVRIFIMLYKEVELALGINSEYTKRTLMRLHPNIKVMRHPDHVSSTVYLWAHHEKLVIIDQSVAFVGGIDLAYGRWDDNEHRLTDVGSVKRVTSGPSLGSLPIPGPSVVYRQVWESCMGKPDSGMERTTAISSSKTGFNLINLLLISLTGTPRPGCPGMTLPLQSTGRRLVMWHVTSSSAGTSQKL

SEQ ID NO: 7674 - protein, 1074 aa, Homo sapiens
MSLKNEPRVNTSALQKIAADMSNIIENLDTRELHFEGEEVDYDVSPSDPKIQEVYIPFSAIYNTQGFKEPNIQTYLSGCPIKAQVLEVERFTSTTRVPSINLYTIELTHGEFKWQVKRKFKHFQEFHRELLKYKAFIRIPIPTRRHTFRRQNVREEPREMPSLPRSSENMIREEQFLGRRKQLEDYLTKILKMPMYRNYHATTEFLDISQLSFIHDLGPKGIEGMIMKRSGGHRIPGLNCCGQGRACYRWSKRWLIVKDSFLLYMKPDSGAIAFVLLVDKEFKIKVGKKETETKYGIRIDNLSRTLILKCNSYRHARWWGGAIEEFIQKHGTNFLKDHRFGSYAAIQENALAKWYVNAKGYFEDVANAMEEANEEIFITDWWLSPEIFLKRPVVEGNRWRLDCILKRKAQQGVRIFIMLYKEVELALGINSEYTKRTLMRLHPNIKVMRHPDHVSSTVYLWAHHEKLVIIDQSVAFVGGIDLAYGRWDDNEHRLTDVGSVKRVTSGPSLGSLPPAAMESMESLRLKDKNEPVQNLPIQKSIDDVDSKLKGIGKPRKFSKFSLYKQLHRHHLHDADSISSIDSTSSYFNHYRSHHNLIHGLKPHFKLFHPSSESEQGLTRPHADTGSIRSLQTGVGELHGETRFWHGKDYCNFVFKDWVQLDKPFADFIDRYSTPRMPWHDIASAVHGKAARDVARHFIQRWNFTKIMKSKYRSLSYPFLLPKSQTTAHELRYQVPGSVHANVQLLRSAADWSAGIKYHEESIHAAYVHVIENSRHYIYIENQFFISCADDKVVFNKIGDAIAQRILKAHRENQKYRVYVVIPLLPGFEGDISTGGGNALQAIMHFNYRTMCRGENSILGQLKAELGNQWINYISFCGLRTHAELEGNLVTELIYVHSKLLIADDNTVIIGSANINDRSMLGKRDSEMAVIVQDTETVPSVMDGKEYQAGRFARGLRLQCFRVVLGYLDDPSEDIQDPVSDKFFKEVWVSTAARNATIYDKVFRCLPNDEVHNLIQLRDFINKPVLAKEDPIRAEEELKKIRGFLVQFPFYFLSEESLLPSVGTKEAIVPMEVWT

SEQ ID NO: 7675 - protein, 1036 aa, Homo sapiens
MSLKNEPRVNTSALQKIAADMSNIIENLDTRELHFEGEEVDYDVSPSDPKIQEVYIPFSAIYNTQGFKEPNIQTYLSGCPIKAQVLEVERFTSTTRVPSINLYTIELTHGEFKWQVKRKFKHFQEFHRELLKYKAFIRIPIPTRRHTFRRQNVREEPREMPSLPRSSENMIREEQFLGRRKQLEDYLTKILKMPMYRNYHATTEFLDISQLSFIHDLGPKGIEGMIMKRSGGHRIPGLNCCGQGRACYRWSKRWLIVKDSFLLYMKPDSGAIAFVLLVDKEFKIKVGKKETETKYGIRIDNLSRTLILKCNSYRHARWWGGAIEEFIQKHGTNFLKDHRFGSYAAIQENALAKWYVNAKGYFEDVANAMEEANEEIFITDWWLSPEIFLKRPVVEGNRWRLDCILKRKAQQGVRIFIMLYKEVELALGINSEYTKRTLMRLHPNIKVMRHPDHVSSTVYLWAHHEKLVIIDQSVAFVGGIDLAYGRWDDNEHRLTDVGSVKRVTSGPSLGSLPPAAMESMESLRLKDKNEPVQNLPIQKSIDDVDSKLKGIGKPRKFSKFSLYKQLHRHHLHDADSISSIDSTSNTGSIRSLQTGVGELHGETRFWHGKDYCNFVFKDWVQLDKPFADFIDRYSTPRMPWHDIASAVHGKAARDVARHFIQRWNFTKIMKSKYRSLSYPFLLPKSQTTAHELRYQVPGSVHANVQLLRSAADWSAGIKYHEESIHAAYVHVIENSRHYIYIENQFFISCADDKVVFNKIGDAIAQRILKAHRENQKYRVYVVIPLLPGFEGDISTGGGNALQAIMHFNYRTMCRGENSILGQLKAELGNQWINYISFCGLRTHAELEGNLVTELIYVHSKLLIADDNTVIIGSANINDRSMLGKRDSEMAVIVQDTETVPSVMDGKEYQAGRFARGLRLQCFRVVLGYLDDPSEDIQDPVSDKFFKEVWVSTAARNATIYDKVFRCLPNDEVHNLIQLRDFINKPVLAKEDPIRAEEELKKIRGFLVQFPFYFLSEESLLPSVGTKEAIVPMEVWT

SEQ ID NO: 7676 - protein, 142 aa, Homo sapiens
MSLKNEPRVNTSALQKIAADMSNIIENLDTRELHFEGEEVDYDVSPSDPKIQEVYIPFSAIYNTQGFKEPNIQTYLSGCPIKAQVLEVERFTSTTRVPSINLYTIELTHGEFKWQVKRKFKHFQEFHRELLKYKAFIRIPIP

SEQ ID NO: 7677 - protein, 432 aa, Homo sapiens
MGPAGSLLGSGQMQITLWGSLAAVAIFFVITFLIFLCSSCDREKKPRQHSGDHENLMNVPSDKEMFSRSVTSLATDAPASSEQNGALTNGDILSEDSTLTCMQHYEEVQTSASDLLDSQDSTGKPKCHQSRELPRIPPESAVDTMLTARSVDGDQGLGMEGPYEVLKDSSSQENMVEDCLYETVKEIKEVAAAAHLEKGHSGKAKSTSASKELPGPQTEGKAEFAEYASVDRNKKCRQSVNVESILGNSCDPEEEAPPPVPVKLLDENENLQEKEGGEAEESATDTTSETNKRFSSLSYKSREEDPTLTEEEISAMYSSVNKPGQLVNKSGQSLTVPESTYTSIQGDPQRSPSSCNDLYATVKDFEKTPNSTLPPAGRPSEEPEPDYEAIQTLNREEEKATLGTNGHHGLVPKENDYESISDLQQGRDITRL

SEQ ID NO: 7678 - protein, 641 aa, Homo sapiens
MLSGIEAAAGEYEDSELRCRVAVEELSPGGQPRRRQALRTAELSLGRNERRELMLRLQAPGPAGRPRCFPLRAARLFTRFAEAGRSTLRLPAHDTPGAGAVQLLLSDCPPDRLRRFLRTLRLKLAAAPGPGPASARAQLLGPRPRDFVTISPVQPEERRLRAATRVPDTTLVKRPVEPQAGAEPSTEAPRWPLPVKRLSLPSTKPQLSEEQAAVLRAVLKGQSIFFTGSAGTGKSYLLKRILGSLPPTGTVATASTGVAACHIGGTTLHAFAGIGSGQAPLAQCVALAQRPGVRQGWLNCQRLVIDEISMVEADLFDKLEAVARAVRQQNKPFGGIQLIICGDFLQLPPVTKGSQPPRFCFQSKSWKRCVPVTLELTKVWRQADQTFISLLQAVRLGRCSDEVTRQLQATASHKVGRDGIVATRLCTHQDDVALTNERRLQELPGKVHRFEAMDSNPELASTLDAQCPVSQLLQLKLGAQVMLVKNLSVSRGLVNGARGVVVGFEAEGRGLPQVRFLCGVTEVIHADRWTVQATGGQLLSRQQLPLQLAWAMSIHKSQGMTLDCVEISLGRVFASGQAYVALSRARSLQGLRVLDFDPMAVRCDPRVLHFYATLRRGRSLSLESPDDDEAASDQENMDPIL

SEQ ID NO: 7679 - protein, 707 aa, Homo sapiens
MLSGIEAAAGEYEDSELRCRVAVEELSPGGQPRRRQALRTAELSLGRNERRELMLRLQAPGPAGRPRCFPLRAARLFTRFAEAGRSTLRLPAHDTPGAGAVQLLLSDCPPDRLRRFLRTLRLKLAAAPGPGPASARAQLLGPRPRDFVTISPVQPEERRLRAATRVPDTTLVKRPVEPQAGAEPSTEAPRWPLPVKRLSLPSTKPQLSEEQAAVLRAVLKGQSIFFTGSAGTGKSYLLKRILGSLPPTGTVATASTGVAACHIGGTTLHAFAGIGSGQAPLAQCVALAQRPGVRQGWLNCQRLVIDEISMVEADLFDKLEAVARAVRQQNKPFGGIQLIICGDFLQLPPVTKGSQPPRFCFQSKSWKRCVPVTLELTKVWRQADQTFISLLQAVRLGRCSDEVTRQLQATASHKVGRDGIVATRLCTHQDDVALTNERRLQELPGKVHRFEAMDSNPELASTLDAQCPVSQLLQLKLGAQVMLVKNLSVSRGLVNGARGVVVGFEAEGRGLPQVRFLCGVTEVIHADRWTVQATGGQLLSRQQLPLQLAWAMSIHKSQGMTLDCVEISLGRVFASGQAYVALSRARSLQGLRVLDFDPMAVRCDPRVLHFYATLRRGRSLSLAAEGRGNEDRCSGSSIRALGGDWWGLRLGAASKQRTELRCVSTARPSLAQPRTNTLQSLTKEHKLQNVHPYFKLLFQGINSVWGH

SEQ ID NO: 7680 - protein, 641 aa, Homo sapiens; identical to SEQ ID NO: 7678

SEQ ID NO: 7681 - protein, 266 aa, Homo sapiens
MLSGIEAAAGEYEDSELRCRVAVEELSPGGQPRRRQALRTAELSLGRNERRELMLRLQAPGPAGRPRCFPLRAARLFTRFAEAGRSTLRLPAHDTPGAGAVQLLLSDCPPDRLRRFLRTLRLKLAAAPGPGPASARAQLLGPRPRDFVTISPVQPEERRLRAATRVPDTTLVKRPVEPQAGAEPSTEAPRWPLPVKRLSLPSTKPQLSEEQAAVLRAVLKGQSIFFTGSAGSGGREEVGGQWWGGIEEQGDLSNFAPVQEQGSHIC

SEQ ID NO: 7682 - protein, 328 aa, Homo sapiens
MSMLAERRRKQKWAVDPQNTAWSNDDSKFGQRMLEKMGWSKGKGLGAQEQGATDHIKVQVKNNHLGLGATINNEDNWIAHQDDFNQLLAELNTCHGQETTDSSDKKEKKSFSLEEKSKISKNRVHYMKFTKGKDLSSRSKTDLDCIFGKRQSKKTPEGDASPSTPEENETTTTSAFTIQEYFAKRMAALKNKPQVPVPGSDISETQVERKRGKKRNKEATGKDVESYLQPKAKRHTEGKPERAEAQERVAKKKSAPAEEQLRGPCWDQSSKASAQDAGDHVQPPEGRDFTLKPKKRRGKKKLQKPVEIAEDATLEETLVKKKKKKDSK

SEQ ID NO: 7683 - protein, 172 aa, Homo sapiens
MLAERRRKQKWAVDPQNTAWSNDDSKFGQRMLEKMGWSKGKGLGAQEQGATDHIKVQVKNNHLGLGATINNEDNWIAHQDDFNQLLAELNTCHGQETTDSSDKKEKKSFSLEEKSKISKNRVHYMKFTKGRCQSLHSRGERNHDNQRLHHPGVLCQADGSTEEQAPGSSSRV

SEQ ID NO: 7684 - protein, 174 aa, Homo sapiens
MSMLAERRRKQKWAVDPQNTAWSNDDSKFGQRMLEKMGWSKGKGLGAQEQGATDHIKVQVKNNHLGLGATINNEDNWIAHQDDFNQLLAELNTCHGQETTDSSDKKEKKSFSLEEKSKISKNRVHYMKFTKGRCQSLHSRGERNHDNQRLHHPGVLCQADGSTEEQAPGSSSRV

SEQ ID NO: 7685 - protein, 717 aa, Homo sapiens
MAVAVRTLQEQLEKAKESLKNVDENIRKLTGRDPNDVRPIQARLLALSGPGGGRGRGSLLLRRGFSDSGGGPPAKQRDLEGAVSRLGGERRTRRESRQESDPEDDDVKKPALQSSVVATSKERTRRDLIQDQNMDEKGKQRNRRIFGLLMGTLQKFKQESTVATERQKRRQEIEQKLEVQAEEERKQVENERRELFEERRAKQTELRLLEQKVELAQLQEEWNEHNAKIIKYIRTKTKPHLFYIPGRMCPATQKLIEESQRKMNALFEGRRIEFAEQINKMEARPRRQSMKEKEHQVVRNEEQKAEQEEGKVAQREEELEETGNQHNDVEIEEAGEEEEKEIAIVHSDAEKEQEEEEQKQEMEVKMEEETEVRESEKQQDSQPEEVMDVLEMVENVKHVIADQEVMETNRVESVEPSENEASKELEPEMEFEIEPDKECKTLSPGKENVSALDMEKESEEKEEKESEPQPEPVAQPQPQSQPQLQLQSQSQPVLQSQPPSQPEDLSLAVLQPTPQVTQEQGHLLPERKDFPVESVKLTEVPVEPVLTVHPESKSKTKTRSRSRGRARNKTSKSRSRSSSSSSSSSSSTSSSSGSSSSSGSSSSRSSSSSSSSTSGSSSRDSSSSTSSSSESRSRSRGRGHNRDRKHRRSVDRKRRDTSGLERSHKSSKGGSSRDTKGSKDKNSRSDRKRSISESSRSGKRSSRSERDRKSDRKDKRR

SEQ ID NO: 7686 - protein, 221 aa, Homo sapiens
MPVMRLFPCFLQLLAGLALPAVPPQQWALSAGNGSSEVEVVPFQEVWGRSYCRALERLVDVVSEYPSEVEHMFSPSCVSLLRCTGCCGDENLHCVPVETANVTMQLLKIRSGDRPSYVELTFSQHVRCECRHSPGRQSPDMPGDFRADAPSFLPPRRSLPMLFRMEWGCALTGSQSAVWPSSPVPEEIPRMHPGRNGKKQQRKPLREKMKPERCGDAVPRR

SEQ ID NO: 7687 - protein, 149 aa, Homo sapiens
MPVMRLFPCFLQLLAGLALPAVPPQQWALSAGNGSSEVEVVPFQEVWGRSYCRALERLVDVVSEYPSEVEHMFSPSCVSLLRCTGCCGDENLHCVPVETANVTMQLLKIRSGDRPSYVELTFSQHVRCECRPLREKMKPERCGDAVPRR

SEQ ID NO: 7688 - protein, 170 aa, Homo sapiens
MPVMRLFPCFLQLLAGLALPAVPPQQWALSAGNGSSEVEVVPFQEVWGRSYCRALERLVDVVSEYPSEVEHMFSPSCVSLLRCTGCCGDENLHCVPVETANVTMQLLKIRSGDRPSYVELTFSQHVRCECRPLREKMKPERRRPKGRGKRRREKQRPTDCHLCGDAVPRR

SEQ ID NO: 7689 - protein, 158 aa, Homo sapiens
MALEVLMLLAVLIWTGAENLHVKISCSLDWLMVSVIPVAESRNLYIFADELHLGMGCPANRIHTYVYEFIYLVRDCGIRTRVVSEETLLFQTELYFTPRNIDHDPQEIHLECSTSRKSVWLTPVSTENEIKLDPSPFIADFQTTAEELGLLSSSPNLL

SEQ ID NO: 7690 - protein, 395 aa, Homo sapiens
MRALLARLLLCVLVVSDSKGSNELHQVPYKSKTCYEGNGHFYRGKASTDTMGRPCLPWNSATVLQQTYHAHRSDALQLGLGKHNYCRNPDNRRRPWCYVQVGLKLLVQECMVHDCADGKKPSSPPEELKFQCGQKTLRPRFKIIGGEFTTIENQPWFAAIYRRHRGGSVTYVCGGSLISPCWVISATHCFIDYPKKEDYIVYLGRSRLNSNTQGEMKFEVENLILHKDYSADTLAHHNDIALLKIRSKEGRCAQPSRTIQTICLPSMYNDPQFGTSCEITGFGKENSTDYLYPEQLKMTVVKLISHRECQQPHYYGSEVTTKMLCAADPQWKTDSCQGDSGGPLVCSLQGRMTLTGIVSWGRGCALKDKPGVYTRVSHFLPWIRSHTKEENGLAL

SEQ ID NO: 7691 - protein, 395 aa, Homo sapiens; identical to SEQ ID NO: 7690

SEQ ID NO: 7692 - protein, 431 aa, Homo sapiens
MRALLARLLLCVLVVSDSKGSNELHQVPSNCDCLNGGTCVSNKYFSNIHWCNCPKKFGGQHCEIDKSKTCYEGNGHFYRGKASTDTMGRPCLPWNSATVLQQTYHAHRSDALQLGLGKHNYCRNPDNRRRPWCYVQVGLKLLVQECMVHDCADGKKPSSPPEELKFQCGQKTLRPRFKIIGGEFTTIENQPWFAAIYRRHRGGSVTYVCGGSLISPCWVISATHCFIDYPKKEDYIVYLGRSRLNSNTQGEMKFEVENLILHKDYSADTLAHHNDIALLKIRSKEGRCAQPSRTIQTICLPSMYNDPQFGTSCEITGFGKENSTDYLYPEQLKMTVVKLISHRECQQPHYYGSEVTTKMLCAADPQWKTDSCQGDSGGPLVCSLQGRMTLTGIVSWGRGCALKDKPGVYTRVSHFLPWIRSHTKEENGLAL

SEQ ID NO: 7693 - protein, 414 aa, Homo sapiens
MVFHLRTRYEQANCDCLNGGTCVSNKYFSNIHWCNCPKKFGGQHCEIDKSKTCYEGNGHFYRGKASTDTMGRPCLPWNSATVLQQTYHAHRSDALQLGLGKHNYCRNPDNRRRPWCYVQVGLKLLVQECMVHDCADGKKPSSPPEELKFQCGQKTLRPRFKIIGGEFTTIENQPWFAAIYRRHRGGSVTYVCGGSLISPCWVISATHCFIDYPKKEDYIVYLGRSRLNSNTQGEMKFEVENLILHKDYSADTLAHHNDIALLKIRSKEGRCAQPSRTIQTICLPSMYNDPQFGTSCEITGFGKENSTDYLYPEQLKMTVVKLISHRECQQPHYYGSEVTTKMLCAADPQWKTDSCQGDSGGPLVCSLQGRMTLTGIVSWGRGCALKDKPGVYTRVSHFLPWIRSHTKEENGLAL

SEQ ID NO: 7694 - protein, 290 aa, Homo sapiens
MGHPPLLPLLLLLHTCVPASWGLRCMQCKTNGDCRVEECALGQDLCRTTIVRLWEEGEELELVEKSCTHSEKTNRTLSYRTGLKITSLTEVVCGLDLCNQGNSGRAVTYSRSRYLECISCGSSDMSCERGRHQSLQCRSPEEQCLDVVTHWIQEGEEVLELENLPQNGRQCYSCKGNSTHGCSSEETFLIDCRGPMNQCLVATGTHEPKNQSYMVRGCATASMCQHAHLGDAFSMNHIDVSCCTKSGCNHPDLDVQYRSGAAPQPGPAHLSLTITLLMTARLWGGTLLWT

SEQ ID NO: 7695 - protein, 281 aa, Homo sapiens
MGHPPLLPLLLLLHTCVPASWGLRCMQCKTNGDCRVEECALGQDLCRTTIVRLWEEGEELELVEKSCTHSEKTNRTLSYRTGLKITSLTEVVCGLDLCNQGNSGRAVTYSRSRYLECISCGSSDMSCERGRHQSLQCRSPEEQCLDVVTHWIQEGEEGRPKDDRHLRGCGYLPGCPGSNGFHNNDTFHFLKCCNTTKCNEGPILELENLPQNGRQCYSCKGNSTHGCSSEETFLIDCRGPMNQCLVATGTHERSLWGSWLPCKSTTALRPPCCEEAQATHV

SEQ ID NO: 7696 - protein, 335 aa, Homo sapiens
MGHPPLLPLLLLLHTCVPASWGLRCMQCKTNGDCRVEECALGQDLCRTTIVRLWEEGEELELVEKSCTHSEKTNRTLSYRTGLKITSLTEVVCGLDLCNQGNSGRAVTYSRSRYLECISCGSSDMSCERGRHQSLQCRSPEEQCLDVVTHWIQEGEEGRPKDDRHLRGCGYLPGCPGSNGFHNNDTFHFLKCCNTTKCNEGPILELENLPQNGRQCYSCKGNSTHGCSSEETFLIDCRGPMNQCLVATGTHEPKNQSYMVRGCATASMCQHAHLGDAFSMNHIDVSCCTKSGCNHPDLDVQYRSGAAPQPGPAHLSLTITLLMTARLWGGTLLWT

SEQ ID NO: 7697 - protein, 345 aa, Homo sapiens
MSLFGLLLLTSALAGQRQGTQAESNLSSKFQFSSNKEQNGVQDPQHERIITVSTNGSIHSPRFPHTYPRNTVLVWRLVAVEENVWIQLTFDERFGLEDPEDDICKYDFVEVEEPSDGTILGRWCGSGTVPGKQISKGNQIRIRFVSDEYFPSEPGFCIHYNIVMPQFTEAVSPSVLPPSALPLDLLNNAITAFSTLEDLIRYLEPERWQLDLEDLYRPTWQLLGKAFVFGRKSRVVDLNLLTEEVRLYSCTPRNFSVSIREELKRTDTIFWPGCLLVKRCGGNCACCLHNCNECQCVPSKVTKKYHEVLQLRPKTGVRGLHKSLTDVALEHHEECDCVCRGSTGG

SEQ ID NO: 7698 - protein, 182 aa, Homo sapiens
MPQFTEAVSPSVLPPSALPLDLLNNAITAFSTLEDLIRYLEPERWQLDLEDLYRPTWQLLGKAFVFGRKSRVVDLNLLTEEVRLYSCTPRNFSVSIREELKRTDTIFWPGCLLVKRCGGNCACCLHNCNECQCVPSKVTKKYHEVLQLRPKTGVRGLHKSLTDVALEHHEECDCVCRGSTGG

SEQ ID NO: 7699 - protein, 190 aa, Homo sapiens
MMQYTWLLTKQFTEAVSPSVLPPSALPLDLLNNAITAFSTLEDLIRYLEPERWQLDLEDLYRPTWQLLGKAFVFGRKSRVVDLNLLTEEVRLYSCTPRNFSVSIREELKRTDTIFWPGCLLVKRCGGNCACCLHNCNECQCVPSKVTKKYHEVLQLRPKTGVRGLHKSLTDVALEHHEECDCVCRGSTGG

SEQ ID NO: 7700 - protein, 167 aa, Homo sapiens
MSLFGLLLLTSALAGQRQGTQAESNLSSKFQFSSNKEQNGVQDPQHERIITVSTNGSIHSPRFPHTYPRNTVLVWRLVAVEENVWIQLTFDERFGLEDPEDDICKYDFVEVEEPSDGTILGRWCGSGTVPGKQISKGNQIRIRFVSDEYFPSEPSNRGGKIIQLHTS

SEQ ID NO: 7701 - protein, 184 aa, Homo sapiens [sequence omitted]

SEQ ID NO: 7702 - protein, 738 aa, Homo sapiens
MQPRWAQGATMWLGVLLTLLLCSSLEGQENSFTINSVDMKSLPDWTVQNGKNLTLQCFADVSTTSHVKPQHQMLFYKDDVLFYNISSMKSTESYFIPEVRIYDSGTYKCTVIVNNKEKTTAEYQVLVEGVPSPRVTLDKKEAIQGGIVRVNCSVPEEKAPIHFTIEKLELNEKMVKLKREKNSRDQNFVILEFPVEEQDRVLSFRCQARIISGIHMQTSESTKSELVTVTESFSTPKFHISPTGMIMEGAQLHIKCTIQVTHLAQEFPEIIIQKDKAIVAHNRHGNKAVYSVMAMVEHSGNYTCKVESSRISKVSSIVVNITELFSKPELESSFTHLDQGERLNLSCSIPGAPPANFTIQKEDTIVSQTQDFTKIASKSDSGTYICTAGIDKVVKKSNTVQIVVCEMLSQPRISYDAQFEVIKGQTIEVRCESISGTLPISYQLLKTSKVLENSTKNSNDPAVFKDNPTEDVEYQCVADNCHSHAKMLSEVLRVKVIAPVDEVQISILSSKVVESGEDIVLQCAVNEGSGPITYKFYREKEGKPFYQMTSNATQAFWTKQKASKEQEGEYYCTAFNRANHASSVPRSKILTVRVILAPWKKGLIAVVIIGVIIALLIIAAKCYFLRKAKAKQMPVEMSRPAVPLLNSNNEKMSDPNMEANSHYGHNDDVRNHAMKPINDNKEPLNSDVQYTEVQVSSAESHKDLGKKDTETVYSEVRKAVPDAVESRYSRTEGSLDGT

SEQ ID NO: 7703 - protein, 230 aa, Homo sapiens
MQPRWAQGATMWLGVLLTLLLCSSLEGQENSFTINSVDMKSLPDWTVQNGKNLTLQCFADVSTTSHVKPQHQMLFYKDDVLFYNISSMKSTESYFIPEVRIYDSGTYKCTVIVNNKEKTTAEYQVLVEGVPSPRVTLDKKEAIQGGIVRVNCSVPEEKAPIHFTIEKLELNEKMVKLKREKNSRDQNFVILEFPVEEQDRVLSFRCQARIISGIHMQTSESTKSELVTVT

SEQ ID NO: 7704 - protein, 135 aa, Homo sapiens
MQPRWAQGATMWLGVLLTLLLCSSLEGQENSFTINSVDMKSLPDWTVQNGKNLTLQCFADVSTTSHVKPQHQMLFYKDDVLFYNISSMKSTESYFIPEVRIYDSGTYKCTVIVNNKEKTTAEYQVLVEGVPSPRV

SEQ ID NO: 7705 - protein, 211 aa, Homo sapiens [sequence omitted]

SEQ ID NO: 7706 - protein, 196 aa, Homo sapiens
MRTLACLLLLGCGYLAHVLAEEAEIPREVIERLARSQIHSIRDLQRLLEIDSVGSEDSLDTSLRAHGVHATKHVPEKRPLPIRRKRSIEEAVPAVCKTRTVIYEIPRSQVDPTSANFLIWPPCVEVKRCTGCCNTSSVKCQPSRVHHRSVKVAKVEYVRKKPKLKEVQVRLEEHLECACATTSLNPDYREEDTDVR

SEQ ID NO: 7707 - protein, 53 aa, Homo sapiens
MRTLACLLLLGCGYLAHVLAEEAEIPREVIERLARSQIHSIRDLQRLLEIDSV

SEQ ID NO: 7708 - protein, 1089 aa, Homo sapiens
MGTSHPAFLVLGCLLTGLSLILCQLSLPSILPNENEKVVQLNSSFSLRCFGESEVSWQYPMSEEESSDVEIRNEENNSGLFVTVLEVSSASAAHTGLYTCYYNHTQTEENELEGRHIYIYVPDPDVAFVPLGMTDYLVIVEDDDSAIIPCRTTDPETPVTLHNSEGVVPASYDSRQGFNGTFTVGPYICEATVKGKKFQTIPFNVYALKATSELDLEMEALKTVYKSGETIVVTCAVFNNEVVDLQWTYPGEVKGKGITMLEEIKVPSIKLVYTLTVPEATVKDSGDYECAARQATREVKEMKKVTISVHEKGFIEIKPTFSQLEAVNLHEVKHFVVEVRAYPPPRISWLKNNLTLIENLTEITTDVEKIQEIRYRSKLKLIRAKEEDSGHYTIVAQNEDAVKSYTFELLTQVPSSILDLVDDHHGSTGGQTVRCTAEGTPLPDIEWMICKDIKKCNNETSWTILANNVSNIITEIHSRDRSTVEGRVTFAKVEETIAVRCLAKNLLGAENRELKLVAPTLRSELTVAAAVLVLLVIVIISLIVLVVIWKQKPRYEIRWRVIESISPDGHEYIYVDPMQLPYDSRWEFPRDGLVLGRVLGSGAFGKVVEGTAYGLSRSQPVMKVAVKMLKPTARSSEKQALMSELKIMTHLGPHLNIVNLLGACTKSGPIYIITEYCFYGDLVNYLHKNRDSFLSHHPEKPKKELDIFGLNPADESTRSYVILSFENNGDYMDMKQADTTQYVPMLERKEVSKYSDIQRSLYDRPASYKKKSMLDSEVKNLLSDDNSEGLTLLDLLSFTYQVARGMEFLASKNCVHRDLAARNVLLAQGKIVKICDFGLARDIMHDSNYVSKGSTFLPVKWMAPESIFDNLYTTLSDVWSYGILLWEIFSLGGTPYPGMMVDSTFYNKIKSGYRMAKPDHATSEVYEIMVKCWNSEPEKRPSFYHLSEIVENLLPGQYKKSYEKIHLDFLKSDHPAVARMRVDSDNAYIGVTYKNEEDKLKDWEGGLDEQRLSADSGYIIPLPDIDPVPEEEDLGKRNRHSSQTSEESAIETGSSSSTFIKREDETIEDIDMMDDIGIDSSDLVEDSFL

SEQ ID NO: 7709 - protein, 159 aa, Homo sapiens
MGTSHPAFLVLGCLLTGLSLILCQLSLPSILPNENEKVVQLNSSFSLRCFGESEVSWQYPMSEEESSDVEIRNEENNSGLFVTVLEVSSASAAHTGLYTCYYNHTQTEENELEGRHIYIYVPDPDVAFVPLGMTDYLVIVEDDDSAIIPCRTTDPETPV

SEQ ID NO: 7710 - protein, 158 aa, Homo sapiens
MGTSHPAFLVLGCLLTGLSLILCQLSLPSILPNENEKVVQLNSSFSLRCFGESEVSWQYPMSEEESSDVEIRNEENNSGLFVTVLEVSSASAAHTGLYTCYYNHTQTEENELEGRHIYIYVPDPDVAFVPLGMTDYLVIVEDDDSAIIPCRTTDPETP

SEQ ID NO: 7711 - protein, 218 aa, Homo sapiens
MGTSHPAFLVLGCLLTGLSLILCQLSLPSILPNENEKVVQLNSSFSLRCFGESEVSWQYPMSEEESSDVEIRNEENNSGLFVTVLEVSSASAAHTGLYTCYYNHTQTEENELEGRHIYIYVPDPDVAFVPLGMTDYLVIVEDDDSAIIPCRTTDPETPVTLHNSEGVVPASYDSRQGFNGTFTVGPYICEATVKGKKFQTIPFNVYALKGTCIISFLL

SEQ ID NO: 7712 - protein, 154 aa, Homo sapiens
MGTSHPAFLVLGCLLTGLSLILCQLSLPSILPNENEKVVQLNSSFSLRCFGESEVSWQYPMSEEESSDVEIRNEENNSGLFVTVLEVSSASAAHTGLYTCYYNHTQTEENELEGRHIYIYVPDPDVAFVPLGMTDYLVIVEDDDSAIIPCRTTD

SEQ ID NO: 7713 - protein, 1106 aa, Homo sapiens
MRLPGAMPALALKGELLLLSLLLLLEPQISQGLVVTPPGPELVLNVSSTFVLTCSGSAPVVWERMSQEPPQEMAKAQDGTFSSVLTLTNLTGLDTGEYFCTHNDSRGLETDERKRLYIFVPDPTVGFLPNDAEELFIFLTEITEITIPCRVTDPQLVVTLHEKKGDVALPVPYDHQRGFSGIFEDRSYICKTTIGDREVDSDAYYVYRLQVSSINVSVNAVQTVVRQGENITLMCIVIGNEVVNFEWTYPRKESGRLVEPVTDFLLDMPYHIRSILHIPSAELEDSGTYTCNVTESVNDHQDEKAINITVVESGYVRLLGEVGTLQFAELHRSRTLQVVFEAYPPPTVLWFKDNRTLGDSSAGEIALSTRNVSETRYVSELTLVRVKVAEAGHYTMRAFHEDAEVQLSFQLQINVPVRVLELSESHPDSGEQTVRCRGRGMPQPNIIWSACRDLKRCPRELPPTLLGNSSEEESQLETNVTYWEEEQEFEVVSTLRLQHVDRPLSVRCTLRNAVGQDTQEVIVVPHSLPFKVVVISAILALVVLTIISLIILIMLWQKKPRYEIRWKVIESVSSDGHEYIYVDPMQLPYDSTWELPRDQLVLGRTLGSGAFGQVVEATAHGLSHSQATMKVAVKMLKSTARSSEKQALMSELKIMSHLGPHLNVVNLLGACTKGGPIYIITEYCRYGDLVDYLHRNKHTFLQHHSDKRRPPSAELYSNALPVGLPLPSHVSLTGESDGGYMDMSKDESVDYVPMLDMKGDVKYADIESSNYMAPYDNYVPSAPERTCRATLINESPVLSYMDLVGFSYQVANGMEFLASKNCVHRDLAARNVLICEGKLVKICDFGLARDIMRDSNYISKGSTFLPLKWMAPESIFNSLYTTLSDVWSFGILLWEIFTLGGTPYPELPMNEQFYNAIKRGYRMAQPAHASDEIYEIMQKCWEEKFEIRPPFSQLVLLLERLLGEGYKKKYQQVDEEFLRSDHPAILRSQARLPGFHGLRSPLDTSSVLYTAVQPNEGDNDYIIPLPDPKPEVADEGPLEGSPSLASSTLNEVNTSSTISCDSPLEPQDEPEPEPQLELQVEPEPELEQLPDSGCPAPRAEAEDSFL

SEQ ID NO: 7714 - protein, 174 aa, Homo sapiens
MRLPGAMPALALKGELLLLSLLLLLEPQISQGLVVTPPGPELVLNVSSTFVLTCSGSAPVVWERMSQEPPQEMAKAQDGTFSSVLTLTNLTGLDTGEYFCTHNDSRGLETDERKRLYIFVPDPTVGFLPNDAEELFIFLTEITEITIPCRVTDPQLVVTLHEKKGDVALPVPYD

SEQ ID NO: 7715 - protein, 776 aa, Homo sapiens
AASEPDTAGSVRGLPTAHCPVVDNRTLGDSSAGEIALSTRNVSETRYVSELTLVRVKVAEAGHYTMRAFHEDAEVQLSFQLQINVPVRVLELSESHPDSGEQTVRCRGRGMPQPNIIWSACRDLKRCPRELPPTLLGNSSEEESQLETNVTYWEEEQEFEVVSTLRLQHVDRPLSVRCTLRNAVGQDTQEVIVVPHSLPFKVVVISAILALVVLTIISLIILIMLWQKKPRYEIRWKVIESVSSDGHEYIYVDPMQLPYDSTWELPRDQLVLGRTLGSGAFGQVVEATAHGLSHSQATMKVAVKMLKSTARSSEKQALMSELKIMSHLGPHLNVVNLLGACTKGGPIYIITEYCRYGDLVDYLHRNKHTFLQHHSDKRRPPSAELYSNALPVGLPLPSHVSLTGESDGGYMDMSKDESVDYVPMLDMKGDVKYADIESSNYMAPYDNYVPSAPERTCRATLINESPVLSYMDLVGFSYQVANGMEFLASKNCVHRDLAARNVLICEGKLVKICDFGLARDIMRDSNYISKGSTFLPLKWMAPESIFNSLYTTLSDVWSFGILLWEIFTLGGTPYPELPMNEQFYNAIKRGYRMAQPAHASDEIYEIMQKCWEEKFEIRPPFSQLVLLLERLLGEGYKKKYQQVDEEFLRSDHPAILRSQARLPGFHGLRSPLDTSSVLYTAVQPNEGDNDYIIPLPDPKPEVADEGPLEGSPSLASSTLNEVNTSSTISCDSPLEPQDEPEPEPQLELQVEPEPELEQLPDSGCPAPRAEAEDSFL

SEQ ID NO: 7716 - protein, 353 aa, Homo sapiens
MEDGVLKEGFLVKRGHIVHNWKARWFILRQNTLVYYKLEGGRRVTPPKGRILLDGCTITCPCLEYENRPLLIKLKTQTSTEYFLEACSREERDAWAFEITGAIHAGQPGKVQQLHSLRNSFKLPPHISLHRIVDKMHDSNTGIRSSPNMEQGSTYKKTFLGSSLVDWLISNSFTASRLEAVTLASMLMEENFLRPVGVRSMGAIRSGDLAEQFLDDSTALYTFAESYKKKISPKEEISLSTVELSGTVVKQGYLAKQGHKRKNWKVRRFVLRKDPAFLHYYDPSKEENRPVGGFSLRGSLVSALEDNGVPTGVKGNVQGNLFKVITKDDTHYYIQASSKAERAEWIEAIKKLT

SEQ ID NO: 7717 - protein, 577 aa, Homo sapiens
MPEGAQGLSLSKPSPSLGCGRRGEVCDCGTVCETRTAPAAPTMASPRGSGSSTSLSTVGSEGDPAPGPTPACSASRPEPLPGPPIRLHLSPVGIPGSARPSRLERVAREIVETERAYVRDLRSIVEDYLGPLLDGGVLGLSVEQVGTLFANIEDIYEFSSELLEDLENSSSAGGIAECFVQRSEDFDIYTLYCMNYPSSLALLRELSLSPPAALWLQERQAQLRHSLPLQSFLLKPVQRILKYHLLLQELGKHWAEGPGTGGREMVEEAIVSMTAVAWYINDMKRKQEHAARLQEVQRRLGGWTGPELSAFGELVLEGAFRGGGGGGPRLRGGERLLFLFSRMLLVAKRRGLEYTYKGHIFCCNLSVSESPRDPLGFKVSDLTIPKHRHLLQAKNQEEKRLWIHCLQRLFFENHPASIPAKAKQVLLENSLHCAPKSKPVLEPLTPPLGSPRPRDARSFTPGRRNTAPSPGPSVIRRGRRQSEPVKDPYVMFPQNAKPGFKHAGSEGELYPPESQPPVSGSAPPEDLEDAGPPTLDPSGTSITEEILELLNQRGLRDPGESMGLHRAQGAPDAPFHM

SEQ ID NO: 7718 - protein, 1386 aa, Homo sapiens
MPEGAQGLSLSKPSPSLGCGRRGEVCDCGTVCETRTAPAAPTMASPRGSGSSTSLSTVGSEGDPAPGPTPACSASRPEPLPGPPIRLHLSPVGIPGSARPSRLERVAREIVETERAYVRDLRSIVEDYLGPLLDGGVLGLSVEQVGTLFANIEDIYEFSSELLEDLENSSSAGGIAECFVQRSEDFDIYTLYCMNYPSSLALLRELSLSPPAALWLQERQAQLRHSLPLQSFLLKPVQRILKYHLLLQELGKHWAEGPGTGGREMVEEAIVSMTAVAWYINDMKRKQEHAARLQEVQRRLGGWTGPELSAFGELVLEGAFRGGGGGGPRLRGGERLLFLFSRMLLVAKRRGLEYTYKGHIFCCNLSVSESPRDPLGFKVSDLTIPKHRHLLQAKNQEEKRLWIHCLQRLFFENHPASIPAKAKQVLLENSLHCAPKSKPVLEPLTPPLGSPRPRDARSFTPGRRNTAPSPGPSVIRRGRRQSEPVKDPYVMFPQNAKPGFKHAGSEGELYPPESQPPVSGSAPPEDLEDAGPPTLDPSGTSITEEILELLNQRGLRDPGPSTHDIPKFPGDSQVPGDSETLTFQALPSRDSSEEEEEEEEGLEMDERGPSPLHVLEGLESSIAAEMPSIPCLTKIPDVPNLPEIPSRCEIPEGSRLPSLSDISDVFEMPCLPAIPSVPNTPSLSSTPTLSCDSWLQGPLQEPAEAPATRRELFSGSNPGKLGEPPSGGKAGPEEDEEGVSFTDFQPQDVTQHQGFPDELAFRSCSEIRSAWQALEQGQLARPGFPEPLLILEDSDLGGDSGSGKAGAPSSERTASRVRELARLYSERIQQMQRAETRASANAPRRRPRVLAQPQPSPCLPQEQAEPGLLPAFGHVLVCELAFPLTCAQESVPLGPAVWVQAAIPLSKQGGSPDGQGLHVSNLPKQDLPGIHVSAATLLPEQGGSRHVQAPAATPLPKQEGPLHLQVPALTTFSDQGHPEIQVPATTPLPEHRSHMVIPAPSTAFCPEQGHCADIHVPTTPALPKEICSDFTVSVTTPVPKQEGHLDSESPTNIPLTKQGGSRDVQGPDPVCSQPIQPLSWHGSSLDPQGPGDTLPPLPCHLPDLQIPGTSPLPAHGSHLDHRIPANAPLSLSQELPDTQVPATTPLPLPQVLTDIWVQALPTSPKQGSLPDIQGPAAAPPLPEPSLTDTQVQKLTPSLEQKSLIDAHVPAATPLPERGGSLDIQGLSPTPVQTTMVLSKPGGSLASHVARLESSDLTPPHSPPPSSRQLLGPNAAALSRYLAASYISQSLARRQGPGGGAPAASRGSWSSAPTSRASSPPPQPQPPPPPARRLSYATTVNIHVGGGGRLRPAKAQVRLNHPALLASTQESMGLHRAQGAPDAPFHM

SEQ ID NO: 7719 - protein, 577 aa, Homo sapiens; identical to SEQ ID NO: 7717

SEQ ID NO: 7720 - protein, 1357 aa, Homo sapiens
MPEGAQGLSLSKPSPSLGCGRRGEVCDCGTVCETRTAPAAPTMASPRGSGSSTSLSTVGSEGDPAPGPTPACSASRPEPLPGPPIRLHLSPVGIPGSARPSRLERVAREIVETERAYVRDLRSIVEDYLGPLLDGGVLGLSVEQVGTLFANIEDIYEFSSELLEDLENSSSAGGIAECFVQRSEDFDIYTLYCMNYPSSLALLRELSLSPPAALWLQERQAQLRHSLPLQSFLLKPVQRILKYHLLLQELGKHWAEGPGTGGREMVEEAIVSMTAVAWYINDMKRKQEHAARLQEVQRRLGGWTGPELSAFGELVLEGAFRGGGGGGPRLRGGERLLFLFSRMLLVAKRRGLEYTYKGHIFCCNLSVSESPRDPLGFKVSDLTIPKHRHLLQAKNQEEKRLWIHCLQRLFFENHPASIPAKAKQVLLENSLHCAPKSKPVLEPLTPPLGSPRPRDARSFTPGRRNTAKPGFKHAGSEGELYPPESQPPVSGSAPPEDLEDAGPPTLDPSGTSITEEILELLNQRGLRDPGPSTHDIPKFPGDSQVPGDSETLTFQALPSRDSSEEEEEEEEGLEMDERGPSPLHVLEGLESSIAAEMPSIPCLTKIPDVPNLPEIPSRCEIPEGSRLPSLSDISDVFEMPCLPAIPSVPNTPSLSSTPTLSCDSWLQGPLQEPAEAPATRRELFSGSNPGKLGEPPSGGKAGPEEDEEGVSFTDFQPQDVTQHQGFPDELAFRSCSEIRSAWQALEQGQLARPGFPEPLLILEDSDLGGDSGSGKAGAPSSERTASRVRELARLYSERIQQMQRAETRASANAPRRRPRVLAQPQPSPCLPQEQAEPGLLPAFGHVLVCELAFPLTCAQESVPLGPAVWVQAAIPLSKQGGSPDGQGLHVSNLPKQDLPGIHVSAATLLPEQGGSRHVQAPAATPLPKQEGPLHLQVPALTTFSDQGHPEIQVPATTPLPEHRSHMVIPAPSTAFCPEQGHCADIHVPTTPALPKEICSDFTVSVTTPVPKQEGHLDSESPTNIPLTKQGGSRDVQGPDPVCSQPIQPLSWHGSSLDPQGPGDTLPPLPCHLPDLQIPGTSPLPAHGSHLDHRIPANAPLSLSQELPDTQVPATTPLPLPQVLTDIWVQALPTSPKQGSLPDIQGPAAAPPLPEPSLTDTQVQKLTPSLEQKSLIDAHVPAATPLPERGGSLDIQGLSPTPVQTTMVLSKPGGSLASHVARLESSDLTPPHSPPPSSRQLLGPNAAALSRYLAASYISQSLARRQGPGGGAPAASRGSWSSAPTSRASSPPPQPQPPPPPARRLSYATTVNIHVGGGGRLRPAKAQVRLNHPALLASTQESMGLHRAQGAPDAPFHM

SEQ ID NO: 7721 - protein, 198 aa, Homo sapiens
MPEGAQGLSLSKPSPSLGCGRRGEVCDCGTVCETRTAAPAAPTMASPRGSGSSTSLSTVGSEGDPAPGPTPACSASRPEPLPGPPIRLHLSPVGIPGSARPSRLERVAREIVETERAYVRDLRSIVEDYLGPLLDGGVLGLSVEQVGTLFANIEDIYEFSSELLEDLENSSSAGGIAECFVQRSEDFDIYTLYCMNYP

SEQ ID NO: 7722 - protein, 1237 aa, Homo sapiens
MPEGAQGLSLSKPSPSLGCGRRGEVCDCGTVCETRTGSARPSRLERVAREIVETERAYVRDLRSIVEDYLGPLLDGGVLGLSVEQVGTLFANIEDIYEFSSELLEDLENSSSAGGIAECFVQRSEDFDIYTLYCMNYPSSLALLRELSLSPPAALWLQERQAQLRHSLPLQSFLLKPVQRILKYHLLLQELGKHWAEGPGTGGREMVEEAIVSMTAVAWYINDMKRKQEHAARLQEVQRRLGGWTGPELSAFGELVLEGAFRGGGGGGPRLRGGERLLFLFSRMLLVAKRRGLEYTYKGHIFCCNLSVSESPRDPLGFKVSDLTIPKHRHLLQAKNQEEKRLWIHCLQRLFFENHPASIPAKAKQVLLENSLHCAPKSKPVLEPLTPPLGSPRPRDARSFTPGRRNTAPSPGPSVIRRGRRQSEPVKDPYVMFPQNAKPGFKHAGSEGELYPPESQPPVSGSAPPEDLEDAGPPTLDPSGTSITEEILELLNQRGLRDPGPSTHDIPKFPGDSQVPGDSETLTFQALPSRDSSEEEEEEEEGLEMDERGPSPLHVLEGLESSIAAEMPSIPCLTKIPDVPNLPEIPSRCEIPEGSRLPSLSDISDVFEMPCLPAIPSVPNTPSLSSTPTLSCDSWLQGPLQEPAEAPATRRELFSGSNPGKLGEPPSGGKAGPEEDEEGVSFTDFQPQDVTQHQGFPDELAFRSCSEIRSAWQALEQGQLARPGFPEPLLILEDSDLGGDSGSGKAGAPSSERTASRVRELARLYSERIQQMQRAETRASANAPRRRPRVLAQPQPSPCLPQEQAEPGLLPAFGHVLVCELAFPLTCAQESVPLGPAVWVQAAIPLSKQGGSPDGQGLHVSNLPKQDLPGIHVSAATLLPEQGGSRHVQAPAATPLPKQEGPLHLQVPALTTFSDQGHPEIQVPATTPLPEHRSHMVIPAPSTAFCPEQGHCADIHVPTTPALPKEICSDFTVSVTTPVPKQEGHLDSESPTNIPLTKQGGSRDVQGPDPVCSQPIQPLSWHGSSLDPQGPGDTLPPLPCHLPDLQIPGTSPLPAHGSHLDHRIPANAPLSLSQELPDTQVPATTPLPLPQVLTDIWVQALPTSPKQGSLPDIQGPAAAPPLPEPSLTDTQVQKLTPSLEQKSLIDAHVPAATPLPERGGSLDIQGLSPTPVQTTMVLSKPGGSLASHVARNLWAFTGPRGLLMPPSTCEPGHEASLKQGFQPDAIDPQNLTWKSRH

SEQ ID NO: 7723 - protein, 375 aa, Homo sapiens
MMKKNNSAKRGPQDGNQQPAPPEKVGWVRKFCGKGIFREIWKNRYVVLKGDQLYISEKEVKDEKNIQEVFDLSDYEKCEELRKSKSRSKKNHSKFTLAHSKQPGNTAPNLIFLAVSPEEKESWINALNSAITRAKNRILDEASTSTSDGMLTLDLIQEEDPSPEEPTSCAESFRVDLDKSVAQLAGSRRRADSDRIQPSADRASSLSRPWEKTDKGATYTPQAPKKLTPTEKGRCASLEEILSQRDAASARTLQLRAEEPPTPALPNPGQLSRIQDLVARKLEETQELLAEVQGLGDGKRKAKDPPRSPPDSESEQLLLETERLLGEASSNWSQAKRVLQEVRELRDLYRQMDLQTPDSHLRQTTPHSQYRKSLM

SEQ ID NO: 7724 - protein, 409 aa, Homo sapiens
MMKKNNSAKRGPQDGNQQPAPPEKVGWVRKFCGKGIFREIWKNRYVVLKGDQLYISEKEVKDEKNIQEVFDLSDYEKCEELRKSKSRSKKNHSKFTLAHSKQPGNTAPNLIFLAVSPEEKESWINALNSAITRAKNRILDEVTVEEDSYLAHPTRDRAKIQHSRRPPTRGHLMAVASTSTSDGMLTLDLIQEEDPSPEEPTSCAESFRVDLDKSVAQLAGSRRRADSDRIQPSADRASSLSRPWEKTDKGATYTPQAPKKLTPTEKGRCASLEEILSQRDAASARTLQLRAEEPPTPALPNPGQLSRIQDLVARKLEETQELLAEVQGLGDGKRKAKDPPRSPPDSESEQLLLETERLLGEASSNWSQAKRVLQEVRELRDLYRQMDLQTPDSHLRQTTPHSQYRKSLM

SEQ ID NO: 7725 - protein, 226 aa, Homo sapiens
MLTLDLIQEEDPSPEEPTSCAESFRVDLDKSVAQLAGSRRRADSDRIQPSADRASSLSRPWEKTDKGATYTPQAPKKLTPTEKGRCASLEEILSQRDAASARTLQLRAEEPPTPALPNPGQLSRIQDLVARKLEETQELLAEVQGLGDGKRKAKDPPRSPPDSESEQLLLETERLLGEASSNWSQAKRVLQEVRELRDLYRQMDLQTPDSHLRQTTPHSQYRKSLM

SEQ ID NO: 7726 - protein, 224 aa, Homo sapiens
MPSTLPSPEPRTVSWMSTSLQVTVEEDSYLAHPTRDRAKIQHSRRPPTRGHLMAVASTSTSDGMLTLDLIQEEDPSPEEPTSCAESFRVDLDKSVAQLAGSRRRADSDRIQPSADRASSLSRPWEKTDKGATYTPQAPKKLTPTEKGRCASLEEILSQRDAASARTLQLRAEEPPTPALPNPGQLSRIQDLVARKLEETQELLAEVQGLGDGKRKAKDPPRSPP

SEQ ID NO: 7727 - protein, 127 aa, Homo sapiens
MTAAATATVLKEGVLEKRSGGLLQLWKRKRCVLTERGLQLFEAKGTGGRPKELSFARIKAVECVESTGRHIYFTLVTEGGGEIDFRCPLEDPGWNAQITLGLVKFKNQQAIQTVRARQSLGTGTLVS

SEQ ID NO: 7728 - protein, 127 aa, Homo sapiens; identical to SEQ ID NO: 7727

SEQ ID NO: 7729 - protein, 569 aa, Homo sapiens
MSFGILKPDLRIVFVHNKAVIWQKSRVSDHKMALMSVLGTAVMNNMESFQYHSEESQIYLSGFLPKCDADHSFTSLSTPERSFIFINSRPVHQKDILKLIRHHYNLKCLKESTRLYPVFFLKIDVPTADVDVNLTPDKSQVLLQNKESVLIALENLMTTCYGPLPSTNSYENNKTDVSAADIVLSKTAETDVLFNKVESSGKNYSNVDTSVIPFQNDMHNDESGKNTDDCLNHQISIGDFGYGHCSSEISNIDKNTKNAFQDISMSNVSWENSQTEYSKTCFISSVKHTQSENGNKDHIDESGENEEEAGLENSSEISADEWSRGNILKNSVGENIEPVKILVPEKSLPCKVSNNNYPIPEQMNLNEDSCNKKSNVIDNKSGKVTAYDLLSNRVIKKPMSASALFVQDHRPQFLIENPKTSLEDATLQIEELWKTLSEEEKLKYEEKATKDLERYNSQMKRAIEQESQMSLKDGRKKIKPTSAWNLAQKHKLKTSLSNQPKLDELLQSQIEKRRSQNIKMVQIPFSMKNLKINFKKQNKVDLEEKDEPCLIHNLRFPDAWLMTSKTESF

SEQ ID NO: 7730 - protein, 756 aa, Homo sapiens
MSFGILKPDLRIVFVHNKAVIWQKSRVSDHKMALMSVLGTAVMNNMESFQYHSEESQIYLSGFLPKCDADHSFTSLSTPERSFIFINSRPVHQKDILKLIRHHYNLKCLKESTRLYPVFFLKIDVPTADVDVNLTPDKSQVLLQNKESVLIALENLMTTCYGPLPSTNSYENNKTDVSAADIVLSKTAETDVLFNKVESSGKNYSNVDTSVIPFQNDMHNDESGKNTDDCLNHQISIGDFGYGHCSSEISNIDKNTKNAFQDISMSNVSWENSQTEYSKTCFISSVKHTQSENGNKDHIDESGENEEEAGLENSSEISADEWSRGNILKNSVGENIEPVKILVPEKSLPCKVSNNNYPIPEQMNLNEDSCNKKSNVIDNKSGKVTAYDLLSNRVIKKPMSASALFVQDHRPQFLIENPKTSLEDATLQIEELWKTLSEEEKLKYEEKATKDLERYNSQMKRAIEQESQMSLKDGRKKIKPTSAWNLAQKHKLKTSLSNQPKLDELLQSQIEKRRSQNIKMVQIPFSMKNLKINFKKQNKVDLEEKDEPCLIHNLRFPDAWLMTSKTEVMLLNPYRVEEALLFKRLLENHKLPAEPLEKPIMLTESLFNGSHYLDVLYKMTADDQRYSGSTYLSDPRLTANGFKIKLIPGVSITENYLEIEGMANCLPFYGVADLKEILNAILNRNAKEVYECRPRKVISYLEGEAVRLSRQLPMYLSKEDIQDIIYRMKHQFGNEIKECVHGRPFFHHLTYLPETT

SEQ ID NO: 7731 - protein, 73 aa, Homo sapiens
MKQLPAATVRLLSSSQIITSVVSVVKELIENSLDAGATSVDVKLENYGFDKIEVRDNGEGIKAVDAPVMAMKY

SEQ ID NO: 7732 - protein, 194 aa, Homo sapiens
MKQLPAATVRLLSSSQIITSVVSVVKELIENSLDAGATSVDVKLENYGFDKIEVRDNGEGIKAVDAPVMAMKYYTSKINSHEDLENLTTYGFRGEALGSICCIAEVLITTRTAADNFSTQYVLDGSGHILSQKPSHLGQGTTVTALRLFKNLPVRKQFYSTAKKCKDEIKKIQDLLMSFGILKPDLRIVFVHNK

SEQ ID NO: 7733 - protein, 756 aa, Homo sapiens; identical to SEQ ID NO: 7730

SEQ ID NO: 7734 - protein, 932 aa, Homo sapiens
MKQLPAATVRLLSSSQIITSVVSVVKELIENSLDAGATSVDVKLENYGFDKIEVRDNGEGIKAVDAPVMAMKYYTSKINSHEDLENLTTYGFRGEALGSICCIAEVLITTRTAADNFSTQYVLDGSGHILSQKPSHLGQGTTVTALRLFKNLPVRKQFYSTAKKCKDEIKKIQDLLMSFGILKPDLRIVFVHNKAVIWQKSRVSDHKMALMSVLGTAVMNNMESFQYHSEESQIYLSGFLPKCDADHSFTSLSTPERSFIFINSRPVHQKDILKLIRHHYNLKCLKESTRLYPVFFLKIDVPTADVDVNLTPDKSQVLLQNKESVLIALENLMTTCYGPLPSTNSYENNKTDVSAADIVLSKTAETDVLFNKVESSGKNYSNVDTSVIPFQNDMHNDESGKNTDDCLNHQISIGDFGYGHCSSEISNIDKNTKNAFQDISMSNVSWENSQTEYSKTCFISSVKHTQSENGNKDHIDESGENEEEAGLENSSEISADEWSRGNILKNSVGENIEPVKILVPEKSLPCKVSNNNYPIPEQMNLNEDSCNKKSNVIDNKSGKVTAYDLLSNRVIKKPMSASALFVQDHRPQFLIENPKTSLEDATLQIEELWKTLSEEEKLKYEEKATKDLERYNSQMKRAIEQESQMSLKDGRKKIKPTSAWNLAQKHKLKTSLSNQPKLDELLQSQIEKRRSQNIKMVQIPFSMKNLKINFKKQNKVDLEEKDEPCLIHNLRFPDAWLMTSKTEVMLLNPYRVEEALLFKRLLENHKLPAEPLEKPIMLTESLFNGSHYLDVLYKMTADDQRYSGSTYLSDPRLTANGFKIKLIPGVSITENYLEIEGMANCLPFYGVADLKEILNAILNRNAKEVYECRPRKVISYLEGEAVRLSRQLPMYLSKEDIQDIIYRMKHQFGNEIKECVHGRPFFHHLTYLPETT

SEQ ID NO: 7735 - protein, 44 aa, Homo sapiens
MKQLPAATVRLLSSSQIITSVVSVVKELIENSLDAGATSVDVKL

SEQ ID NO: 7736 - protein, 770 aa, Homo sapiens
MKQLPAATVRLLSSSQIITSVVSVVKELIENSLDAGATSVDVKLENYGFDKIEVRDNGEGIKAVDAPVMAMKYYTSKINSHEDLENLTTYGFRGEALGSICCIAEVLITTRTAADNFSTQYVLDGSGHILSQKPSHLGQGTTVTALRLFKNLPVRKQFYSTAKKCKDEIKKIQDLLMSFGILKPDLRIVFVHNKAVIWQKSRVSDHKMALMSVLGTAVMNNMESFQYHSEESQIYLSGFLPKCDADHSFTSLSTPERSFIFINSRPVHQKDILKLIRHHYNLKCLKESTRLYPVFFLKIDVPTADVDVNLTPDKSQVLLQNKESVLIALENLMTTCYGPLPSTNSYENNKTDVSAADIVLSKTAETDVLFNKVESSGKNYSNVDTSVIPFQNDMHNDESGKNTDDCLNHQISIGDFGYGHCSSEISNIDKNTKNAFQDISMSNVSWENSQTEYSKTCFISSVKHTQSENGNKDHIDESGENEEEAGLENSSEISADEWSRGNILKNSVGENIEPVKILVPEKSLPCKVSNNNYPIPEQMNLNEDSCNKKSNVIDNKSGKVTAYDLLSNRVIKKPMSASALFVQDHRPQFLIENPKTSLEDATLQIEELWKTLSEEEKLNLFNGSHYLDVLYKMTADDQRYSGSTYLSDPRLTANGFKIKLIPGVSITENYLEIEGMANCLPFYGVADLKEILNAILNRNAKEVYECRPRKVISYLEGEAVRLSRQLPMYLSKEDIQDIIYRMKHQFGNEIKECVHGRPFFHHLTYLPETT

SEQ ID NO: 7737 - protein, 893 aa, Homo sapiens
MKQLPAATVRLLSSSQIITSVVSVVKELIENSLDAGATSVDVKLENYGFDKIEVRDNGEGIKAVDAPVMAMKYYTSKINSHEDLENLTTYGFRGEALGSICCIAEVLITTRTAADNFSTQYVLDGSGHILSQKPSHLGQGTTVTALRLFKNLPVRKQFYSTAKKCKDEIKKIQDLLMSFGILKPDLRIVFVHNKIYLSGFLPKCDADHSFTSLSTPERSFIFINSRPVHQKDILKLIRHHYNLKCLKESTRLYPVFFLKIDVPTADVDVNLTPDKSQVLLQNKESVLIALENLMTTCYGPLPSTNSYENNKTDVSAADIVLSKTAETDVLFNKVESSGKNYSNVDTSVIPFQNDMHNDESGKNTDDCLNHQISIGDFGYGHCSSEISNIDKNTKNAFQDISMSNVSWENSQTEYSKTCFISSVKHTQSENGNKDHIDESGENEEEAGLENSSEISADEWSRGNILKNSVGENIEPVKILVPEKSLPCKVSNNNYPIPEQMNLNEDSCNKKSNVIDNKSGKVTAYDLLSNRVIKKPMSASALFVQDHRPQFLIENPKTSLEDATLQIEELWKTLSEEEKLKYEEKATKDLERYNSQMKRAIEQESQMSLKDGRKKIKPTSAWNLAQKHKLKTSLSNQPKLDELLQSQIEKRRSQNIKMVQIPFSMKNLKINFKKQNKVDLEEKDEPCLIHNLRFPDAWLMTSKTEVMLLNPYRVEEALLFKRLLENHKLPAEPLEKPIMLTESLFNGSHYLDVLYKMTADDQRYSGSTYLSDPRLTANGFKIKLIPGVSITENYLEIEGMANCLPFYGVADLKEILNAILNRNAKEVYECRPRKVISYLEGEAVRLSRQLPMYLSKEDIQDIIYRMKHQFGNEIKECVHGRPFFHHLTYLPETT

SEQ ID NO: 7738 - protein, 862 aa, Homo sapiens
MERAESSSTEPAKAIKPIDRKSVHQICSGQVVLSLSTAVKELVENSLDAGATNIDLKLKDYGVDLIEVSDNGCGVEEENFEGLTLKHHTSKIQEFADLTQVETFGFRGEALSSLCALSDVTISTCHASAKVGTRLMFDHNGKIIQKTPYPRPRGTTVSVQQLFSTLPVRHKEFQRNIKKEYAKMVQVLHAYCIISAGIRVSCTNQLGQGKRQPVVCTGGSPSIKENIGSVFGQKQLQSLIPFVQLPPSDSVCEEYGLSCSDALHNLFYISGFISQCTHGVGRSSTDRQFFFINRRPCDPAKVCRLVNEVYHMYNRHQYPFVVLNISVDSECVDINVTPDKRQILLQEEKLLLAVLKTSLIGMFDSDVNKLNVSQQPLLDVEGNLIKMHAADLEKPMVEKQDQSPSLRTGEEKKDVSISRLREAFSLRHTTENKPHSPKTPEPRRSPLGQKRGMLSSSTSGAISDKGVLRPQKEAVSSSHGPSDPTDRAEVEKDSGHGSTSVDSEGFSIPDTGSHCSSEYAASSPGDRGSQEHVDSQEKAPKTDDSFSDVDCHSNQEDTGCKFRVLPQPTNLATPNTKRFKKEEILSSSDICQKLVNTQDMSASQVDVAVKINKKVVPLDFSMSSLAKRIKQLHHEAQQSEGEQNYRKFRAKICPGENQAAEDELRKEISKTMFAEMEIIGQFNLGFIITKLNEDIFIVDQHATDEKYNFEMLQQHTVLQGQRLIAPQTLNLTAVNEAVLIENLEIFRKNGFDFVIDENAPVTERAKLISLPTSKNWTFGPQDVDELIFMLSDSPGVMCRPSRVKQMFASRACRKSVMIGTALNTSEMKKLITHMGEMDHPWNCPHGRPTMRHIANLGVISQN

SEQ ID NO: 7739 - protein, 461 aa, Homo sapiens
MERAESSSTEPAKAIKPIDRKSVHQICSGQVVLSLSTAVKELVENSLDAGATNIDLKLKDYGVDLIEVSDNGCGVEEENFEGLTLKHHTSKIQEFADLTQVETFGFRGEALSSLCALSDVTISTCHASAKVGTRLMFDHNGKIIQKTPYPRPRGTTVSVQQLFSTLPVRHKEFQRNIKKEYAKMVQVLHAYCIISAGIRVSCTNQLGQGKRQPVVCTGGSPSIKENIGSVFGQKQLQSLIPFVQLPPSDSVCEEYGLSCSDALHNLFYKTMFAEMEIIGQFNLGFIITKLNEDIFIVDQHATDEKYNFEMLQQHTVLQGQRLIAPQTLNLTAVNEAVLIENLEIFRKNGFDFVIDENAPVTERAKLISLPTSKNWTFGPQDVDELIFMLSDSPGVMCRPSRVKQMFASRACRKSVMIGTALNTSEMKKLITHMGEMDHPWNCPHGRPTMRHIANLGVISQN

SEQ ID NO: 7740 - protein, 815 aa, Homo sapiens
MERAESSRSKLKDYGVDLIEVSDNGCGVEEENFEGLTLKHHTSKIQEFADLTQVETFGFRGEALSSLCALSDVTISTCHASAKVGTRLMFDHNGKIIQKTPYPRPRGTTVSVQQLFSTLPVRHKEFQRNIKKEYAKMVQVLHAYCIISAGIRVSCTNQLGQGKRQPVVCTGGSPSIKENIGSVFGQKQLQSLIPFVQLPPSDSVCEEYGLSCSDALHNLFYISGFISQCTHGVGRSSTDRQFFFINRRPCDPAKVCRLVNEVYHMYNRHQYPFVVLNISVDSECVDINVTPDKRQILLQEEKLLLAVLKTSLIGMFDSDVNKLNVSQQPLLDVEGNLIKMHAADLEKPMVEKQDQSPSLRTGEEKKDVSISRLREAFSLRHTTENKPHSPKTPEPRRSPLGQKRGMLSSSTSGAISDKGVLRPQKEAVSSSHGPSDPTDRAEVEKDSGHGSTSVDSEGFSIPDTGSHCSSEYAASSPGDRGSQEHVDSQEKAPKTDDSFSDVDCHSNQEDTGCKFRVLPQPTNLATPNTKRFKKEEILSSSDICQKLVNTQDMSASQVDVAVKINKKVVPLDFSMSSLAKRIKQLHHEAQQSEGEQNYRKFRAKICPGENQAAEDELRKEISKTMFAEMEIIGQFNLGFIITKLNEDIFIVDQHATDEKYNFEMLQQHTVLQGQRLIAPQTLNLTAVNEAVLIENLEIFRKNGFDFVIDENAPVTERAKLISLPTSKNWTFGPQDVDELIFMLSDSPGVMCRPSRVKQMFASRACRKSVMIGTALNTSEMKKLITHMGEMDHPWNCPHGRPTMRHIANLGVISQN

SEQ ID NO: 7741 - protein, 572 aa, Homo sapiens
MERAESSSTEPAKAIKPIDRKSVHQICSGQVVLSLSTAVKELVENSLDAGATNIDLKLKDYGVDLIEVSDNGCGVEEENFEGLTLKHHTSKIQEFADLTQVETFGFRGEALSSLCALSDVTISTCHASAKVGTRLMFDHNGKIIQKTPYPRPRGTTVSVQQLFSTLPVRHKEFQRNIKKEYAKMVQVLHAYCIISAGIRVSCTNQLGQGKRQPVVCTGGSPSIKENIGSVFGQKQLQSLIPFVQLPPSDSVCEEYGLSCSDALHNLFYISGFISQCTHGVGRSSTDRQFFFINRRPCDPAKVCRLVNEVYHMYNRHQYPFVVLNISVDSECVDINVTPDKRQILLQEEKLLLAVLKTSLIGMFDSDVNKLNVSQQPLLDVEGNLIKMHAADLEKPMVEKQDQSPSLRTGEEKKDVSISRLREAFSLRHTTENKPHSPKTPEPRRSPLGQKRGMLSSSTSGAISDKGVLRPQKEAVSSSHGPSDPTDRAEVEKDSGHGSTSVDSEGFSIPDTGSHCSSEYAASSPGDRGSQEHVDSQEKAPKTDDSFSDVDCHSNQEDTGLKTGPSDPRTSMN

SEQ ID NO: 7742 - protein, 756 aa, Homo sapiens
MWGRRRKLRRLNDVTISTCHASAKVGTRLMFDHNGKIIQKTPYPRPRGTTVSVQQLFSTLPVRHKEFQRNIKKEYAKMVQVLHAYCIISAGIRVSCTNQLGQGKRQPVVCTGGSPSIKENIGSVFGQKQLQSLIPFVQLPPSDSVCEEYGLSCSDALHNLFYISGFISQCTHGVGRSSTDRQFFFINRRPCDPAKVCRLVNEVYHMYNRHQYPFVVLNISVDSECVDINVTPDKRQILLQEEKLLLAVLKTSLIGMFDSDVNKLNVSQQPLLDVEGNLIKMHAADLEKPMVEKQDQSPSLRTGEEKKDVSISRLREAFSLRHTTENKPHSPKTPEPRRSPLGQKRGMLSSSTSGAISDKGVLRPQKEAVSSSHGPSDPTDRAEVEKDSGHGSTSVDSEGFSIPDTGSHCSSEYAASSPGDRGSQEHVDSQEKAPKTDDSFSDVDCHSNQEDTGCKFRVLPQPTNLATPNTKRFKKEEILSSSDICQKLVNTQDMSASQVDVAVKINKKVVPLDFSMSSLAKRIKQLHHEAQQSEGEQNYRKFRAKICPGENQAAEDELRKEISKTMFAEMEIIGQFNLGFIITKLNEDIFIVDQHATDEKYNFEMLQQHTVLQGQRLIAPQTLNLTAVNEAVLIENLEIFRKNGFDFVIDENAPVTERAKLISLPTSKNWTFGPQDVDELIFMLSDSPGVMCRPSRVKQMFASRACRKSVMIGTALNTSEMKKLITHMGEMDHPWNCPHGRPTMRHIANLGVISQN

SEQ ID NO: 7743 - protein, 603 aa, Homo sapiens
MSAAVTAGKLARAPADPGKAGVPGVAAPGAPAAAPPAKEIPEVLVDPRSRRRYVRGRFLGKGGFAKCFEISDADTKEVFAGKIVPKSLLLKPHQREKMSMEISIHRSLAHQHVVGFHGFFEDNDFVFVVLELCRRRSLLELHKRRKALTEPEARYYLRQIVLGCQYLHRNRVIHRDLKLGNLFLNEDLEVKIGDFGLATKVEYDGERKKTLCGTPNYIAPEVLSKKGHSFEVDVWSIGCIMYTLLVGKPPFETSCLKETYLRIKKNEYSIPKHINPVAASLIQKMLQTDPTARPTINELLNDEFFTSGYIPARLPITCLTIPPRFSIAPSSLDPSNRKPLTVLNKGLENPLPERPREKEEPVVRETGEVVDCHLSDMLQQLHSVNASKPSERGLVRQEEAEDPACIPIFWVSKWVDYSDKYGLGYQLCDNSVGVLFNDSTRLILYNDGDSLQYIERDGTESYLTVSSHPNSLMKKITLLKYFRNYMSEHLLKAGANITPREGDELARLPYLRTWFRTRSAIILHLSNGSVQINFFQDHTKLILCPLMAAVTYIDEKRDFRTYRLSLLEEYGCCKELASRLRYARTMVDKLLSSRSASNRLKAS

SEQ ID NO: 7744 - protein, 247 aa, Homo sapiens
MSAAVTAGKLARAPADPGKAGVPGVAAPGAPAAAPPAKEIPEVLVDPRSRRRYVRGRFLGKGGFAKCFEISDADTKEVFAGKIVPKSLLLKPHQREKMSMEISIHRSLAHQHVVGFHGFFEDNDFVFVVLELCRRRSLLELHKRRKALTEPEARYYLRQIVLGCQYLHRNRVIHRDLKLGNLFLNEDLEVKIGDFGLATKVEYDGERKKTLCGTPNYIAPAVPCLQCAPQPRWLGRAASSLQVGVAV

SEQ ID NO: 7745 - protein, 506 aa, Homo sapiens
MSMEISIHRSLAHQHVVGFHGFFEDNDFVFVVLELCRRRSLLELHKRRKALTEPEARYYLRQIVLGCQYLHRNRVIHRDLKLGNLFLNEDLEVKIGDFGLATKVEYDGERKKTLCGTPNYIAPEVLSKKGHSFEVDVWSIGCIMYTLLVGKPPFETSCLKETYLRIKKNEYSIPKHINPVAASLIQKMLQTDPTARPTINELLNDEFFTSGYIPARLPITCLTIPPRFSIAPSSLDPSNRKPLTVLNKGLENPLPERPREKEEPVVRETGEVVDCHLSDMLQQLHSVNASKPSERGLVRQEEAEDPACIPIFWVSKWVDYSDKYGLGYQLCDNSVGVLFNDSTRLILYNDGDSLQYIERDGTESYLTVSSHPNSLMKKITLLKYFRNYMSEHLLKAGANITPREGDELARLPYLRTWFRTRSAIILHLSNGSVQINFFQDHTKLILCPLMAAVTYIDEKRDFRTYRLSLLEEYGCCKELASRLRYARTMVDKLLSSRSASNRLKAS

SEQ ID NO: 7746 - protein, 646 aa, Homo sapiens
MEPAAGFLSPRPFQRAAAAPAPPAGPGPPPSALRGPELEMLAGLPTSDPGRLITDPRSGRTYLKGRLLGKGGFARCYEATDTETGSAYAVKVIPQSRVAKPHQREKILNEIELHRDLQHRHIVRFSHHFEDADNIYIFLELCSRKSLAHIWKARHTLLEPEVRYYLRQILSGLKYLHQRGILHRDLKLGNFFITENMELKVGDFGLAARLEPPEQRKKTICGTPNYVAPEVLLRQGHGPEADVWSLGCVMYTLLCGSPPFETADLKETYRCIKQVHYTLPASLSLPARQLLAAILRASPRDRPSIDQILRHDFFTKGYTPDRLPISSCVTVPDLTPPNPARSLFAKVTKSLFGRKKKSKNHAQERDEVSGLVSGLMRTSVGHQDARPEAPAASGPAPVSLVETAPEDSSPRGTLASSGDGFEEGLTVATVVESALCALRNCIAFMPPAEQNPAPLAQPEPLVWVSKWVDYSNKFGFGYQLSSRRVAVLFNDGTHMALSANRKTVHYNPTSTKHFSFSVGAVPRALQPQLGILRYFASYMEQHLMKGGDLPSVEEVEVPAPPLLLQWVKTDQALLMLFSDGTVQVNFYGDHTKLILSGWEPLLVTFVARNRSACTYLASHLRQLGCSPDLRQRLRYALRLLRDRSPA

SEQ ID NO: 7747 - protein, 621 aa, Homo sapiens
SRQRHARPGPGGTEKPGPRCDAPAAWSLPPVSCLRTYLKGRLLGKGGFARCYEATDTETGSAYAVKVIPQSRVAKPHQREKILNEIELHRDLQHRHIVRFSHHFEDADNIYIFLELCSRKSLAHIWKARHTLLEPEVRYYLRQILSGLKYLHQRGILHRDLKLGNFFITENMELKVGDFGLAARLEPPEQRKKTICGTPNYVAPEVLLRQGHGPEADVWSLGCVMYTLLCGSPPFETADLKETYRCIKQVHYTLPASLSLPARQLLAAILRASPRDRPSIDQILRHDFFTKGYTPDRLPISSCVTVPDLTPPNPARSLFAKVTKSLFGRKKKSKNHAQERDEVSGLVSGLMRTSVGHQDARPEAPAASGPAPVSLVETAPEDSSPRGTLASSGDGFEEGLTVATVVESALCALRNCIAFMPPAEQNPAPLAQPEPLVWVSKWVDYSNKFGFGYQLSSRRVAVLFNDGTHMALSANRKTVHYNPTSTKHFSFSVGAVPRALQPQLGILRYFASYMEQHLMKGGDLPSVEEVEVPAPPLLLQWVKTDQALLMLFSDGTVQVNFYGDHTKLILSGWEPLLVTFVARNRSACTYLASHLRQLGCSPDLRQRLRYALRLLRDRSPA

SEQ ID NO: 7748 - protein, 970 aa, Homo sapiens
MATCIGEKIEDFKVGNLLGKGSFAGVYRAESIHTGLEVAIKMIDKKAMYKAGMVQRVQNEVKIHCQLKHPSILELYNYFEDSNYVYLVLEMCHNGEMNRYLKNRVKPFSENEARHFMHQIITGMLYLHSHGILHRDLTLSNLLLTRNMNIKIADFGLATQLKMPHEKHYTLCGTPNYISPEIATRSAHGLESDVWSLGCMFYTLLIGRPPFDTDTVKNTLNKVVLADYEMPSFLSIEAKDLIHQLLRRNPADRLSLSSVLDHPFMSRNSSTKSKDLGTVEDSIDSGHATISTAITASSSTSISGSLFDKRRLLIGQPLPNKMTVFPKNKSSTDFSSSGDGNSFYTQWGNQETSNSGRGRVIQDAEERPHSRYLRRAYSSDRSGTSNSQSQAKTYTMERCHSAEMLSVSKRSGGGENEERYSPTDNNANIFNFFKEKTSSSSGSFERPDNNQALSNHLCPGKTPFPFADPTPQTETVQQWFGNLQINAHLRKTTEYDSISPNRDFQGHPDLQKDTSKNAWTDTKVKKNSDASDNAHSVKQQNTMKYMTALHSKPEIIQQECVFGSDPLSEQSKTRGMEPPWGYQNRTLRSITSPLVAHRLKPIRQKTKKAVVSILDSEEVCVELVKEYASQEYVKEVLQISSDGNTITIYYPNGGRGFPLADRPPSPTDNISRYSFDNLPEKYWRKYQYASRFVQLVRSKSPKITYFTRYAKCILMENSPGADFEVWFYDGVKIHKTEDFIQVIEKTGKSYTLKSESEVNSLKEEIKMYMDHANEGHRICLALESIISEEERKTRSAPFFPIIIGRKPGSTSSPKALSPPPSVDSNYPTRERASFNRMVMHSAASPTQAPILNPSMVTNEGLGLTTTASGTDISSNSLKDCLPKSAQLLKSVFVKNVGWATQLTSGAVWVQFNDGSQLVVQAGVSSISYTSPNGQTTRYGENEKLPDYIKQKLQCLSSILLMFSNPTPNFH

SEQ ID NO: 7749 - protein, 938 aa, Homo sapiens
MATCIGEKIEDFKVGNLLGKGSFAGVYRAESIHTGLEVAIKMLYNYFEDSNYVYLVLEMCHNGEMNRYLKNRVKPFSENEARHFMHQIITGMLYLHSHGILHRDLTLSNLLLTRNMNIKIADFGLATQLKMPHEKHYTLCGTPNYISPEIATRSAHGLESDVWSLGCMFYTLLIGRPPFDTDTVKNTLNKVVLADYEMPSFLSIEAKDLIHQLLRRNPADRLSLSSVLDHPFMSRNSSTKSKDLGTVEDSIDSGHATISTAITASSSTSISGSLFDKRRLLIGQPLPNKMTVFPKNKSSTDFSSSGDGNSFYTQWGNQETSNSGRGRVIQDAEERPHSRYLRRAYSSDRSGTSNSQSQAKTYTMERCHSAEMLSVSKRSGGGENEERYSPTDNNANIFNFFKEKTSSSSGSFERPDNNQALSNHLCPGKTPFPFADPTPQTETVQQWFGNLQINAHLRKTTEYDSISPNRDFQGHPDLQKDTSKNAWTDTKVKKNSDASDNAHSVKQQNTMKYMTALHSKPEIIQQECVFGSDPLSEQSKTRGMEPPWGYQNRTLRSITSPLVAHRLKPIRQKTKKAVVSILDSEEVCVELVKEYASQEYVKEVLQISSDGNTITIYYPNGGRGFPLADRPPSPTDNISRYSFDNLPEKYWRKYQYASRFVQLVRSKSPKITYFTRYAKCILMENSPGADFEVWFYDGVKIHKTEDFIQVIEKTGKSYTLKSESEVNSLKEEIKMYMDHANEGHRICLALESIISEEERKTRSAPFFPIIIGRKPGSTSSPKALSPPPSVDSNYPTRERASFNRMVMHSAASPTQAPILNPSMVTNEGLGLTTTASGTDISSNSLKDCLPKSAQLLKSVFVKNVGWATQLTSGAVWVQFNDGSQLVVQAGVSSISYTSPNGQTTRYGENEKLPDYIKQKLQCLSSILLMFSNPTPNFH

SEQ ID NO: 7750 - protein, 929 aa, Homo sapiens
MIDKKAMYKAGMVQRVQNEVKIHCQLKHPSILELYNYFEDSNYVYLVLEMCHNGEMNRYLKNRVKPFSENEARHFMHQIITGMLYLHSHGILHRDLTLSNLLLTRNMNIKIADFGLATQLKMPHEKHYTLCGTPNYISPEIATRSAHGLESDVWSLGCMFYTLLIGRPPFDTDTVKNTLNKVVLADYEMPSFLSIEAKDLIHQLLRRNPADRLSLSSVLDHPFMSRNSSTKSKDLGTVEDSIDSGHATISTAITASSSTSISGSLFDKRRLLIGQPLPNKMTVFPKNKSSTDFSSSGDGNSFYTQWGNQETSNSGRGRVIQDAEERPHSRYLRRAYSSDRSGTSNSQSQAKTYTMERCHSAEMLSVSKRSGGGENEERYSPTDNNANIFNFFKEKTSSSSGSFERPDNNQALSNHLCPGKTPFPFADPTPQTETVQQWFGNLQINAHLRKTTEYDSISPNRDFQGHPDLQKDTSKNAWTDTKVKKNSDASDNAHSVKQQNTMKYMTALHSKPEIIQQECVFGSDPLSEQSKTRGMEPPWGYQNRTLRSITSPLVAHRLKPIRQKTKKAVVSILDSEEVCVELVKEYASQEYVKEVLQISSDGNTITIYYPNGGRGFPLADRPPSPTDNISRYSFDNLPEKYWRKYQYASRFVQLVRSKSPKITYFTRYAKCILMENSPGADFEVWFYDGVKIHKTEDFIQVIEKTGKSYTLKSESEVNSLKEEIKMYMDHANEGHRICLALESIISEEERKTRSAPFFPIIIGRKPGSTSSPKALSPPPSVDSNYPTRERASFNRMVMHSAASPTQAPILNPSMVTNEGLGLTTTASGTDISSNSLKDCLPKSAQLLKSVFVKNVGWATQLTSGAVWVQFNDGSQLVVQAGVSSISYTSPNGQTTRYGENEKLPDYIKQKLQCLSSILLMFSNPTPNFH

SEQ ID NO: 7751 - protein, 583 aa, Homo sapiens
MAARRRRSTGGGRARALNESKRVNNGNTAPEDSSPAKKTRRCQRQESKKMPVAGGKANKDRTEDKQDGMPGRSWASKRVSESVKALLLKGKAPVDPECTAKVGKAHVYCEGNDVYDVMLNQTNLQFNNNKYYLIQLLEDDAQRNFSVWMRWGRVGKMGQHSLVACSGNLNKAKEIFQKKFLDKTKNNWEDREKFEKVPGKYDMLQMDYATNTQDEEETKKEESLKSPLKPESQLDLRVQELIKLICNVQAMEEMMMEMKYNTKKAPLGKLTVAQIKAGYQSLKKIEDCIRAGQHGRALMEACNEFYTRIPHDFGLRTPPLIRTQKELSEKIQLLEALGDIEIAIKLVKTELQSPEHPLDQHYRNLHCALRPLDHESYEFKVISQYLQSTHAPTHSDYTMTLLDLFEVEKDGEKEAFREDLHNRMLLWHGSRMSNWVGILSHGLRIAPPEAPITGYMFGKGIYFADMSSKSANYCFASRLKNTGLLLLSEVALGQCNELLEANPKAEGLLQGKHSTKGLGKMAPSSAHFVTLNGSTVPLGPASDTGILNPDGYTLNYNEYIVYNPNQVRMRYLLKVQFNFLQLW

SEQ ID NO: 7752 - protein, 570 aa, Homo sapiens
MAARRRRSTGGGRARALNESKRVNNGNTAPEDSSPAKKTRRCQRQESKKMPVAGGKANKDRTEDKQDESVKALLLKGKAPVDPECTAKVGKAHVYCEGNDVYDVMLNQTNLQFNNNKYYLIQLLEDDAQRNFSVWMRWGRVGKMGQHSLVACSGNLNKAKEIFQKKFLDKTKNNWEDREKFEKVPGKYDMLQMDYATNTQDEEETKKEESLKSPLKPESQLDLRVQELIKLICNVQAMEEMMMEMKYNTKKAPLGKLTVAQIKAGYQSLKKIEDCIRAGQHGRALMEACNEFYTRIPHDFGLRTPPLIRTQKELSEKIQLLEALGDIEIAIKLVKTELQSPEHPLDQHYRNLHCALRPLDHESYEFKVISQYLQSTHAPTHSDYTMTLLDLFEVEKDGEKEAFREDLHNRMLLWHGSRMSNWVGILSHGLRIAPPEAPITGYMFGKGIYFADMSSKSANYCFASRLKNTGLLLLSEVALGQCNELLEANPKAEGLLQGKHSTKGLGKMAPSSAHFVTLNGSTVPLGPASDTGILNPDGYTLNYNEYIVYNPNQVRMRYLLKVQFNFLQLW

SEQ ID NO: 7753 - protein, 540 aa, Homo sapiens
MSLLFLAMAPKPKPWVQTEGPEKKKGRQAGREEDPFRSTAEALKAIPAEKRIIRVDPTCPLSSNPGTQVYEDYNCTLNQTNIENNNNKFYIIQLLQDSNRFFTCWNHWGRVGEVGQSKINHFTRLEDAKKDFEKKFREKTKNNWAERDHFVSHPGKYTLIEVQAEDEAQEAVVKVDRGPVRTVTKRVQPCSLDPATQKLITNIFSKEMFKNTMALMDLDVKKMPLGKLSKQQIARGFEALEALEEALKGPTDGGQSLEELSSHFYTVIPHNFGHSQPPPINSPELLQAKKDMLLVLADIELAQALQAVSEQEKTVEEVPHPLDRDYQLLKCQLQLLDSGAPEYKVIQTYLEQTGSNHRCPTLQHIWKVNQEGEEDRFQAHSKLGNRKLLWHGTNMAVVAAILTSGLRIMPHSGGRVGKGIYFASENSKSAGYVIGMKCGAHHVGYMFLGEVALGREHHINTDNPSLKSPPPGFDSVIARGHTEPDPTQDTELELDGQQVVVPQGQPVPCPEFSSSTFSQSEYLIYQESQCRLRYLLEVHL

SEQ ID NO: 7754 - protein, 533 aa, Homo sapiens
MAPKPKPWVQTEGPEKKKGRQAGREEDPFRSTAEALKAIPAEKRIIRVDPTCPLSSNPGTQVYEDYNCTLNQTNIENNNNKFYIIQLLQDSNRFFTCWNHWGRVGEVGQSKINHFTRLEDAKKDFEKKFREKTKNNWAERDHFVSHPGKYTLIEVQAEDEAQEAVVKVDRGPVRTVTKRVQPCSLDPATQKLITNIFSKEMFKNTMALMDLDVKKMPLGKLSKQQIARGFEALEALEEALKGPTDGGQSLEELSSHFYTVIPHNFGHSQPPPINSPELLQAKKDMLLVLADIELAQALQAVSEQEKTVEEVPHPLDRDYQLLKCQLQLLDSGAPEYKVIQTYLEQTGSNHRCPTLQHIWKVNQEGEEDRFQAHSKLGNRKLLWHGTNMAVVAAILTSGLRIMPHSGGRVGKGIYFASENSKSAGYVIGMKCGAHHVGYMFLGEVALGREHHINTDNPSLKSPPPGFDSVIARGHTEPDPTQDTELELDGQQVVVPQGQPVPCPEFSSSTFSQSEYLIYQESQCRLRYLLEVHL

SEQ ID NO: 7755 - protein, 533 aa, Homo sapiens; identical to SEQ ID NO: 7754

SEQ ID NO: 7756 - protein, 332 aa, Homo sapiens
MAPKPKPWVQTEGPEKKKGRQAGREEDPFRSTAEALKAIPAEKRIIRVDPTCPLSSNPGTQVYEDYNCTLNQTNIENNNNKFYIIQLLQDSNRFFTCWNHWGRVGEVGQSKINHFTRLEDAKKDFEKKFREKTKNNWAERDHFVSHPGKYTLIEVQAEDEAQEAVVKVDRGPVRTVTKRVQPCSLDPATQKLITNIFSKEMFKNTMALMDLDVKKMPLGKLSKQQIARGFEALEALEEALKGPTDGGQSLEELSSHFYTVIPHNFGHSQPPPINSPELLQAKKDMLLVLADIELAQALQAVSEQEKTVEEVPHPLDRDYQLLKCQLQLLDSG

SEQ ID NO: 7757 - protein, 1724 aa, Homo sapiens
MVMGIFANCIFCLKVKYLPQQQKKKLQTDIKENGGKFSFSLNPQCTHIILDNADVLSQYQLNSIQKNHVHIANPDFIWKSIREKRLLDVKNYDPYKPLDITPPPDQKASSSEVKTEGLCPDSATEEEDTVELTEFGMQNVEIPHLPQDFEVAKYNTLEKVGMEGGQEAVVVELQCSRDSRDCPFLISSHFLLDDGMETRRQFAIKKTSEDASEYFENYIEELKKQGFLLREHFTPEATQLASEQLQALLLEEVMNSSTLSQEVSDLVEMIWAEALGHLEHMLLKPVNRISLNDVSKAEGILLLVKAALKNGETAEQLQKMMTEFYRLIPHKGTMPKEVNLGLLAKKADLCQLIRDMVNVCETNLSKPNPPSLAKYRALRCKIEHVEQNTEEFLRVRKEVLQNHHSKSPVDVLQIFRVGRVNETTEFLSKLGNVRPLLHGSPVQNIVGILCRGLLLPKVVEDRGVQRTDVGNLGSGIYFSDSLSTSIKYSHPGETDGTRLLLICDVALGKCMDLHEKDFSLTEAPPGYDSVHGVSQTASVTTDFEDDEFVVYKTNQVKMKYIIKFSMPGDQIKDFHPSDHTELEEYRPEFSNFSKVEDYQLPDAKTSSSTKAGLQDASGNLVPLEDVHIKGRIIDTVAQVIVFQTYTNKSHVPIEAKYIFPLDDKAAVCGFEAFINGKHIVGEIKEKEEAQQEYLEAVTQGHGAYLMSQDAPDVFTVSVGNLPPKAKVLIKITYITELSILGTVGVFFMPATVAPWQQDKALNENLQDTVEKICIKEIGTKQSFSLTMSIEMPYVIEFIFSDTHELKQKRTDCKAVISTMEGSSLDSSGFSLHIGLSAAYLPRMWVEKHPEKESEACMLVFQPDLDVDLPDLASESEVIICLDCSSSMEGVTFLQAKQIALHALSLVGEKQKVNIIQFGTGYKELFSYPKHITSNTMAAEFIMSATPTMGNTDFWKTLRYLSLLYPARGSRNILLVSDGHLQDESLTLQLVKRSRPHTRLFACGIGSTANRHVLRILSQCGAGVFEYFNAKSKHSWRKQIEDQMTRLCSPSCHSVSVKWQQLNPDVPEALQAPAQVPSLFLNDRLLVYGFIPHCTQATLCALIQEKEFRTMVSTTELQKTTGTMIHKLAARALIRDYEDGILHENETSHEMKKQTLKSLIIKLSKENSLITQFTSFVAVEKRDENESPFPDIPKVSELIAKEDVDFLPYMSWQGEPQEAVRNQSLLASSEWPELRLSKRKHRKIPFSKRKMELSQPEVSEDFEEDGLGVLPAFTSNLERGGVEKLLDLSWTESCKPTATEPLFKKVSPWETSTSSFFPILAPAVGSYLPPTARAHSPASLSFASYRQVASFGSAAPPRQFDASQFSQGPVPGTCADWIPQSASCPTGPPQNPPSSPYCGIVFSGSSLSSAQSAPLQHPGGFTTRPSAGTFPELDSPQLHFSLPTDPDPIRGFGSYHPSASSPFHFQPSAASLTANLRLPMASALPEALCSQSRTTPVDLCLLEESVGSLEGSRCPVFAFQSSDTESDELSEVLQDSCFLQIKCDTKDDSILCFLEVKEEDEIVCIQHWQDAVPWTELLSLQTEDGFWKLTPELGLILNLNTNGLHSFLKQKGIQSLGVKGRECLLDLIATMLVLQFIRTRLEKEGIVFKSLMKMDDASISRNIPWAFEAIKQASEWVRRTEGQYPSICPRLELGNDWDSATKQLLGLQPISTVSPLHRVLHYSQG

SEQ ID NO: 7758 - protein, 636 aa, Homo sapiens
MNPSAPSYPMASLYVGDLHPDVTEAMLYEKFSPAGPILSIRVCRDMITRRSLGYAYVNFQQPADAERALDTMNFDVIKGKPVRIMWSQRDPSLRKSGVGNIFIKNLDKSIDNKALYDTFSAFGNILSCKVVCDENGSKGYGFVHFETQEAAERAIEKMNGMLLNDRKVFVGRFKSRKEREAELGARAKEFTNVYIKNFGEDMDDERLKDLFGKFGPALSVKVMTDESGKSKGFGFVSFERHEDAQKAVDEMNGKELNGKQIYVGRAQKKVERQTELKRKFEQMKQDRITRYQGVNLYVKNLDDGIDDERLRKEFSPFGTITSAKVMMEGGRSKGFGFVCFSSPEEATKAVTEMNGRIVATKPLYVALAQRKEERQAHLTNQYMQRMASVRAVPNPVINPYQPAPPSGYFMAAIPQTQNRAAYYPPSQIAQLRPSPRWTAQGARPHPFQNMPGAIRPAAPRPPFSTMRPASSQVPRVMSTQRVANTSTQTMGPRPAAAAAAATPAVRTVPQYKYAAGVRNPQQHLNAQPQVTMQQPAVHVQGQEPLTASMLASAPPQEQKQMLGERLFPLIQAMHPTLAGKITGMLLEIDNSELLHMLESPESLRSKVDEAVAVLQAHQAKEAAQKAVNSATGVPTV

SEQ ID NO: 7759 - protein, 547 aa, Homo sapiens
MNPSAPSYPMASLYVGDLHPDVTEAMLYEKFSPAGPILSIRVCRDMITRRSLGYAYVNFQQPADAERALDTMNFDVIKGKPVRIMWSQRDPSLRKSGVGNIFIKNLDKSIDNKALYDTFSAFGNILSCKVVCDENGSKGYGFVHFETQEAAERAIEKMNGMLLNDRKVFVGRFKSRKEREAELGARAKEFTNVYIKNFGEDMDDERLKDLFGKFGPALSVKVMTDESGKSKGFGFVSFERHEDAQKAVDEMNGKELNGKQIYVGRAQKKVERQTELKRKFEQMKQDRITRYQGVNLYVKNLDDGIDDERLRKEFSPFGTITSAKVMMEGGRSKGFGFVCFSSPEEATKAVTEMNGRIVATKPLYVALAQRKEERQAHLTNQYMQRMASVRAVPNPVINPYQPAPPSGYFMAAIPQTQNRAAYYPPSQIAQLRPSPRWTAQGARPHPAVHVQGQEPLTASMLASAPPQEQKQMLGERLFPLIQAMHPTLAGKITGMLLEIDNSELLHMLESPESLRSKVDEAVAVLQAHQAKEAAQKAVNSATGVPTV

SEQ ID NO: 7760 - protein, 42 aa, Homo sapiens
  VARIANT 1: note = MOD_RES - Any amino acid
XMLESPESLRSKVDEAVAVLQAHQAKEAAQKAVNSATGVPTV

SEQ ID NO: 7761 - protein, 38 aa, Homo sapiens
MNPSAPSYPMASLYVGDLHPDVTEAMLYEKFSPAGPIL

SEQ ID NO: 7762 - protein, 118 aa, Homo sapiens
MNPSAPSYPMASLYVGDLHPDVTEAMLYEKFSPAGPILSIRVCRDMITRRSLGYAYVNFQQPADAERALDTMNFDVIKGKPVRIMWSQRDPSLRKSGVGNIFIKNLDKSIDNKALYDT

SEQ ID NO: 7763 - protein, 43 aa, Homo sapiens
MNPSAPSYPMASLYVGDLHPDVTEAMLYEKFSPAGPILSIRVC

SEQ ID NO: 7764 - protein, 169 aa, Homo sapiens
  VARIANT 1: note = MOD_RES - Any amino acid
XASSQVPRVMSTQRVANTSTQTMGPRPAAAAAAATPAVRTVPQYKYAAGVRNPQQHLNAQPQVTMQQPAVHVQGQEPLTASMLASAPPQEQKQMLGERLFPLIQAMHPTLAGKITGMLLEIDNSELLHMLESPESLRSKVDEAVAVLQAHQAKEAAQKAVNSATGVPTV

SEQ ID NO: 7765 - protein, 61 aa, Homo sapiens
MNPSAPSYPMASLYVGDLHPDVTEAMLYEKFSPAGPILSIRVCRDMITRRSLGYAYVNFQQ

SEQ ID NO: 7766 - protein, 129 aa, Homo sapiens
MNPSAPSYPMASLYVGDLHPDVTEAMLYEKFSPAGPILSIRVCRDMITRRSLGYAYVNFQQPADAERALDTMNFDVIKGKPVRIMWSQRDPSLRKSGVGNIFIKNLDKSIDNKALYDTFSAFGNILSCK

SEQ ID NO: 7767 - protein, 183 aa, Homo sapiens
IRPAAPRPPFSTMRPASSQVPRVMSTQRVANTSTQTMGPRPAAAAAAATPAVRTVPQYKYAAGVRNPQQHLNAQPQVTMQQPAVHVQGQEPLTASMLASAPPQEQKQMLGERLFPLIQAMHPTLAGKITGMLLEIDNSELLHMLESPESLRSKVDEAVAVLQAHQAKEAAQKAVNSATGVPTV

SEQ ID NO: 7768 - protein, 75 aa, Homo sapiens
MNPSAPSYPMASLYVGDLHPDVTEAMLYEKFSPAGPILSIRVCRDMITRRSLGYAYVNFQQPADAERALDTMNFD

SEQ ID NO: 7769 - protein, 335 aa, Homo sapiens
MSKRKAPQETLNGGITDMLTELANFEKNVSQAIHKYNAYRKAASVIAKYPHKIKSGAEAKKLPGVGTKIAEKIDEFLATGKLRKLEKIRQDDTSSSINFLTRVSGIGPSAARKFVDEGIKTLEDLRKNEDKLNHHQRIGLKYFGDFEKRIPREEMLQMQDIVLNEVKKVDSEYIATVCGSFRRGAESSGDMDVLLTHPSFTSESTKQPKLLHQVVEQLQKVHFITDTLSKGETKFMGVCQLPSKNDEKEYPHRRIDIRLIPKDQYYCGVLYFTGSDIFNKNMRAHALEKGFTINEYTIRPLGVTGVAGEPLPVDSEKDIFDYIQWKYREPKDRSE

SEQ ID NO: 7770 - protein, 239 aa, Homo sapiens
  VARIANT 1: note = MOD_RES - Any amino acid
XGDFEKRIPREEMLQMQDIVLNEVKKVDSEYIATVCGSFRRGAESSGDMDVLLTHPSFTSESTKQPKLLHQVVEQLQKVHFITDTLSKGETKFMGVCQLPSKNDEKEYPHRRIDIRLIPKDQYYCGVLYFTGSDIFNKNMRAHALEKGFTINEYTIRPLGVTVLQATREDLMHNMLLGPQLKAIKELQENPCQWIVKKTSLITSSGNTGNPRTGANEACILPGRHNPIGVLIYFLTFAM

SEQ ID NO: 7771 - protein, 280 aa, Homo sapiens
MSKRKAPQETLNGGITDMLTELANFEKNVSQAIHKYNAYRKAASVIAKYPHKIKSGAEAKKLPGVGTKIAEKIDEFLATGKLRKLEKIRQDDTSSSINFLTRVSGIGPSAARKFVDEGIKTLEGSQLDSCPVKGHLNGTESLLDLIWDVMTILKLKNADLRKNEDKLNHHQRIGLKYFGDFEKRIPREEMLQMQDIVLNEVKKVDSEYIATVCGSFRRGAESSGDMDVLLTHPSFTSESTKQPKLLHQVVEQLQKVHFITDTLSKGETKFMGVCQLPSKN

SEQ ID NO: 7772 - protein, 237 aa, Homo sapiens
  VARIANT 1: note = MOD_RES - Any amino acid
XEKIDEFLATGKLRKLEKIRQDDTSSSINFLTRVSGIGPSAARKFVDEGIKTLEDLRKNEDKLNHHQRIGLKYFGDFEKRIPREEMLQMQDIVLNEVKKVDSEYIATVCGSFRRGAESSGDMDVLLTHPSFTSESTKQGVCQLPSKNDEKEYPHRRIDIRLIPKDQYYCGVLYFTGSDIFNKNMRAHALEKGFTINEYTIRPLGVTGVAGEPLPVDSEKDIFDYIQWKYREPKDRSE

SEQ ID NO: 7773 - protein, 181 aa, Homo sapiens
MLQMQDIVLNEVKKVDSEYIATVCGSFRRGAESSGDMDVLLTHPSFTSESTKQPKLLHQVVEQLQKVHFITDTLSKGETKFMGVCQLPSKNDEKEYPHRRIDIRLIPKDQYYCGVLYFTGSDIFNKNMRAHALEKGFTINEYTIRPLGVTGVAGEPLPVDSEKDIFDYIQWKYREPKDRSE

SEQ ID NO: 7774 - protein, 575 aa, Homo sapiens
MDPRGILKAFPKRQKIHADASSKVLAKIPRREEGEEAEEWLSSLRAHVVRTGIGRARAELFEKQIVQHGGQLCPAQGPGVTHIVVDEGMDYERALRLLRLPQLPPGAQLVKSAWLSLCLQERRLVDVAGFSIFIPSRYLDHPQPSKAEQDASIPPGTHEALLQTALSPPPPPTRPVSPPQKAKEAPNTQAQPISDDEASDGEETQVSAADLEALISGHYPTSLEGDCEPSPAPAVLDKWVCAQPSSQKATNHNLHITEKLEVLAKAYSVQGDKWRALGYAKAINALKSFHKPVTSYQEACSIPGIGKRMAEKIIEILESGHLRKLDHISESVPVLELFSNIWGAGTKTAQMWYQQGFRSLEDIRSQASLTTQQAIGLKHYSDFLERMPREEATEIEQTVQKAAQAFNSGLLCVACGSYRRGKATCGDVDVLITHPDGRSHRGIFSRLLDSLRQEGFLTDDLVSQEENGQQQKYLGVCRLPGPGRRHRRLDIIVVPYSEFACALLYFTGSAHFNRSMRALAKTKGMSLSEHALSTAVVRNTHGCKVGPGRVLPTPTEKDVFRLLGLPYREPAERDW

SEQ ID NO: 7775 - protein, 298 aa, Homo sapiens
MHHQKYLQRFLGGKREKKQKEACSIPGIGKRMAEKIIEILESGHLRKLDHISESVPVLELFSNIWGAGTKTAQMWYQQGFRSLEDIRSQASLTTQQAIGLKHYSDFLERMPREEATEIEQTVQKAAQAFNSGLLCVACGSYRRGKATCGDVDVLITHPDGRSHRGIFSRLLDSLRQEGFLTDDLVSQEENGQQQKYLGVCRLPGPGRRHRRLDIIVVPYSEFACALLYFTGSAHFNRSMRALAKTKGMSLSEHALSTAVVRNTHGCKVGPGRVLPTPTEKDVFRLLGLPYREPAERDW

SEQ ID NO: 7776 - protein, 515 aa, Homo sapiens
MDPRGILKAFPKRQKIHADASSKVLAKIPRREEGEEAEEWLSSLRAHVVRTGIGRARAELFEKQIVQHGGQLCPAQGPGVTHIVVDEGMDYERALRLLRLPQLPPGAQLVKSAWLSLCLQERRLVDVAGFSIFIPSRYLDHPQPSKAEQDASIPPGTHEALLQTALSPPPPPTRPVSPPQKAKEAPNTQAQPISDDEASDGEETQVSAADLEALISGHYPTSLEGDCEPSPAPAVLDKWVCAQPSSQKATNHNLHITEKLEVLAKAYSVQGDKWRALGYAKAINALKSFHKPVTSYQEACSIPGIGKRMAEKIIEILESGHLRKLDHISESVPVLELFSNIWGAGTKTAQMWYQQGFRSLEDIRSQASLTTQQAIGLKHYSDFLERMPREEATEIEQTVQKAAQAFNSGLLCVACGSYRRGKATCGDVDVLITHPDGRSHRGIFSRLLDSLRQEGFLTDDLVSQEENGQQQKYLGVCRLPGPGRRHRRLDIIVVPYSEFACALQGGAWPSAAHSH

SEQ ID NO: 7777 - protein, 300 aa, Homo sapiens
MLMHHQKYLQRFLGGKREKKQKEACSIPGIGKRMAEKIIEILESGHLRKLDHISESVPVLELFSNIWGAGTKTAQMWYQQGFRSLEDIRSQASLTTQQAIGLKHYSDFLERMPREEATEIEQTVQKAAQAFNSGLLCVACGSYRRGKATCGDVDVLITHPDGRSHRGIFSRLLDSLRQEGFLTDDLVSQEENGQQQKYLGVCRLPGPGRRHRRLDIIVVPYSEFACALLYFTGSAHFNRSMRALAKTKGMSLSEHALSTAVVRNTHGCKVGPGRVLPTPTEKDVFRLLGLPYREPAERDW

SEQ ID NO: 7778 - protein, 575 aa, Homo sapiens; identical to SEQ ID NO: 7774

SEQ ID NO: 7779 - protein, 171 aa, Homo sapiens
MDYERALRLLRLPQLPPGAQLVKSAWLSLCLQERRLVDVAGFSIFIPSSPSLMMKPVMGKKPRLVQLIWKPSSVATTPPPLREIVSLAQPLLSWISGSVHSPQARRRPITTSISQRSWKFWPKPTVFRETSGGPWAMPRPSMPSRASISLSPRTRRPAVSLGLGSGWLRKS

SEQ ID NO: 7780 - protein, 248 aa, Homo sapiens
MEALCVCSLMPLHWSWILTASHLAAFFQGFRSLEDIRSQASLTTQQAIGLKHYSDFLERMPREEATEIEQTVQKAAQAFNSGLLCVACGSYRRGKATCGDVDVLITHPDGRSHRGIFSRLLDSLRQEGFLTDDLVSQEENGQQQKYLGVCRLPGPGRRHRRLDIIVVPYSEFACALLYFTGSAHFNRSMRALAKTKGMSLSEHALSTAVVRNTHGCKVGPGRVLPTPTEKDVFRLLGLPYREPAERDW

SEQ ID NO: 7781 - protein, 575 aa, Homo sapiens; identical to SEQ ID NO: 7774

SEQ ID NO: 7782 - protein, 487 aa, Homo sapiens
MDYERALRLLRLPQLPPGAQLVKSAWLSLCLQERRLVDVAGFSIFIPSRYLDHPQPSKAEQDASIPPGTHEALLQTALSPPPPPTRPVSPPQKAKEAPNTQAQPISDDEASDGEETQVSAADLEALISGHYPTSLEGDCEPSPAPAVLDKWVCAQPSSQKATNHNLHITEKLEVLAKAYSVQGDKWRALGYAKAINALKSFHKPVTSYQEACSIPGIGKRMAEKIIEILESGHLRKLDHISESVPVLELFSNIWGAGTKTAQMWYQQGFRSLEDIRSQASLTTQQAIGLKHYSDFLERMPREEATEIEQTVQKAAQAFNSGLLCVACGSYRRGKATCGDVDVLITHPDGRSHRGIFSRLLDSLRQEGFLTDDLVSQEENGQQQKYLGVCRLPGPGRRHRRLDIIVVPYSEFACALLYFTGSAHFNRSMRALAKTKGMSLSEHALSTAVVRNTHGCKVGPGRVLPTPTEKDVFRLLGLPYREPAERDW

SEQ ID NO: 7783 - protein, 515 aa, Homo sapiens; identical to SEQ ID NO: 7776

SEQ ID NO: 7784 - protein, 269 aa, Homo sapiens
MDPRGILKAFPKRQKIHADASSKVLAKIPRREEGEEAEEWLSSLRAHVVRTGIGRARAELFEKQIVQHGGQLCPAQGPGVTHIVVDEGMDYERALRLLRLPQLPPGAQLVKSAWLSLCLQERRLVDVAGFSIFIPSRYLDHPQPSKAEQDASIPPGTHEALLQTALSPPPPPTRPVSPPQKAKEAPNTQAQPISDDEASDGEETQVSAADLEALISGHYPTSLEGDCEPSPAPAVLDKWVCAQPSSQKATNHNLHITEKLEVLAKAYSV

SEQ ID NO: 7785 - protein, 470 aa, Homo sapiens
MDPRGILKAFPKRQKIHADASSKVLAKIPRREEGEEAEEWLSSLRAHVVRTGIGRARAELFEKQIVQHGGQLCPAQGPGVTHIVVDEGMDYERALRLLRLPQLPPGAQLVKSAWLSLCLQERRLVDVAGFSIFIPSRYLDHPQPSKAEQDASIPPGTHEALLQTALSPPPPPTRPVSPPQKAKEAPNTQAQPISDDEASDGEETQEACSIPGIGKRMAEKIIEILESGHLRKLDHISESVPVLELFSNIWGAGTKTAQMWYQQGFRSLEDIRSQASLTTQQAIGLKHYSDFLERMPREEATEIEQTVQKAAQAFNSGLLCVACGSYRRGKATCGDVDVLITHPDGRSHRGIFSRLLDSLRQEAVPSVGPGFLTDDLVSQEENGQQQKYLGVCRLPGPGRRHRRLDIIVVPYSEFACALLYFTGSAHFNRSMRALAKTKGMSLSEHALSTAVVRNTHGCKVGPGRVLPTPT

SEQ ID NO: 7786 - protein, 334 aa, Homo sapiens
MDPRGILKAFPKRQKIHADASSKPSCASALRCLCPESDIGADSACPGPAEWLSSLRAHVVRTGIGRARAELFEKQIVQHGGQLCPAQGPGVTHIVVDEGMDYERALRLLRLPQLPPGAQLVKSAWLSLCLQERRLVDVAGFSIFIPSRYLDHPQPSKAEQDASIPPGTHEALLQTALSPPPPPTRPVSPPQKAKEAPNTQAQPISDDEASDGEETQVSAADLEALISGHYPTSLEGDCEPSPAPAVLDKWVCAQPSSQKATNHNLHITEKLEVLAKAYSVQGDKWRALGYAKAINALKSFHKPVTSYQEACSIPGIGKRMAEKIIEILESGHLR

SEQ ID NO: 7787 - protein, 218 aa, Homo sapiens
MHHQKYLQRFLGGKREKKQKEACSIPGIGKRMAEKIIEILESGHLRKLDHISESVPVLELFSNIWGAGTKTAQMWYQQGFRSLEDIRSQASLTTQQAIGLKHYSDFLERMPREEATEIEQTVQKAAQAFNSGLLCVACGSYRRGKATCGDVDVLITHPDGRSHRGIFSRLLDSLRQEGFLTDDLVSQEENGQQQKYLGVCRLPGPGRRHRRLDIIVVP

SEQ ID NO: 7788 - protein, 188 aa, Homo sapiens
MDPRGILKAFPKRQKIHADASSKVLAKIPRREEGEEAEEWLSSLRAHVVRTGIGRARAELFEKQIVQHGGQLCPAQGPGVTHIVVDEGMDYERALRLLRLPQLPPGAQLVKSAWLSLCLQERRLVDVAGFSIFIPSRYLDHPQPSKAEQDASIPPGTHEALLQTALSPPPPPTRPVSPPQKAKEAPNT

SEQ ID NO: 7789 - protein, 171 aa, Homo sapiens; identical to SEQ ID NO: 7779

SEQ ID NO: 7790 - protein, 152 aa, Homo sapiens
MDYERALRLLRLPQLPPGAQLVKSAWLSLCLQERRLVDVAGFSIFIPSSPSLMMKPVMGKKPRLVQLIWKPSSVATTPPPLREIVSLAQPLLSWISGSVHSPQARRRPITTSISQRSWKFWPKPTVFRETSGGPWAMPRPSMPSRASISLSP

SEQ ID NO: 7791 - protein, 312 aa, Homo sapiens
MHHQKYLQRFLGGKREKKQKPISDDEASDGEETQEACSIPGIGKRMAEKIIEILESGHLRKLDHISESVPVLELFSNIWGAGTKTAQMWYQQGFRSLEDIRSQASLTTQQAIGLKHYSDFLERMPREEATEIEQTVQKAAQAFNSGLLCVACGSYRRGKATCGDVDVLITHPDGRSHRGIFSRLLDSLRQEGFLTDDLVSQEENGQQQKYLGVCRLPGPGRRHRRLDIIVVPYSEFACALLYFTGSAHFNRSMRALAKTKGMSLSEHALSTAVVRNTHGCKVGPGRVLPTPTEKDVFRLLGLPYREPAERDW

SEQ ID NO: 7792 - protein, 466 aa, Homo sapiens
MADQLYLENIDEFVTDQNKIVTYKWLSYTLGVHVNQAKQMLYDYVERKRKENSGAQLHVTYLVSGSLIQNGHSCHKVAVVREDKLEAVKSKLAVTASIHVYSIQKAMLKDSGPLFNTDYDILKSNLQNCSKFSAIQCAAAVPRAPAESSSSSKKFEQSHLHMSSETQANNELTTNGHGPPASKQVSQQPKGIMGMFASKAAAKTQETNKETKTEAKEVTNASAAGNKAPGKGNMMSNFFGKAAMNKFKVNLDSEQAVKEEKIVEQPTVSVTEPKLATPAGLKKSSKKAEPVKVLQKEKKRGKRVALSDDETKETENMRKKRRRIKLPESDSSEDEVFPDSPGAYEAESPSPPPPPSPPLEPVPKTEPEPPSVKSSSGENKRKRKRVLKSKTYLDGEGCIVTEKVYESESCTDSEEELNMKTSSVHRPPAMTVKKEPREERKGPKKGTAALGKANRQVSITGFFQRK

SEQ ID NO: 7793 - protein, 427 aa, Homo sapiens
MLYDYVERKRKENSGAQLHVTYLVSGSLIQNGHSCHKVAVVREDKLEAVKSKLAVTASIHVYSIQKAMLKDSGPLFNTDYDILKSNLQNCSKFSAIQCAAAVPRAPAESSSSSKKFEQSHLHMSSETQANNELTTNGHGPPASKQVSQQPKGIMGMFASKAAAKTQETNKETKTEAKEVTNASAAGNKAPGKGNMMSNFFGKAAMNKFKVNLDSEQAVKEEKIVEQPTVSVTEPKLATPAGLKKSSKKAEPVKVLQKEKKRGKRVALSDDETKETENMRKKRRRIKLPESDSSEDEVFPDSPGAYEAESPSPPPPPSPPLEPVPKTEPEPPSVKSSSGENKRKRKRVLKSKTYLDGEGCIVTEKVYESESCTDSEEELNMKTSSVHRPPAMTVKKEPREERKGPKKGTAALGKANRQVSITGFFQRK

SEQ ID NO: 7794 - protein, 360 aa, Homo sapiens
MLKDSGPLFNTDYDILKSNLQNCSKFSAIQCAAAVPRAPAESSSSSKKFEQSHLHMSSETQANNELTTNGHGPPASKQVSQQPKGIMGMFASKAAAKTQETNKETKTEAKEVTNASAAGNKAPGKGNMMSNFFGKAAMNKFKVNLDSEQAVKEEKIVEQPTVSVTEPKLATPAGLKKSSKKAEPVKVLQKEKKRGKRVALSDDETKETENMRKKRRRIKLPESDSSEDEVFPDSPGAYEAESPSPPPPPSPPLEPVPKTEPEPPSVKSSSGENKRKRKRVLKSKTYLDGEGCIVTEKVYESESCTDSEEELNMKTSSVHRPPAMTVKKEPREERKGPKKGTAALGKANRQVSITGFFQRK

SEQ ID NO: 7795 - protein, 267 aa, Homo sapiens
MADQLYLENIDEFVTDQNKIVTYKWLSYTLGVHVNQAKQMLYDYVERKRKENSGAQLHVTYLVSGSLIQNGHSCHKVAVVREDKLEAVKSKLAVTASIHVYSIQKAMLKDSGPLFNTDYDILKSNLQNCSKFSAIQCAAAVPRAPAESSSSSKKFEQSHLHMSSETQANNELTTNGHGPPASKQVSQQPKGIMGMFASKAAAKTQETNKETKTEAKEVTNASAAGNKAPGKGNMMSNFFGKAAMNKFKVNLDSEQAVKEEKIKEKKR

SEQ ID NO: 7796 - protein, 521 aa, Homo sapiens
MGEVEAPGRLWLESPPGGAPPIFLPSDGQALVLGRGPLTQVTDRKCSRTQVELVADPETRTVAVKQLGVNPSTTGTQELKPGLEGSLGVGDTLYLVNGLHPLTLRWEETRTPESQPDTPPGTPLVSQDEKRDAELPKKRMRKSNPGWENLEKLLVFTAAGVKPQGKVAGFDLDGTLITTRSGKVFPTGPSDWRILYPEIPRKLRELEAEGYKLVIFTNQMSIGRGKLPAEEFKAKVEAVVEKLGVPFQVLVATHAGLYRKPVTGMWDHLQEQANDGTPISIGDSIFVGDAAGRPANWAPGRKKKDFSCADRLFALNLGLPFATPEEFFLKWPAAGFELPAFDPRTVSRSGPLCLPESRALLSASPEVVVAVGFPGAGKSTFLKKHLVSAGYVHVNRDTLGSWQRCVTTCETALKQGKRVAIDNTNPDAASRARYVQCARAAGVPCRCFLFTATLEQARHNNRFREMTDSSHIPVSDMVMYGYRKQFEAPTLAEGFSAILEIPFRLWVEPRLGRLYCQFSEG

SEQ ID NO: 7797 - protein, 232 aa, Homo sapiens
MLGAMFRAGTPMPPNLNSQGGGHYFIDRDGKAFRHILNFLRLGRLDLPRGYGETALLRAEADFYQIRPLLDALRELEASQGTPAPTAALLHADVDVSPRLVHFSARRGPHHYELSSVQVDTFRANLFCTDSECLGALRARFGVASGDRAEGSPHFHLEWAPRPVELPEVEYGRLGLQPLWTGGPGERREVVGTPSFLEEVLRVALEHGFRLDSVFPDPEDLLNSRSLRFVRH

SEQ ID NO: 7798 - protein, 1718 aa, Homo sapiens
MNQNTTEPVAATETLAEVPEHVLRGLPEEVRLFPSAVDKTRIGVWATKPILKGKKFGPFVGDKKKRSQVKNNVYMWEVYYPNLGWMCIDATDPEKGNWLRYVNWACSGEEQNLFPLEINRAIYYKTLKPIAPGEELLVWYNGEDNPEIAAAIEEERASARSKRSSPKSRKGKKKSQENKNKGNKIQDIQLKTSEPDFTSANMRDSAEGPKEDEEKPSASALEQPATLQEVASQEVPPELATPAPAWEPQPEPDERLEAAACEVNDLGEEEEEEEEEDEEEEEDDDDDELEDEGEEEASMPNENSVKEPEIRCDEKPEDLLEEPKTTSEETLEDCSEVTPAMQIPRTKEEANGDVFETFMFPCQHCERKFTTKQGLERHMHIHISTVNHAFKCKYCGKAFGTQINRRRHERRHEAGLKRKPSQTLQPSEDLADGKASGENVASKDDSSPPSLGPDCLIMNSEKASQDTINSSVVEENGEVKELHPCKYCKKVFGTHTNMRRHQRRVHERHLIPKGVRRKGGLEEPQPPAEQAQATQNVYVPSTEPEEEGEADDVYIMDISSNISENLNYYIDGKIQTNNNTSNCDVIEMESASADLYGINCLLTPVTVEITQNIKTTQVPVTEDLPKEPLGSTNSEAKKRRTASPPALPKIKAETDSDPMVPSCSLSLPLSISTTEAVSFHKEKSVYLSSKLKQLLQTQDKLTPAGISATEIAKLGPVCVSAPASMLPVTSSRFKRRTSSPPSSPQHSPALRDFGKPSDGKAAWTDAGLTSKKSKLESHSDSPAWSLSGRDERETVSPPCFDEYKMSKEWTASSAFSSVCNQQPLDLSSGVKQKAEGTGKTPVQWESVLDLSVHKKHCSDSEGKEFKESHSVQPTCSAVKKRKPTTCMLQKVLLNEYNGIDLPVENPADGTRSPSPCKSLEAQPDPDLGPGSGFPAPTVESTPDVCPSSPALQTPSLSSGQLPPLLIPTDPSSPPPCPPVLTVATPPPPLLPTVPLPAPSSSASPHPCPSPLSNATAQSPLPILSPTVSPSPSPIPPVEPLMSAASPGPPTLSSSSSSSSSSSSFSSSSSSSSPSPPPLSAISSVVSSGDNLEASLPMISFKQEELENEGLKPREEPQSAAEQDVVVQETFNKNFVCNVCESPFLSIKDLTKHLSIHAEEWPFKCEFCVQLFKDKTDLSEHRFLLHGVGNIFVCSVCKKEFAFLCNLQQHQRDLHPDKVCTHHEFESGTLRPQNFTDPSKAHVEHMQSLPEDPLETSKEEEELNDSSEELYTTIKIMASGIKTKDPDVRLGLNQHYPSFKPPPFQYHHRNPMGIGVTATNFTTHNIPQTFTTAIRCTKCGKGVDNMPELHKHILACASASDKKRYTPKKNPVPLKQTVQPKNGVVVLDNSGKNAFRRMGQPKRLNFSVELSKMSSNKLKLNALKKKNQLVQKAILQKNKSAKQKADLKNACESSSHICPYCNREFTYIGSLNKHAAFSCPKKPLSPPKKKVSHSSKKGGHSSPASSDKNSNSNHRRRTADAEIKMQSMQTPLGKTRARSSGPTQVPLPSSSFRSKQNVKFAASVKSKKPSSSSLRNSSPIRMAKITHVEGKKPKAVAKNHSAQLSSKTSRSLHVRVQKSKAVLQSKSTLASKKRTDRFNIKSRERSGGPVTRSLQLAAAADLSENKREDGSAKQELKDFSYSLRLASRCSPPAAPYITRQYRKVKAPAAAQFQGPFFKE

SEQ ID NO: 7799 - protein, 1682 aa, Homo sapiens
MNQNTTEPVAATETLAEVPEHVLRGLPEEVRLFPSAVDKTRIGVWATKPILKGKKFGPFVGDKKKRSQVKNNVYMWEVYYPNLGWMCIDATDPEKGNWLRYVNWACSGEEQNLFPLEINRAIYYKTLKPIAPGEELLVWYNGEDNPEIAAAIEEERASARSKRSSPKSRKGKKKSQENKNKGNKIQDIQLKTSEPDFTSANMRDSAEGPKEDEEKPSASALEQPATLQEVASQEVPPELATPAPAWEPQPEPDERLEAAACEVNDLGEEEEEEEEEDEEEEEDDDDDELEDEGEEEASMPNENSVKEPEIRCDEKPEDLLEEPKTTSEETLEDCSEVTPAMQIPRTKEEANGDVFETFMFPCQHCERKFTTKQGLERHMHIHISTVNHAFKCKYCGKAFGTQINRRRHERRHEAGLKRKPSQTLQPSEDLADGKASGENVASKDDSSPPSLGPDCLIMNSEKASQDTINSSVVEENGEVKELHPCKYCKKVFGTHTNMRRHQRRVHERHLIPKGVRRKGGLEEPQPPAEQAQATQNVYVPSTEPEEEGEADDVYIMDISSNISENLNYYIDGKIQTNNNTSNCDVIEMESASADLYGINCLLTPVTVEITQNIKTTQVPVTEDLPKEPLGSTNSEAKKRRTASPPALPKIKAETDSDPMVPSCSLSLPLSISTTEAVSFHKEKSVYLSSKLKQLLQTQDKLTPAGISATEIAKLGPVCVSAPASMLPVTSSRFKRRTSSPPSSPQHSPALRDFGKPSDGKAAWTDAGLTSKKSKLESHSDSPAWSLSGRDERETVSPPCFDEYKMSKEWTASSAFSSVCNQQPLDLSSGVKQKAEGTGKTPVQWESVLDLSVHKKHCSDSEGKEFKESHSVQPTCSAVKKRKPTTCMLQKVLLNEYNGIDLPVENPADGTRSPSPCKSLEAQPDPDLGPGSGFPAPTVESTPDVCPSSPALQTPSLSSGQLPPLLIPTDPSSPPPCPPVLTVATPPPPLLPTVPLPAPSSSASPHPCPSPLSNATAQSPLPILSPTVSPSPSPIPPVEPLMSAASPGPPTLSSSSSSSSSSSSFSSSSSSSSPSPPPLSAISSVVSSGDNLEASLPMISFKQEELENEGLKPREEPQSAAEQDVVVQETFNKNFVCNVCESPFLSIKDLTKHLSIHAEEWPFKCEFCVQLFKDKTDLSEHRFLLHGVGNIFVCSVCKKEFAFLCNLQQHQRDLHPDKVCTHHEFESGTLRPQNFTDPSKAHVEHMQSLPEDPLETSKEEEELNDSSEELYTTIKIMASGIKTKDPDVRLGLNQHYPSFKPPPFQYHHRNPMGIGVTATNFTTHNIPQTFTTAIRCTKCGKGVDNMPELHKHILACASASDKKRYTPKKNPVPLKQTVQPKNGVVVLDNSGKNAFRRMGQPKRLNFSVELSKMSSNKLKLNALKKKNQLVQKAILQKNKSAKQKADLKNACESSSHICPYCNREFTYIGSLNKHAAFSCPKKPLSPPKKKVSHSSKKGGHSSPASSDKNSNSNHRRRTADAEIKMQSMQTPLGKTRARSSGPTQVPLPSSSFRSKQNVKFAASVKSKKPSSSSLRNSSPIRMAKITHVEGKKPKAVAKNHSAQLSSKTSRSLHVRVQKSKAVLQSKSTLASKKRTDRFNIKSRERSGGPVTRSLQLAAAADLSENKREDGSAKQELKDFRNFL

SEQ ID NO: 7800 - protein, 1481 aa, Homo sapiens
MRDSAEGPKEDEEKPSASALEQPATLQEVASQEVPPELATPAPAWEPQPEPDERLEAAACEVNDLGEEEEEEEEEDEEEEEDDDDDELEDEGEEEASMPNENSVKEPEIRCDEKPEDLLEEPKTTSEETLEDCSEVTPAMQIPRTKEEANGDVFETFMFPCQHCERKFTTKQGLERHMHIHISTVNHAFKCKYCGKAFGTQINRRRHERRHEAGLKRKPSQTLQPSEDLADGKASGENVASKDDSSPPSLGPDCLIMNSEKASQDTINSSVVEENGEVKELHPCKYCKKVFGTHTNMRRHQRRVHERHLIPKGVRRKGGLEEPQPPAEQAQATQNVYVPSTEPEEEGEADDVYIMDISSNISENLNYYIDGKIQTNNNTSNCDVIEMESASADLYGINCLLTPVTVEITQNIKTTQVPVTEDLPKEPLGSTNSEAKKRRTASPPALPKIKAETDSDPMVPSCSLSLPLSISTTEAVSFHKEKSVYLSSKLKQLLQTQDKLTPAGISATEIAKLGPVCVSAPASMLPVTSSRFKRRTSSPPSSPQHSPALRDFGKPSDGKAAWTDAGLTSKKSKLESHSDSPAWSLSGRDERETVSPPCFDEYKMSKEWTASSAFSSVCNQQPLDLSSGVKQKAEGTGKTPVQWESVLDLSVHKKHCSDSEGKEFKESHSVQPTCSAVKKRKPTTCMLQKVLLNEYNGIDLPVENPADGTRSPSPCKSLEAQPDPDLGPGSGFPAPTVESTPDVCPSSPALQTPSLSSGQLPPLLIPTDPSSPPPCPPVLTVATPPPPLLPTVPLPAPSSSASPHPCPSPLSNATAQSPLPILSPTVSPSPSPIPPVEPLMSAASPGPPTLSSSSSSSSSSSSFSSSSSSSSPSPPPLSAISSVVSSGDNLEASLPMISFKQEELENEGLKPREEPQSAAEQDVVVQETFNKNFVCNVCESPFLSIKDLTKHLSIHAEEWPFKCEFCVQLFKDKTDLSEHRFLLHGVGNIFVCSVCKKEFAFLCNLQQHQRDLHPDKVCTHHEFESGTLRPQNFTDPSKAHVEHMQSLPEDPLETSKEEEELNDSSEELYTTIKIMASGIKTKDPDVRLGLNQHYPSFKPPPFQYHHRNPMGIGVTATNFTTHNIPQTFTTAIRCTKCGKGVDNMPELHKHILACASASDKKRYTPKKNPVPLKQTVQPKNGVVVLDNSGKNAFRRMGQPKRLNFSVELSKMSSNKLKLNALKKKNQLVQKAILQKNKSAKQKADLKNACESSSHICPYCNREFTYIGSLNKHAAFSCPKKPLSPPKKKVSHSSKKGGHSSPASSDKNSNSNHRRRTADAEIKMQSMQTPLGKTRARSSGPTQVPLPSSSFRSKQNVKFAASVKSKKPSSSSLRNSSPIRMAKITHVEGKKPKAVAKNHSAQLSSKTSRSLHVRVQKSKAVLQSKSTLASKKRTDRFNIKSRERSGGPVTRSLQLAAAADLSENKREDGSAKQELKDFRNFL

SEQ ID NO: 7801 - protein, 226 aa, Homo sapiens
MNQNTTEPVAATETLAEVPEHVLRGLPEEVRLFPSAVDKTRIGVWATKPILKGKKFGPFVGDKKKRSQVKNNVYMWEVYYPNLGWMCIDATDPEKGNWLRYVNWACSGEEQNLFPLEINRAIYYKTLKPIAPGEELLVWYNGEDNPEIAAAIEEERASARSKRSSPKSRKATASAWRPDALHQRPRTSPGSIGRSKLQLQPSSRDHSSKSRHSGCSLTAPEVTWNQ

SEQ ID NO: 7802 - protein, 1682 aa, Homo sapiens
MNQNTTEPVAATETLAEVPEHVLRGLPEEVRLFPSAVDKTRIGVWATKPILKGKKFGPFVGDKKKRSQVKNNVYMWEVYYPNLGWMCIDATDPEKGNWLRYVNWACSGEEQNLFPLEINRAIYYKTLKPIAPGEELLVWYNGEDNPEIAAAIEEERASARSKRSSPKSRKGKKKSQENKNKGNKIQDIQLKTSEPDFTSANMRDSAEGPKEDEEKPSASALEQPATLQEVASQEVPPELATPAPAWEPQPEPDERLEAAACEVNDLGEEEEEEEEEDEEEEEDDDDDELEDEGEEEASMPNENSVKEPEIRCDEKPEDLLEEPKTTSEETLEDCSEVTPAMQIPRTKEEANGDVFETFMFPCQHCERKFTTKQGLERHMHIHISTVNHAFKCKYCGKAFGTQINRRRHERRHEAGLKRKPSQTLQPSEDLADGKASGENVASKDDSSPPSLGPDCLIMNSEKASQDTINSSVVEENGEVKELHPCKYCKKVFGTHTNMRRHQRRVHERHLIPKGVRRKGGLEEPQPPAEQAQATQNVYVPSTEPEEEGEADDVYIMDISSNISENLNYYIDGKIQTNNNTSNCDVIEMESASADLYGINCLLTPVTVEITQNIKTTQVPVTEDLPKEPLGSTNSEAKKRRTASPPALPKIKAETDSDPMVPSCSLSLPLSISTTEAVSFHKEKSVYLSSKLKQLLQTQDKLTPAGISATEIAKLGPVCVSAPASMLPVTSSRFKRRTSSPPSSPQHSPALRDFGKPSDGKAAWTDAGLTSKKSKLESHSDSPAWSLSGRDERETVSPPCFDEYKMSKEWTASSAFSSVCNQQPLDLSSGVKQKAEGTGKTPVQWESVLDLSVHKKHCSDSEGKEFKESHSVQPTCSAVKKRKPTTCMLQKVLLNEYNGIDLPVENPADGTRSPSPCKSLEAQPDPDLGPGSGFPAPTVESTPDVCPSSPALQTPSLSSGQLPPLLIPTDPSSPPPCPPVLTVATPPPPLLPTVPLPAPSSSASPHPCPSPLSNATAQSPLPILSPTVSPSPSPIPPVEPLMSAASPGPPTLSSSSSSSSSSSSFSSSSSSSSPSPPPLSAISSVVSSGDNLEASLPMISFKQEELENEGLKPREEPQSAAEQDVVVQETFNKNFVCNVCESPFLSIKDLTKHLSIHAEEWPFKCEFCVQLFKDKTDLSEHRFLLHGVGNIFVCSVCKKEFAFLCNLQQHQRDLHPDKVCTHHEFESGTLRPQNFTDPSKAHVEHMQSLPEDPLETSKEEEELNDSSEELYTTIKIMASGIKTKDPDVRLGLNQHYPSFKPPPFQYHHRNPMGIGVTATNFTTHNIPQTFTTAIRCTKCGKGVDNMPELHKHILACASASDKKRYTPKKNPVPLKQTVQPKNGVVVLDNSGKNAFRRMGQPKRLNFSVELSKMSSNKLKLNALKKKNQLVQKAILQKNKSAKQKADLKNACESSSHICPYCNREFTYIGSLNKHAAFSCPKKPLSPPKKKVSHSSKKGGHSSPASSDKNSNSNHRRRTADAEIKMQSMQTPLGKTRARSSGPTQVPLPSSSFRSKQNVKFAASVKSKKPSSSSLRNSSPIRMAKITHVEGKKPKAVAKNHSAQLSSKTSRSLHVRVQKSKAVLQSKSTLASKKRTDRFNIKSRERSGGPVTRSLQLAAAADLSENKREDGSAKQELKDFRCFL

SEQ ID NO: 7803 - protein, 78 aa, Homo sapiens
MRDSAEGPKEDEEKPSASALEQPATLQEVASQEVPPELATPAPAWEPQPEPDERLEAAACEVNDLGEEEEEEEEEDEE

SEQ ID NO: 7804 - protein, 1481 aa, Homo sapiens; identical to SEQ ID NO: 7800

SEQ ID NO: 7805 - protein, 140 aa, Homo sapiens
MAGWNAYIDNLMADGTCQDAAIVGYKDSPSVWAAVPGKTFVNITPAEVGVLVGKDRSSFYVNGLTLGGQKCSVIRDSLLQDGEFSMDLRTKSTGGAPTFNVTVTKTDKTLVLLMGKEGVHGGLINKKCYEMASHLRRSQY

SEQ ID NO: 7806 - protein, 831 aa, Homo sapiens
MTELKAKGPRAPHVAGGPPSPEVGSPLLCRPAAGPFPGSQTSDTLPEVSAIPISLDGLLFPRPCQGQDPSDEKTQDQQSLSDVEGAYSRAEATRGAGGSSSSPPEKDSGLLDSVLDTLLAPSGPGQSQPSPPACEVTSSWCLFGPELPEDPPAAPATQRVLSPLMSRSGCKVGDSSGTAAAHKVLPRGLSPARQLLLPASESPHWSGAPVKPSPQAAAVEVEEEDGSESEESAGPLLKGKPRALGGAAAGGGAAAVPPGAAAGGVALVPKEDSRFSAPRVALVEQDAPMAPGRSPLATTVMDFIHVPILPLNHALLAARTRQLLEDESYDGGAGAASAFAPPRSSPCASSTPVAVGDFPDCAYPPDAEPKDDAYPLYSDFQPPALKIKEEEEGAEASARSPRSYLVAGANPAAFPDFPLGPPPPLPPRATPSRPGEAAVTAAPASASVSSASSSGSTLECILYKAEGAPPQQGPFAPPPCKAPGASGCLLPRDGLPSTSASAAAAGAAPALYPALGLNGLPQLGYQAAVLKEGLPQVYPPYLNYLRPDSEASQSPQYSFESLPQKICLICGDEASGCHYGVLTCGSCKVFFKRAMEGQHNYLCAGRNDCIVDKIRRKNCPACRLRKCCQAGMVLGGFRNLHIDDQITLIQYSWMSLMVFGLGWRSYKHVSGQMLYFAPDLILNEQRMKESSFYSLCLTMWQIPQEFVKLQVSQEEFLCMKVLLLLNTIPLEGLRSQTQFEEMRSSYIRELIKAIGLRQKGVVSSSQRFYQLTKLLDNLHDLVKQLHLYCLNTFIQSRALSVEFPEMMSEVIAAQLPKILAGMVKPLLFHKK

SEQ ID NO: 7807 - protein, 933 aa, Homo sapiens
MTELKAKGPRAPHVAGGPPSPEVGSPLLCRPAAGPFPGSQTSDTLPEVSAIPISLDGLLFPRPCQGQDPSDEKTQDQQSLSDVEGAYSRAEATRGAGGSSSSPPEKDSGLLDSVLDTLLAPSGPGQSQPSPPACEVTSSWCLFGPELPEDPPAAPATQRVLSPLMSRSGCKVGDSSGTAAAHKVLPRGLSPARQLLLPASESPHWSGAPVKPSPQAAAVEVEEEDGSESEESAGPLLKGKPRALGGAAAGGGAAAVPPGAAAGGVALVPKEDSRFSAPRVALVEQDAPMAPGRSPLATTVMDFIHVPILPLNHALLAARTRQLLEDESYDGGAGAASAFAPPRSSPCASSTPVAVGDFPDCAYPPDAEPKDDAYPLYSDFQPPALKIKEEEEGAEASARSPRSYLVAGANPAAFPDFPLGPPPPLPPRATPSRPGEAAVTAAPASASVSSASSSGSTLECILYKAEGAPPQQGPFAPPPCKAPGASGCLLPRDGLPSTSASAAAAGAAPALYPALGLNGLPQLGYQAAVLKEGLPQVYPPYLNYLRPDSEASQSPQYSFESLPQKICLICGDEASGCHYGVLTCGSCKVFFKRAMEGQHNYLCAGRNDCIVDKIRRKNCPACRLRKCCQAGMVLGGRKFKKFNKVRVVRALDAVALPQPVGVPNESQALSQRFTFSPGQDIQLIPPLINLLMSIEPDVIYAGHDNTKPDTSSSLLTSLNQLGERQLLSVVKWSKSLPGFRNLHIDDQITLIQYSWMSLMVFGLGWRSYKHVSGQMLYFAPDLILNEQRMKESSFYSLCLTMWQIPQEFVKLQVSQEEFLCMKVLLLLNTIPLEGLRSQTQFEEMRSSYIRELIKAIGLRQKGVVSSSQRFYQLTKLLDNLHDLVKQLHLYCLNTFIQSRALSVEFPEMMSEVIAAQLPKILAGMVKPLLFHKK

SEQ ID NO: 7808 - protein, 695 aa, Homo sapiens
MTELKAKGPRAPHVAGGPPSPEVGSPLLCRPAAGPFPGSQTSDTLPEVSAIPISLDGLLFPRPCQGQDPSDEKTQDQQSLSDVEGAYSRAEATRGAGGSSSSPPEKDSGLLDSVLDTLLAPSGPGQSQPSPPACEVTSSWCLFGPELPEDPPAAPATQRVLSPLMSRSGCKVGDSSGTAAAHKVLPRGLSPARQLLLPASESPHWSGAPVKPSPQAAAVEVEEEDGSESEESAGPLLKGKPRALGGAAAGGGAAAVPPGAAAGGVALVPKEDSRFSAPRVALVEQDAPMAPGRSPLATTVMDFIHVPILPLNHALLAARTRQLLEDESYDGGAGAASAFAPPRSSPCASSTPVAVGDFPDCAYPPDAEPKDDAYPLYSDFQPPALKIKEEEEGAEASARSPRSYLVAGANPAAFPDFPLGPPPPLPPRATPSRPGEAAVTAAPASASVSSASSSGSTLECILYKAEGAPPQQGPFAPPPCKAPGASGCLLPRDGLPSTSASAAAAGAAPALYPALGLNGLPQLGYQAAVLKEGLPQVYPPYLNYLRPDSEASQSPQYSFESLPQKICLICGDEASGCHYGVLTCGSCKVFFKRAMEGQHNYLCAGRNDCIVDKIRRKNCPACRLRKCCQAGMVLGGFRNLHIDDQITLIQYSWMSLMVFGLGWRSYKHVSGQMLYFAPDLILNDSFGRATKSNPV

SEQ ID NO: 7809 - protein, 764 aa, Homo sapiens
MTELKAKGPRAPHVAGGPPSPEVGSPLLCRPAAGPFPGSQTSDTLPEVSAIPISLDGLLFPRPCQGQDPSDEKTQDQQSLSDVEGAYSRAEATRGAGGSSSSPPEKDSGLLDSVLDTLLAPSGPGQSQPSPPACEVTSSWCLFGPELPEDPPAAPATQRVLSPLMSRSGCKVGDSSGTAAAHKVLPRGLSPARQLLLPASESPHWSGAPVKPSPQAAAVEVEEEDGSESEESAGPLLKGKPRALGGAAAGGGAAAVPPGAAAGGVALVPKEDSRFSAPRVALVEQDAPMAPGRSPLATTVMDFIHVPILPLNHALLAARTRQLLEDESYDGGAGAASAFAPPRSSPCASSTPVAVGDFPDCAYPPDAEPKDDAYPLYSDFQPPALKIKEEEEGAEASARSPRSYLVAGANPAAFPDFPLGPPPPLPPRATPSRPGEAAVTAAPASASVSSASSSGSTLECILYKAEGAPPQQGPFAPPPCKAPGASGCLLPRDGLPSTSASAAAAGAAPALYPALGLNGLPQLGYQAAVLKEGLPQVYPPYLNYLRPDSEASQSPQYSFESLPQKICLICGDEASGCHYGVLTCGSCKVFFKRAMEGRKFKKFNKVRVVRALDAVALPQPVGVPNESQALSQRFTFSPGQDIQLIPPLINLLMSIEPDVIYAGHDNTKPDTSSSLLTSLNQLGERQLLSVVKWSKSLPGFRNLHIDDQITLIQYSWMSLMVFGLGWRSYKHVSGQMLYFAPDLILNESHRSLSSFKLAKKSSSV

SEQ ID NO: 7810 - protein, 339 aa, Homo sapiens
MEGQHNYLCAGRNDCIVDKIRRKNCPACRLRKCCQAGMVLGGRKFKKFNKVRVVRALDAVALPQPVGVPNESQALSQRFTFSPGQDIQLIPPLINLLMSIEPDVIYAGHDNTKPDTSSSLLTSLNQLGERQLLSVVKWSKSLPGFRNLHIDDQITLIQYSWMSLMVFGLGWRSYKHVSGQMLYFAPDLILNEQRMKESSFYSLCLTMWQIPQEFVKLQVSQEEFLCMKVLLLLNTIPLEGLRSQTQFEEMRSSYIRELIKAIGLRQKGVVSSSQRFYQLTKLLDNLHDLVKQLHLYCLNTFIQSRALSVEFPEMMSEVIAAQLPKILAGMVKPLLFHKK

SEQ ID NO: 7811 - protein, 803 aa, Homo sapiens
MTELKAKGPRAPHVAGGPPSPEVGSPLLCRPAAGPFPGSQTSDTLPEVSAIPISLDGLLFPRPCQGQDPSDEKTQDQQSLSDVEGAYSRAEATRGAGGSSSSPPEKDSGLLDSVLDTLLAPSGPGQSQPSPPACEVTSSWCLFGPELPEDPPAAPATQRVLSPLMSRSGCKVGDSSGTAAAHKVLPRGLSPARQLLLPASESPHWSGAPVKPSPQAAAVEVEEEDGSESEESAGPLLKGKPRALGGAAAGGGAAAVPPGAAAGGVALVPKEDSRFSAPRVALVEQDAPMAPGRSPLATTVMDFIHVPILPLNHALLAARTRQLLEDESYDGGAGAASAFAPPRSSPCASSTPVAVGDFPDCAYPPDAEPKDDAYPLYSDFQPPALKIKEEEEGAEASARSPRSYLVAGANPAAFPDFPLGPPPPLPPRATPSRPGEAAVTAAPASASVSSASSSGSTLECILYKAEGAPPQQGPFAPPPCKAPGASGCLLPRDGLPSTSASAAAAGAAPALYPALGLNGLPQLGYQAAVLKEGLPQVYPPYLNYLRPDSEASQSPQYSFESLPQKICLICGDEASGCHYGVLTCGSCKVFFKRAMEGQHNYLCAGRNDCIVDKIRRKNCPACRLRKCCQAGMVLGGRKFKKFNKVRVVRALDAVALPQPVGVPNESQALSQRFTFSPGQDIQLIPPLINLLMSIEPDVIYAGHDNTKPDTSSSLLTSLNQLGERQLLSVVKWSKSLPGFRNLHIDDQITLIQYSWMSLMVFGLGWRSYKHVSGQMLYFAPDLILNESHRSLSSFKLAKKSSSV

SEQ ID NO: 7812 - protein, 690 aa, Homo sapiens [sequence omitted]

SEQ ID NO: 7813 - protein, 469 aa, Homo sapiens
MDVENEQILNVNPADPDNLSDSLFSGDEENAGTEEIKNEINGNWISASSINEARINAKAKRRLRKNSSRDSGRGDSVSDSGSDALRSGLTVPTSPKGRLLDRRSRSGKGRGLPKKGGAGGKGVWGTPGQVYDVEEVDVKDPNYDDDQENCVYETVVLPLDERAFEKTLTPIIQEYFEHGDTNEVAEMLRDLNLGEMKSGVPVLAVSLALEGKASHREMTSKLLSDLCGTVMSTTDVEKSFDKLLKDLPELALDTPRAPQLVGQFIARAVGDGILCNTYIDSYKGTVDCVQARAALDKATVLLSMSKGGKRKDSVWGSGGGQQSVNHLVKEIDMLLKEYLLSGDISEAEHCLKELEVPHFHHELVYEAIIMVLESTGESTFKMILDLLKSLWKSSTITVDQMKRGYERIYNEIPDINLDVPHSYSVLERFVEECFQAGIISKQLRDLCPSRGRKRFVSEGDGGRLKPESY

SEQ ID NO: 7814 - protein, 458 aa, Homo sapiens
MTKYPDNLSDSLFSGDEENAGTEEIKNEINGNWISASSINEARINAKAKRRLRKNSSRDSGRGDSVSDSGSDALRSGLTVPTSPKGRLLDRRSRSGKGRGLPKKGGAGGKGVWGTPGQVYDVEEVDVKDPNYDDDQENCVYETVVLPLDERAFEKTLTPIIQEYFEHGDTNEVAEMLRDLNLGEMKSGVPVLAVSLALEGKASHREMTSKLLSDLCGTVMSTTDVEKSFDKLLKDLPELALDTPRAPQLVGQFIARAVGDGILCNTYIDSYKGTVDCVQARAALDKATVLLSMSKGGKRKDSVWGSGGGQQSVNHLVKEIDMLLKEYLLSGDISEAEHCLKELEVPHFHHELVYEAIIMVLESTGESTFKMILDLLKSLWKSSTITVDQMKRGYERIYNEIPDINLDVPHSYSVLERFVEECFQAGIISKQLRDLCPSRGRKRFVSEGDGGRLKPESY

SEQ ID NO: 7815 - protein, 231 aa, Homo sapiens
MDVENEQILNVNPAENAGTEEIKNEINGNWISASSINEARINAKAKRRLRKNSSRDSGRGDSVSDSGSDALRSGLTVPTSPKGRLLDRRSRSGKGRGLPKKGGAGGKGVWGTPGQVYDVEEVDVKDPNYDDDQENCVYETVVLPLDERAFEKTLTPIIQEYFEHGDTNEVAEMLRDLNLGEMKSGVPVLAVSLALEGKASHREMTSKLLSDLCGTVMSTTDVEKSFDKLLK

SEQ ID NO: 7816 - protein, 261 aa, Homo sapiens
MFEARLVQGSILKKVLEALKDLINEACWDISSSGVNLQSMDSSHVSLVQLTLRSEGFDTYRCDRNLAMGVNLTSMSKILKCAGNEDIITLRAEDNADTLALVFEAPNQEKVSDYEMKLMDLDVEQLGIPEQEYSCVVKMPSGEFARICRDLSHIGDAVVISCAKDGVKFSASGELGNGNIKLSQTSNVDKEEEAVTIEMNEPVQLTFALRYLNFFTKATPLSSTVTLSMSADVPLVVEYKIADMGHLKYYLAPKIEDEEGS

SEQ ID NO: 7817 - protein, 261 aa, Homo sapiens; identical to SEQ ID NO: 7816

SEQ ID NO: 7818 - protein, 379 aa, Homo sapiens
MSSPSLSDLGKREPAAAADERGTQQRRACANATWNSIHNGVIAVFQRKGLPDQELFSLNEGVRQLLKTELGSFFTEYLQNQLLTKGMVILRDKIRFYEGQKLLDSLAETWDFFFSDVLPMLQAIFYPVQGKEPSVRQLALLHFRNAITLSVKLEDALARAHARVPPAIVQMLLVLQGVHESRGVTEDYLRLETLVQKVVSPYLGTYGLHSSEGPFTHSCILEKRLLRRSRSGDVLAKNPVVRSKSYNTPLLNPVQEHEAEGAAAGGTSIRRHSVSEMTSCPEPQGFSDPPGQGPTGTFRSSPAPHSGPCPSRLYPTTQPPEQGLDPTRSSLPRSSPENLVDQILESVDSDSEGIFIDFGRGRGSGMSDLEGSGGRQSVV

SEQ ID NO: 7819 - protein, 388 aa, Homo sapiens
MRTLRRLKFMSSPSLSDLGKREPAAAADERGTQQRRACANATWNSIHNGVIAVFQRKGLPDQELFSLNEGVRQLLKTELGSFFTEYLQNQLLTKGMVILRDKIRFYEGQKLLDSLAETWDFFFSDVLPMLQAIFYPVQGKEPSVRQLALLHFRNAITLSVKLEDALARAHARVPPAIVQMLLVLQGVHESRGVTEDYLRLETLVQKVVSPYLGTYGLHSSEGPFTHSCILEKRLLRRSRSGDVLAKNPVVRSKSYNTPLLNPVQEHEAEGAAAGGTSIRRHSVSEMTSCPEPQGFSDPPGQGPTGTFRSSPAPHSGPCPSRLYPTTQPPEQGLDPTRSSLPRSSPENLVDQILESVDSDSEGIFIDFGRGRGSGMSDLEGSGGRQSVV

SEQ ID NO: 7820 - protein, 267 aa, Homo sapiens
MSSPSLSDLGKREPAAAADERGTQQRRACANATWNSIHNGVIAVFQRKGLPDQELFSLNEGVRQLLKTELGSFFTEYLQNQLLTKGMVILRDKIRFYEGQKLLDSLAETWDFFFSDVLPMLQAIFYPVQGKEPSVRQLALLHFRNAITLSVKLEDALARAHARVPPAIVQMLLVLQGVHESRGVTEDYLRLETLVQKVVSPYLGTYGLHSSEGPFTHSCILEKRLLRRSRSGDVLAKNPVVRSKSYNTPLLNPVQEHEAEGAAAGGT

SEQ ID NO: 7821 - protein, 226 aa, Homo sapiens
MSSPSLSDLGKREPAAAADERGTQQRRACANATWNSIHNGVIAVFQRKGLPDQELFSLNEGVRQLLKTELGSFFTEYLQNQLLTKGMVILRDKIRFYEGQKLLDSLAETWDFFFSDVLPMLQAIFYPVQGKEPSVRQLALLHFRNAITLSVKLEDALARAHARVPPAIVQMLLVLQGVHESRGVTEDYLRLETLVQKVVSPYLGTYGLHSSEGPFTHSCILEKRLL

SEQ ID NO: 7822 - protein, 411 aa, Homo sapiens
MVCLELSQREAWGSGSPEKMPAQPEGLYRLKFMSSPSLSDLGKREPAAAADERGTQQRRACANATWNSIHNGVIAVFQRKGLPDQELFSLNEGVRQLLKTELGSFFTEYLQNQLLTKGMVILRDKIRFYEGQKLLDSLAETWDFFFSDVLPMLQAIFYPVQGKEPSVRQLALLHFRNAITLSVKLEDALARAHARVPPAIVQMLLVLQGVHESRGVTEDYLRLETLVQKVVSPYLGTYGLHSSEGPFTHSCILEKRLLRRSRSGDVLAKNPVVRSKSYNTPLLNPVQEHEAEGAAAGGTSIRRHSVSEMTSCPEPQGFSDPPGQGPTGTFRSSPAPHSGPCPSRLYPTTQPPEQGLDPTRSSLPRSSPENLVDQILESVDSDSEGIFIDFGRGRGSGMSDLEGSGGRQSVV

SEQ ID NO: 7823 - protein, 882 aa, Homo sapiens
MEPAPARSPRPQQDPARPQEPTMPPPETPSEGRQPSPSPSPTERAPASEEEFQFLRCQQCQAEAKCPKLLPCLHTLCSGCLEASGMQCPICQAPWPLGADTPALDNVFFESLQRRLSVYRQIVDAQAVCTRCKESADFWCFECEQLLCAKCFEAHQWFLKHEARPLAELRNQSVREFLDGTRKTNNIFCSNPNHRTPTLTSIYCRGCSKPLCCSCALLDSSHSELKCDISAEIQQRQEELDAMTQALQEQDSAFGAVHAQMHAAVGQLGRARAETEELIRERVRQVVAHVRAQERELLEAVDARYQRDYEEMASRLGRLDAVLQRIRTGSALVQRMKCYASDQEVLDMHGFLRQALCRLRQEEPQSLQAAVRTDGFDEFKVRLQDLSSCITQGKDAAVSKKASPEAASTPRDPIDVDLPEEAERVKAQVQALGLAEAQPMAVVQSVPGAHPVPVYAFSIKGPSYGEDVSNTTTAQKRKCSQTQCPRKVIKMESEEGKEARLARSSPEQPRPSTSKAVSPPHLDGPPSPRSPVIGSEVFLPNSNHVASGAGEAEERVVVISSSEDSDAENSSSRELDDSSSESSDLQLEGPSTLRVLDENLADPQAEDRPLVFFDLKIDNETQKISQLAAVNRESKFRVVIQPEAFFSIYSKAVSLEVGLQHFLSFLSSMRRPILACYKLWGPGLPNFFRALEDINRLWEFQEAISGFLAALPLIRERVPGASSFKLKNLAQTYLARNMSERSAMAAVLAMRDLCRLLEVSPGPQLAQHVYPFSSLQCFASLQPLVQAAVLPRAEARLLALHNVSFMELLSAHRRDRQGGLKKYSRYLSLQTTTLPPAQPAFNLQALGTYFEGLLEGPALARAEGVSTPLAGRGLAERASQQS

SEQ ID NO: 7824 - protein, 829 aa, Homo sapiens
MEPAPARSPRPQQDPARPQEPTMPPPETPSEGRQPSPSPSPTERAPASEEEFQFLRCQQCQAEAKCPKLLPCLHTLCSGCLEASGMQCPICQAPWPLGADTPALDNVFFESLQRRLSVYRQIVDAQAVCTRCKESADFWCFECEQLLCAKCFEAHQWFLKHEARPLAELRNQSVREFLDGTRKTNNIFCSNPNHRTPTLTSIYCRGCSKPLCCSCALLDSSHSELKCDISAEIQQRQEELDAMTQALQEQDSAFGAVHAQMHAAVGQLGRARAETEELIRERVRQVVAHVRAQERELLEAVDARYQRDYEEMASRLGRLDAVLQRIRTGSALVQRMKCYASDQEVLDMHGFLRQALCRLRQEEPQSLQAAVRTDGFDEFKVRLQDLSSCITQGKDAAVSKKASPEAASTPRDPIDVDLPEEAERVKAQVQALGLAEAQPMAVVQSVPGAHPVPVYAFSIKGPSYGEDVSNTTTAQKRKCSQTQCPRKVIKMESEEGKEARLARSSPEQPRPSTSKAVSPPHLDGPPSPRSPVIGSEVFLPNSNHVASGAGEAEERVVVISSSEDSDAENSCMEPMETAEPQSSPAHSSPAHSSPAHSSPVQSLLRAQGASSLPCGTYHPPAWPPHQPAEQAATPDAEPHSEPPDHQERPAVHRGIRYLLYRAQRAIRLRHALRLHPQLHRAPIRTWSPHVVQASTPAITGPLNHPANAQEHPAQLQRGISPPHRIRGAVRSRSRSLRGSSHLSQWLNNFFALPFSSMASQLDMSSVVGAGESRAQTLGAGVPPGDSVRGSMEASQVQVPLEASPITFPPPCAPERPPISPVPGARQAGL

SEQ ID NO: 7825 - protein, 781 aa, Homo sapiens
MEPAPARSPRPQQDPARPQEPTMPPPETPSEGRQPSPSPSPTERAPASEEEFQFLRCQQCQAEAKCPKLLPCLHTLCSGCLEASGMQCPICQAPWPLGADTPALDNVFFESLQRRLSVYRQIVDAQAVCTRCKESADFWCFECEQLLCAKCFEAHQWFLKHEARPLAELRNQSVREFLDGTRKTNNIFCSNPNHRTPTLTSIYCRGCSKPLCCSCALLDSSHSELKCDISAEIQQRQEELDAMTQALQEQDSAFGAVHAQMHAAVGQLGRARAETEELIRERVRQVVAHVRAQERELLEAVDARYQRDYEEMASRLGRLDAVLQRIRTGSALVQRMKCYASDQEVLDMHGFLRQALCRLRQEEPQSLQAAVRTDGFDEFKVRLQDLSSCITQGKDAAVSKKASPEAASTPRDPIDVDLDVSNTTTAQKRKCSQTQCPRKVIKMESEEGKEARLARSSPEQPRPSTSKAVSPPHLDGPPSPRSPVIGSEVFLPNSNHVASGAGEAEERVVVISSSEDSDAENSCMEPMETAEPQSSPAHSSPAHSSPAHSSPVQSLLRAQGASSLPCGTYHPPAWPPHQPAEQAATPDAEPHSEPPDHQERPAVHRGIRYLLYRAQRAIRLRHALRLHPQLHRAPIRTWSPHVVQASTPAITGPLNHPANAQEHPAQLQRGISPPHRIRGAVRSRSRSLRGSSHLSQWLNNFFALPFSSMASQLDMSSVVGAGESRAQTLGAGVPPGDSVRGSMEASQVQVPLEASPITFPPPCAPERPPISPVPGARQAGL

SEQ ID NO: 7826 - protein, 423 aa, Homo sapiens
MEPAPARSPRPQQDPARPQEPTMPPPETPSEGRQPSPSPSPTERAPASEEEFQFLRCQQCQAEAKCPKLLPCLHTLCSGCLEASGMQCPICQAPWPLGADTPALDNVFFESLQRRLSVYRQIVDAQAVCTRCKESADFWCFECEQLLCAKCFEAHQWFLKHEARPLAELRNQSVREFLDGTRKTNNIFCSNPNHRTPTLTSIYCRGCSKPLCCSCALLDSSHSELKCDISAEIQQRQEELDAMTQALQEQDSAFGAVHAQMHAAVGQLGRARAETEELIRERVRQVVAHVRAQERELLEAVDARYQRDYEEMASRLGRLDAVLQRIRTGSALVQRMKCYASDQEVLDMHGFLRQALCRLRQEEPQSLQAAVRTDGFDEFKVRLQDLSSCITQGKDAAVSKKASPEAASTPRDPIDVDLRNALW

SEQ ID NO: 7827 - protein, 435 aa, Homo sapiens
MEPAPARSPRPQQDPARPQEPTMPPPETPSEGRQPSPSPSPTERAPASEEEFQFLRCQQCQAEAKCPKLLPCLHTLCSGCLEASGMQCPICQAPWPLGADTPALDNVFFESLQRRLSVYRQIVDAQAVCTRCKESADFWCFECEQLLCAKCFEAHQWFLKHEARPLAELRNQSVREFLDGTRKTNNIFCSNPNHRTPTLTSIYCRGCSKPLCCSCALLDSSHSELKCDISAEIQQRQEELDAMTQALQEQDSAFGAVHAQMHAAVGQLGRARAETEELIRERVRQVVAHVRAQERELLEAVDARYQRDYEEMASRLGRLDAVLQRIRTGSALVQRMKCYASDQEVLDMHGFLRQALCRLRQEEPQSLQAAVRTDGFDEFKVRLQDLSSCITQGKDAAVSKKASPEAASTPRDPIDVDLLPPPAHALTGPAQSSTH

SEQ ID NO: 7828 - protein, 633 aa, Homo sapiens
MEPAPARSPRPQQDPARPQEPTMPPPETPSEGRQPSPSPSPTERAPASEEEFQFLRCQQCQAEAKCPKLLPCLHTLCSGCLEASGMQCPICQAPWPLGADTPALDNVFFESLQRRLSVYRQIVDAQAVCTRCKESADFWCFECEQLLCAKCFEAHQWFLKHEARPLAELRNQSVREFLDGTRKTNNIFCSNPNHRTPTLTSIYCRGCSKPLCCSCALLDSSHSELKCDISAEIQQRQEELDAMTQALQEQDSAFGAVHAQMHAAVGQLGRARAETEELIRERVRQVVAHVRAQERELLEAVDARYQRDYEEMASRLGRLDAVLQRIRTGSALVQRMKCYASDQEVLDMHGFLRQALCRLRQEEPQSLQAAVRTDGFDEFKVRLQDLSSCITQGKDAAVSKKASPEAASTPRDPIDVDLPEEAERVKAQVQALGLAEAQPMAVVQSVPGAHPVPVYAFSIKGPSYGEDVSNTTTAQKRKCSQTQCPRKVIKMESEEGKEARLARSSPEQPRPSTSKAVSPPHLDGPPSPRSPVIGSEVFLPNSNHVASGAGEAEERVVVISSSEDSDAENSSSRELDDSSSESSDLQLEGPSTLRVLDENLADPQAEDRPLVFFDLKIDNESGFSWGYPHPFLI

SEQ ID NO: 7829 - protein, 443 aa, Homo sapiens
MAVVQSVPGAHPVPVYAFSIKGPSYGEDVSNTTTAQKRKCSQTQCPRKVIKMESEEGKEARLARSSPEQPRPSTSKAVSPPHLDGPPSPRSPVIGSEVFLPNSNHVASGAGEAEERVVVISSSEDSDAENSSSRELDDSSSESSDLQLEGPSTLRVLDENLADPQAEDRPLVFFDLKIDNETQKISQLAAVNRESKFRVVIQPEAFFSIYSKAVSLEVGLQHFLSFLSSMRRPILACYKLWGPGLPNFFRALEDINRLWEFQEAISGFLAALPLIRERVPGASSFKLKNLAQTYLARNMSERSAMAAVLAMRDLCRLLEVSPGPQLAQHVYPFSSLQCFASLQPLVQAAVLPRAEARLLALHNVSFMELLSAHRRDRQGGLKKYSRYLSLQTTTLPPAQPAFNLQALGTYFEGLLEGPALARAEGVSTPLAGRGLAERASQQS

SEQ ID NO: 7830 - protein, 865 aa, Homo sapiens
MEPAPARSPRPQQDPARPQEPTMPPPETPSEGRQPSPSPSPTERAPASEEEFQFLRCQQCQAEAKCPKLLPCLHTLCSGCLEASGMQCPICQAPWPLGADTPALDNVFFESLQRRLSVYRQIVDAQAVCTRCKESADFWCFECEQLLCAKCFEAHQWFLKHEARPLAELRNQSVREFLDGTRKTNNIFCSNPNHRTPTLTSIYCRGCSKPLCCSCALLDSSHSELKCDISAEIQQRQEELDAMTQALQEQDSAFGAVHAQMHAAVGQLGRARAETEELIRERVRQVVAHVRAQERELLEAVDARYQRDYEEMASRLGRLDAVLQRIRTGSALVQRMKCYASDQEVLDMHGFLRQALCRLRQEEPQSLQAAVRTDGFDEFKVRLQDLSSCITQGKDAAVSKKASPEAASTPRDPIDVDLPEEAERVKAQVQALGLAEAQPMAVVQSVPGAHPVPVYAFSIKGPSYGEDVSNTTTAQKRKCSQTQCPRKVIKMESEEGKEARLARSSPEQPRPSTSKAVSPPHLDGPPSPRSPVIGSEVFLPNSNHVASGAGEAEERVVVISSSEDSDAENSSSRELDDSSSESSDLQLEGPSTLRVLDENLADPQAEDRPLVFFDLKIDNETQKISQLAAVNRESKFRVVIQPEAFFSFLSSMRRPILACYKLWGPGLPNFFRALEDINRLWEFQEAISGFLAALPLIRERVPGASSFKLKNLAQTYLARNMSERSAMAAVLAMRDLCRLLEVSPGPQLAQHVYPFSSLQCFASLQPLVQAAVLPRAEARLLALHNVSFMELLSAHRRDRQGGLKKYSRYLSLQTTTLPPAQPAFNLQALGTYFEGLLEGPALARAEGVSTPLAGRGLAERASQQS

SEQ ID NO: 7831 - protein, 611 aa, Homo sapiens
MEPAPARSPRPQQDPARPQEPTMPPPETPSEGRQPSPSPSPTERAPASEEEFQFLRCQQCQAEAKCPKLLPCLHTLCSGCLEASGMQCPICQAPWPLGADTPALDNVFFESLQRRLSVYRQIVDAQAVCTRCKESADFWCFECEQLLCAKCFEAHQWFLKHEARPLAELRNQSVREFLDGTRKTNNIFCSNPNHRTPTLTSIYCRGCSKPLCCSCALLDSSHSELKCDISAEIQQRQEELDAMTQALQEQDSAFGAVHAQMHAAVGQLGRARAETEELIRERVRQVVAHVRAQERELLEAVDARYQRDYEEMASRLGRLDAVLQRIRTGSALVQRMKCYASDQEVLDMHGFLRQALCRLRQEEPQSLQAAVRTDGFDEFKVRLQDLSSCITQGKDAAVSKKASPEAASTPRDPIDVDLPEEAERVKAQVQALGLAEAQPMAVVQSVPGAHPVPVYAFSIKGPSYGEDVSNTTTAQKRKCSQTQCPRKVIKMESEEGKEARLARSSPEQPRPSTSKAVSPPHLDGPPSPRSPVIGSEVFLPNSNHVASGAGEAEERVVVISSSEDSDAENSVSGPEVQPRTPASPHFRSQGAQPQQVTLRLALRLGNFPVRH

SEQ ID NO: 7832 - protein, 560 aa, Homo sapiens
MEPAPARSPRPQQDPARPQEPTMPPPETPSEGRQPSPSPSPTERAPASEEEFQFLRCQQCQAEAKCPKLLPCLHTLCSGCLEASGMQCPICQAPWPLGADTPALDNVFFESLQRRLSVYRQIVDAQAVCTRCKESADFWCFECEQLLCAKCFEAHQWFLKHEARPLAELRNQSVREFLDGTRKTNNIFCSNPNHRTPTLTSIYCRGCSKPLCCSCALLDSSHSELKCDISAEIQQRQEELDAMTQALQEQDSAFGAVHAQMHAAVGQLGRARAETEELIRERVRQVVAHVRAQERELLEAVDARYQRDYEEMASRLGRLDAVLQRIRTGSALVQRMKCYASDQEVLDMHGFLRQALCRLRQEEPQSLQAAVRTDGFDEFKVRLQDLSSCITQGKDAAVSKKASPEAASTPRDPIDVDLPEEAERVKAQVQALGLAEAQPMAVVQSVPGAHPVPVYAFSIKGPSYGEDVSNTTTAQKRKCSQTQCPRKVIKMESEEGKEARLARSSPEQPRPSTSKAVSPPHLDGPPSPRSPVIGSEVFLPNSNHVASGAGEAGRERNALW

SEQ ID NO: 7833 - protein, 585 aa, Homo sapiens
MEPAPARSPRPQQDPARPQEPTMPPPETPSEGRQPSPSPSPTERAPASEEEFQFLRCQQCQAEAKCPKLLPCLHTLCSGCLEASGMQCPICQAPWPLGADTPALDNVFFESLQRRLSVYRQIVDAQAVCTRCKESADFWCFECEQLLCAKCFEAHQWFLKHEARPLAELRNQSVREFLDGTRKTNNIFCSNPNHRTPTLTSIYCRGCSKPLCCSCALLDSSHSELKCDISAEIQQRQEELDAMTQALQEQDSAFGAVHAQMHAAVGQLGRARAETEELIRERVRQVVAHVRAQERELLEAVDARYQRDYEEMASRLGRLDAVLQRIRTGSALVQRMKCYASDQEVLDMHGFLRQALCRLRQEEPQSLQAAVRTDGFDEFKVRLQDLSSCITQGKDAAVSKKASPEAASTPRDPIDVDLDVSNTTTAQKRKCSQTQCPRKVIKMESEEGKEARLARSSPEQPRPSTSKAVSPPHLDGPPSPRSPVIGSEVFLPNSNHVASGAGEAEERVVVISSSEDSDAENSSSRELDDSSSESSDLQLEGPSTLRVLDENLADPQAEDRPLVFFDLKIDNESGFSWGYPHPFLI

SEQ ID NO: 7834 - protein, 160 aa, Homo sapiens
MQPASAKWYDRRDYVFIEFCVEDSKDVNVNFEKSKLTFSCLGGSDNFKHLNEIDLFHCIDPNDSKHKRTDRSILCCLRKGESGQSWPRLTKERAKLNWLSVDFNNWKDWEDDSDEDMSNFDRFSEMMNNMGGDEDVDLPEVDGADDDSQDSDDEKMPDLE

SEQ ID NO: 7835 - protein, 562 aa, Homo sapiens
MSRSLLLWFLLFLLLLPPLPVLLADPGAPTPVNPCCYYPCQHQGICVRFGLDRYQCDCTRTGYSGPNCTIPGLWTWLRNSLRPSPSFTHFLLTHGRWFWEFVNATFIREMLMRLVLTVRSNLIPSPPTYNSAHDYISWESFSNVSYYTRILPSVPKDCPTPMGTKGKKQLPDAQLLARRFLLRRKFIPDPQGTNLMFAFFAQHFTHQFFKTSGKMGPGFTKALGHGVDLGHIYGDNLERQYQLRLFKDGKLKYQVLDGEMYPPSVEEAPVLMHYPRGIPPQSQMAVGQEVFGLLPGLMLYATLWLREHNRVCDLLKAEHPTWGDEQLFQTTRLILIGETIKIVIEEYVQQLSGYFLQLKFDPELLFGVQFQYRNRIAMEFNHLYHWHPLMPDSFKIGGGRNMDHHILHVAVDVIRESREMRLQPFNEYRKRFGMKPYTSFQELVGEKEMAAELEELYGDIDALEFYPGLLLEKCHPNSIFGESMIEIGAPFSLKGLLGNPICSPEYWKPSTFGGEVGFNIVKTATLKKLVCLNTKTCPYVSFRVPDASQDDGPAVERPSTEL

SEQ ID NO: 7836 - protein, 599 aa, Homo sapiens
MSRSLLLWFLLFLLLLPPLPVLLADPGAPTPVNPCCYYPCQHQGICVRFGLDRYQCDCTRTGYSGPNCTIPGLWTWLRNSLRPSPSFTHFLLTHGRWFWEFVNATFIREMLMRLVLTVRSNLIPSPPTYNSAHDYISWESFSNVSYYTRILPSVPKDCPTPMGTKGKKQLPDAQLLARRFLLRRKFIPDPQGTNLMFAFFAQHFTHQFFKTSGKMGPGFTKALGHGVDLGHIYGDNLERQYQLRLFKDGKLKYQVLDGEMYPPSVEEAPVLMHYPRGIPPQSQMAVGQEVFGLLPGLMLYATLWLREHNRVCDLLKAEHPTWGDEQLFQTTRLILIGETIKIVIEEYVQQLSGYFLQLKFDPELLFGVQFQYRNRIAMEFNHLYHWHPLMPDSFKVGSQEYSYEQFLFNTSMLVDYGVEALVDAFSRQIAGRIGGGRNMDHHILHVAVDVIRESREMRLQPFNEYRKRFGMKPYTSFQELVGEKEMAAELEELYGDIDALEFYPGLLLEKCHPNSIFGESMIEIGAPFSLKGLLGNPICSPEYWKPSTFGGEVGFNIVKTATLKKLVCLNTKTCPYVSFRVPDASQDDGPAVERPSTEL

SEQ ID NO: 7837 - protein, 490 aa, Homo sapiens
MLMRLVLTVRSNLIPSPPTYNSAHDYISWESFSNVSYYTRILPSVPKDCPTPMGTKGKKQLPDAQLLARRFLLRRKFIPDPQGTNLMFAFFAQHFTHQFFKTSGKMGPGFTKALGHGVDLGHIYGDNLERQYQLRLFKDGKLKYQVLDGEMYPPSVEEAPVLMHYPRGIPPQSQMAVGQEVFGLLPGLMLYATLWLREHNRVCDLLKAEHPTWGDEQLFQTTRLILIGETIKIVIEEYVQQLSGYFLQLKFDPELLFGVQFQYRNRIAMEFNHLYHWHPLMPDSFKVGSQEYSYEQFLFNTSMLVDYGVEALVDAFSRQIAGRIGGGRNMDHHILHVAVDVIRESREMRLQPFNEYRKRFGMKPYTSFQELVGEKEMAAELEELYGDIDALEFYPGLLLEKCHPNSIFGESMIEIGAPFSLKGLLGNPICSPEYWKPSTFGGEVGFNIVKTATLKKLVCLNTKTCPYVSFRVPDASQDDGPAVERPSTEL

SEQ ID NO: 7838 - protein, 156 aa, Homo sapiens
SLLLWFLLFLLLLPPLPVLLADPGAPTPAGLWTWLRNSLRPSPSFTHFLLTHGRWFWEFVNATFIREMLMRLVLTVRSNLIPSPPTYNSAHDYISWESFSNFFKTSGKMGPGFTKALGHGVDLGHIYGDNLERQYQLRLFKDGKLKYQVLDGEMYP

SEQ ID NO: 7839 - protein, 537 aa, Homo sapiens
MRKPRLMNPCCYYPCQHQGICVRFGLDRYQCDCTRTGYSGPNCTIPGLWTWLRNSLRPSPSFTHFLLTHGRWFWEFVNATFIREMLMRLVLTVRSNLIPSPPTYNSAHDYISWESFSNVSYYTRILPSVPKDCPTPMGTKGKKQLPDAQLLARRFLLRRKFIPDPQGTNLMFAFFAQHFTHQFFKTSGKMGPGFTKALGHGVDLGHIYGDNLERQYQLRLFKDGKLKYQVLDGEMYPPSVEEAPVLMHYPRGIPPQSQMAVGQEVFGLLPGLMLYATLWLREHNRVCDLLKAEHPTWGDEQLFQTTRLILIGETIKIVIEEYVQQLSGYFLQLKFDPELLFGVQFQYRNRIAMEFNHLYHWHPLMPDSFKIGGGRNMDHHILHVAVDVIRESREMRLQPFNEYRKRFGMKPYTSFQELVGEKEMAAELEELYGDIDALEFYPGLLLEKCHPNSIFGESMIEIGAPFSLKGLLGNPICSPEYWKPSTFGGEVGFNIVKTATLKKLVCLNTKTCPYVSFRVPDASQDDGPAVERPSTEL

SEQ ID NO: 7840 - protein, 604 aa, Homo sapiens
MLARALLLCAVLALSHTANPCCSHPCQNRGVCMSVGFDQYKCDCTRTGFYGENCSTPEFLTRIKLFLKPTPNTVHYILTHFKGFWNVVNNIPFLRNAIMSYVLTSRSHLIDSPPTYNADYGYKSWEAFSNLSYYTRALPPVPDDCPTPLGVKGKKQLPDSNEIVEKLLLRRKFIPDPQGSNMMFAFFAQHFTHQFFKTDHKRGPAFTNGLGHGVDLNHIYGETLARQRKLRLFKDGKMKYQIIDGEMYPPTVKDTQAEMIYPPQVPEHLRFAVGQEVFGLVPGLMMYATIWLREHNRVCDVLKQEHPEWGDEQLFQTSRLILIGETIKIVIEDYVQHLSGYHFKLKFDPELLFNKQFQYQNRIAAEFNTLYHWHPLLPDTFQIHDQKYNYQQFIYNNSILLEHGITQFVESFTRQIAGRVAGGRNVPPAVQKVSQASIDQSRQMKYQSFNEYRKRFMLKPYESFEELTGEKEMSAELEALYGDIDAVELYPALLVEKPRPDAIFGETMVEVGAPFSLKGLMGNVICSPAYWKPSTFGGEVGFQIINTASIQSLICNNVKGCPFTSFSVPDPELIKTVTINASSSRSGLDDINPTVLLKERSTEL

SEQ ID NO: 7841 - protein, 537 aa, Homo sapiens
SLVPATNYIYTPLNQLKGGTIVNVYGVVKFFKPPYLSKGTDYCSVVTIVDQTNVKLTCLLFSGNYEALPIIYKNGDIVRFHRLKIQVYKKETQGITSSGFASLTFEGTLGAPIIPRTSSKYFNFTTEDHKMVEALRVWASTHMSPSWTLLKLCDVQPMQYFDLTCQLLGKAEVDGASFLLKVWDGTRTPFPSWRVLIQDLVLEGDLSHIHRLQNLTIDILVYDNHVHVARSLKVGSFLRIYSLHTKLQSMNSENQTMLSLEFHLHGGTSYGRGIRVLPESNSDVDQLKKDLESANLTANQHSDVICQSEPDDSFPSSGSVSLYEVERCQQLSATILTDHQYLERTPLCAILKQKAPQQYRIRAKLRSYKPRRLFQSVKLHCPKCHLLQEVPHEGDLDIIFQDGATKTPDVKLQNTSLYDSKIWTTKNQKGRKVAVHFVKNNGILPLSNECLLLIEGGTLSEICKLSNKFNSVIPVRSGHEDLELLDLSAPFLIQGTIHHYGCKQCSSLRSIQNLNSLVDKTSWIPSSVAEELDIVLQ

SEQ ID NO: 7842 - protein, 634 aa, Homo sapiens
MSLVPATNYIYTPLNQLKGGTIVNVYGVVKFFKPPYLSKGTDYCSVVTIVDQTNVKLTCLLFSGNYEALPIIYKNGDIVRFHRLKIQVYKKETQGITSSGFASLTFEGTLGAPIIPRTSSKYFNFTTEDHKMVEALRVWASTHMSPSWTLLKLCDVQPMQYFDLTCQLLGKAEVDGASFLLKVWDGTRTPFPSWRVLIQDLVLEGDLSHIHRLQNLTIDILVYDNHVHVARSLKVGSFLRIYSLHTKLQSMNSENQTMLSLEFHLHGGTSYGRGIRVLPESNSDVDQLKKDLESANLTANQHSDVICQSEPDDSFPSSGSVSLYEVERCQQLSATILTDHQYLERTPLCAILKQKAPQQYRIRAKLRSYKPRRLFQSVKLHCPKCHLLQEVPHEGDLDIIFQDGATKTPDVKLQNTSLYDSKIWTTKNQKGRKVAVHFVKNNGILPLSNECLLLIEGGTLSEICKLSNKFNSVIPVRSGHEDLELLDLSAPFLIQGTIHHYGCKQCSSLRSIQNLNSLVDKTSWIPSSVAEALGIVPLQYVFVMTFTLDDGTGVLEAYLMDSDKFFQIPASEVLMDDDLQKSVDMIMDMFCPPGIKIDAYPWLECFIKSYNVTNGTDNQICYQIFDTTVAEDVI

SEQ ID NO: 7843 - protein, 340 aa, Homo sapiens
LSLVPATNYIYTPLNQLKGGTIVNVYGVVKFFKPPYLSKGTDYCSVVTIVDQTNVKLTCLLFSGNYEALPIIYKNGDIVRFHRLKIQVYKKETQGITSSGFASLTFEGTLGAPIIPRTSSKYFNFTTEDHKMVEALRVWASTHMSPSWTLLKLCDVQPMQYFDLTCQLLGKAEVDGASFLLKVWDGTRTPFPSWRVLIQDLVLEGDLSHIHRLQNLTIDILVYDNHVHVARSLKVGSFLRIYSLHTKLQSMNSENQTMLSLEFHLHGGTSYGRGIRVLPESNSDVDQLKKDLESANLTANQHSDVICQSEPDDSFPNGVSLRPPGWSSVARSRLIAASTS

SEQ ID NO: 7844 - protein, 503 aa, Homo sapiens
MVEALRVWASTHMSPSWTLLKLCDVQPMQYFDLTCQLLGKAEVDGASFLLKVWDGTRTPFPSWRVLIQDLVLEGDLSHIHRLQNLTIDILVYDNHVHVARSLKVGSFLRIYSLHTKLQSMNSENQTMLSLEFHLHGGTSYGRGIRVLPESNSDVDQLKKDLESANLTANQHSDVICQSEPDDSFPSSGSVSLYEVERCQQLSATILTDHQYLERTPLCAILKQKAPQQYRIRAKLRSYKPRRLFQSVKLHCPKCHLLQEVPHEGDLDIIFQDGATKTPDVKLQNTSLYDSKIWTTKNQKGRKVAVHFVKNNGILPLSNECLLLIEGGTLSEICKLSNKFNSVIPVRSGHEDLELLDLSAPFLIQGTIHHYGCKQCSSLRSIQNLNSLVDKTSWIPSSVAEALGIVPLQYVFVMTFTLDDGTGVLEAYLMDSDKFFQIPASEVLMDDDLQKSVDMIMDMFCPPGIKIDAYPWLECFIKSYNVTNGTDNQICYQIFDTTVAEDVI

SEQ ID NO: 7845 - protein, 459 aa, Homo sapiens
LSLVPATNYIYTPLNQLKGGTIVNVYGVVKFFKPPYLSKGTDYCSVVTIVDQTNVKLTCLLFSGNYEALPIIYKNGDIVRFHRLKIQVYKKETQGITSSGFASLTFEGTLGAPIIPRTSSKYFNFTTEDHKMVEALRVWASTHMSPSWTLLKLCDVQPMQYFDLTCQLLGKAEVDGASFLLKVWDGTRTPFPSWRVLIQDLVLEGDLSHIHRLQNLTIDILVYDNHVHVARSLKVGSFLRIYSLHTKLQSMNSENQTMLSLEFHLHGGTSYGRGIRVLPESNSDVDQLKKDLESANLTANQHSDVICQSEPDDSFPSSGSVSLYEVERCQQLSATILTDHQYLERTPLCAILKQKAPQQYRIRAKLRSYKPRRLFQSVKLHCPKCHLLQEVPHEGDLDIIFQDGATKTPDVKLQNTSLYDSKIWTTKNQKGRKVAVHFVKNNGILPLSNECLLLIEVLL

SEQ ID NO: 7846 - protein, 82 aa, Homo sapiens
MSLVPATNYIYTPLNQLKGGTIVNVYGVVKFFKPPYLSKGTDYCSVVTIVDQTNVKLTCLLFSGNYEALPIIYKNGDIVRFH

SEQ ID NO: 7847 - protein, 518 aa, Homo sapiens
LSLVPATNYIYTPLNQLKGGTIVNVYGVVKFFKPPYLSKGTDYCSVVTIVDQTNVKLTCLLFSGNYEALPIIYKNGDIVRFHRLKIQVYKKETQGITSSGFASLTFEGTLGAPIIPRTSSKYFNFTTEDHKMVEALRVWASTHMSPSWTLLKLCDVQPMQYFDLTCQLLGKAEVDGASFLLKVWDGTRTPFPSWRVLIQDLVLEGDLSHIHRLQNLTIDILVYDNHVHVARSLKVGSFLRIYSLHTKLQSMNSENQTMLSLEFHLHGGTSYGRGIRVLPESNSDVDQLKKDLESANLTANQHSDVICQSEPDDSFPSSGSVSLYEVERCQQLSATILTDHQYLERTPLCAILKQKAPQQYRIRAKLRSYKPRRLFQSVKLHCPKCHLLQEVPHEGDLDIIFQDGATKTPDVKLQNTSLYDSKIWTTKNQKGRKVAVHFVKNNGILPLSNECLLLIEGGTLSEICKLSNKFNSVIPVRSGHEDLELLDLSAPFLIQGTIHHYGTGYCTPPICVCYDLYT

SEQ ID NO: 7848 - protein, 457 aa, Homo sapiens
SPEDPRSKHKFKIHTYGSPTFCDHCGSLLYGLIHQGMKCDTCDMNVHKQCVINVPSLCGMDHTEKRGRIYLKAEVADEKLHVTVRDAKNLIPMDPNGLSDPYVKLKLIPDPKNESKQKTKTIRSTLNPQWNESFTFKLKPSDKDRRLSVEIWDWDRTTRNDFMGSLSFGVSELMKMPASGWYKLLNQEEGEYYNVPIPEGDEEGNMELRQKFEKAKLGPAGNKVISPSEDRKQPSNNLDRVKLTDFNFLMVLGKGSFGKVMLADRKGTEELYAIKILKKDVVIQDDDVECTMVEKRVLALLDKPPFLTQLHSCFQTVDRLYFVMEYVNGGDLMYHIQQVGKFKEPQAVFYAAEISIGLFFLHKRGIIYRDLKLDNVMLDSEGHIKIADFGMCKEHMMDGVTTRTFCGTPDYIAPEIIAYQPYGKSVDWWAYGVLLYEMLAGQVMFCYIFMFVYCCVM

SEQ ID NO: 7849 - protein, 672 aa, Homo sapiens
MADVFPGNDSTASQDVANRFARKGALRQKNVHEVKDHKFIARFFKQPTFCSHCTDFIWGFGKQGFQCQVCCFVVHKRCHEFVTFSCPGADKGPDTDDPRSKHKFKIHTYGSPTFCDHCGSLLYGLIHQGMKCDTCDMNVHKQCVINVPSLCGMDHTEKRGRIYLKAEVADEKLHVTVRDAKNLIPMDPNGLSDPYVKLKLIPDPKNESKQKTKTIRSTLNPQWNESFTFKLKPSDKDRRLSVEIWDWDRTTRNDFMGSLSFGVSELMKMPASGWYKLLNQEEGEYYNVPIPEGDEEGNMELRQKFEKAKLGPAGNKVISPSEDRKQPSNNLDRVKLTDFNFLMVLGKGSFGKVMLADRKGTEELYAIKILKKDVVIQDDDVECTMVEKRVLALLDKPPFLTQLHSCFQTVDRLYFVMEYVNGGDLMYHIQQVGKFKEPQAVFYAAEISIGLFFLHKRGIIYRDLKLDNVMLDSEGHIKIADFGMCKEHMMDGVTTRTFCGTPDYIAPEIIAYQPYGKSVDWWAYGVLLYEMLAGQPPFDGEDEDELFQSIMEHNVSYPKSLSKEAVSVCKGLMTKHPAKRLGCGPEGERDVREHAFFRRIDWEKLENREIQPPFKPKVCGKGAENFDKFFTRGQPVLTPPDQLVIANIDQSDFEGFSYVNPQFVHPILQSAV

SEQ ID NO: 7850 - protein, 673 aa, Homo sapiens
MADPAAGPPPSEGEESTVRFARKGALRQKNVHEVKNHKFTARFFKQPTFCSHCTDFIWGFGKQGFQCQVCCFVVHKRCHEFVTFSCPGADKGPASDDPRSKHKFKIHTYSSPTFCDHCGSLLYGLIHQGMKCDTCMMNVHKRCVMNVPSLCGTDHTERRGRIYIQAHIDRDVLIVLVRDAKNLVPMDPNGLSDPYVKLKLIPDPKSESKQKTKTIKCSLNPEWNETFRFQLKESDKDRRLSVEIWDWDLTSRNDFMGSLSFGISELQKASVDGWFKLLSQEEGEYFNVPVPPEGSEANEELRQKFERAKISQGTKVPEEKTTNTVSKFDNNGNRDRMKLTDFNFLMVLGKGSFGKVMLSERKGTDELYAVKILKKDVVIQDDDVECTMVEKRVLALPGKPPFLTQLHSCFQTMDRLYFVMEYVNGGDLMYHIQQVGRFKEPHAVFYAAEIAIGLFFLQSKGIIYRDLKLDNVMLDSEGHIKIADFGMCKENIWDGVTTKTFCGTPDYIAPEIIAYQPYGKSVDWWAFGVLLYEMLAGQAPFEGEDEDELFQSIMEHNVAYPKSMSKEAVAICKGLMTKHPGKRLGCGPEGERDIKEHAFFRYIDWEKLERKEIQPPYKPKACGRNAENFDRFFTRHPPVLTPPDQEVIRNIDQSEFEGFSFVNSEFLKPEVKS

SEQ ID NO: 7851 - protein, 671 aa, Homo sapiens
MADPAAGPPPSEGEESTVRFARKGALRQKNVHEVKNHKFTARFFKQPTFCSHCTDFIWGFGKQGFQCQVCCFVVHKRCHEFVTFSCPGADKGPASDDPRSKHKFKIHTYSSPTFCDHCGSLLYGLIHQGMKCDTCMMNVHKRCVMNVPSLCGTDHTERRGRIYIQAHIDRDVLIVLVRDAKNLVPMDPNGLSDPYVKLKLIPDPKSESKQKTKTIKCSLNPEWNETFRFQLKESDKDRRLSVEIWDWDLTSRNDFMGSLSFGISELQKASVDGWFKLLSQEEGEYFNVPVPPEGSEANEELRQKFERAKISQGTKVPEEKTTNTVSKFDNNGNRDRMKLTDFNFLMVLGKGSFGKVMLSERKGTDELYAVKILKKDVVIQDDDVECTMVEKRVLALPGKPPFLTQLHSCFQTMDRLYFVMEYVNGGDLMYHIQQVGRFKEPHAVFYAAEIAIGLFFLQSKGIIYRDLKLDNVMLDSEGHIKIADFGMCKENIWDGVTTKTFCGTPDYIAPEIIAYQPYGKSVDWWAFGVLLYEMLAGQAPFEGEDEDELFQSIMEHNVAYPKSMSKEAVAICKGLMTKHPGKRLGCGPEGERDIKEHAFFRYIDWEKLERKEIQPPYKPKARDKRDTSNFDKEFTRQPVELTPTDKLFIMNLDQNEFAGFSYTNPEFVINV

SEQ ID NO: 7852 - protein, 261 aa, Homo sapiens
MRESALERGPVPEAPAGGPVHAVTVVTLLEKLASMLETLRERQGGLARRQGGLAGSVRRIQSGLGALSRSHDTTSNTLAQLLAKAERVSSHANAAQERAVRRAAQVQRLEANHGLLVARGKLHVLLFKEEGEVPASAFQKAPEPLGPADQSELGPEQLEAEVGESSDEEPVESRAQRLRRTGLQKVQSLRRALSGRKGPAAPPPTPVKPPRLGPGRSAEAQPEAQPALEPTLEPEPPQDTEEDPGRPGAAEEALLQMESVA

SEQ ID NO: 7853 - protein, 737 aa, Homo sapiens
MVVFNGLLKIKICEAVSLKPTAWSLRHAVGPRPQTFLLDPYIALNVDDSRIGQTATKQKTNSPAWHDEFVTDVCNGRKIELAVFHDAPIGYDDFVANCTIQFEELLQNGSRHFEDWIDLEPEGRVYVIIDLSGSSGEAPKDNEERVFRERMRPRKRQGAVRRRVHQVNGHKFMATYLRQPTYCSHCRDFIWGVIGKQGYQCQVCTCVVHKRCHELIITKCAGLKKQETPDQVGSQRFSVNMPHKFGIHNYKVPTFCDHCGSLLWGLLRQGLQCKVCKMNVHRRCETNVAPNCGVDARGIAKVLADLGVTPDKITNSGQRRKKLIAGAESPQPASGSSPSEEDRSKSAPTSPCDQEIKELENNIRKALSFDNRGEEHRAASSPDGQLMSPGENGEVRQGQAKRLGLDEFNFIKVLGKGSFGKVMLAELKGKDEVYAVKVLKKDVILQDDDVDCTMTEKRILALARKHPYLTQLYCCFQTKDRLFFVMEYVNGGDLMFQIQRSRKFDEPRSRFYAAEVTSALMFLHQHGVIYRDLKLDNILLDAEGHCKLADFGMCKEGILNGVTTTTFCGTPDYIAPEILQELEYGPSVDWWALGVLMYEMMAGQPPFEADNEDDLFESILHDDVLYPVWLSKEAVSILKAFMTKNPHKRLGCVASQNGEDAIKQHPFFKEIDWVLLEQKKIKPPFKPRIKTKRDVNNFDQDFTREEPVLTLVDEAIVKQINQEEFKGFSYFGEDLMP

SEQ ID NO: 7854 - protein, 127 aa, Homo sapiens
MVVFNGLLKIKICEAVSLKPTAWSLRHAVGPRPQTFLLDPYIALNVDDSRIGQTATKQKTNSPAWHDEFVTDVCNGRKIELAVFHDAPIGYDDFVANCTIQFEELLQNGSRHFEDWIDLEPEGRVYV

SEQ ID NO: 7855 - protein, 697 aa, Homo sapiens
MAGLGPGVGDSEGGPRPLFCRKGALRQKVVHEVKSHKFTARFFKQPTFCSHCTDFIWGIGKQGLQCQVCSFVVHRRCHEFVTFECPGAGKGPQTDDPRNKHKFRLHSYSSPTFCDHCGSLLYGLVHQGMKCSCCEMNVHRRCVRSVPSLCGVDHTERRGRLQLEIRAPTADEIHVTVGEARNLIPMDPNGLSDPYVKLKLIPDPRNLTKQKTRTVKATLNPVWNETFVFNLKPGDVERRLSVEVWDWDRTSRNDFMGAMSFGVSELLKAPVDGWYKLLNQEEGEYYNVPVADADNCSLLQKFEACNYPLELYERVRMGPSSSPIPSPSPSPTDPKRCFFGASPGRLHISDFSFLMVLGKGSFGKVMLAERRGSDELYAIKILKKDVIVQDDDVDCTLVEKRVLALGGRGPGGRPHFLTQLHSTFQTPDRLYFVMEYVTGGDLMYHIQQLGKFKEPHAAFYAAEIAIGLFFLHNQGIIYRDLKLDNVMLDAEGHIKITDFGMCKENVFPGTTTRTFCGTPDYIAPEIIAYQPYGKSVDWWSFGVLLYEMLAGQPPFDGEDEEELFQAIMEQTVTYPKSLSREAVAICKGFLTKHPGKRLGSGPDGEPTIRAHGFFRWIDWERLERLEIPPPFRPRPCGRSGENFDKFFTRAAPALTPPDRLVLASIDQADFQGFTYVNPDFVHPDARSPTSPVPVPVM

SEQ ID NO: 7856 - protein, 327 aa, Homo sapiens
MAGLGPGVGDSEGGPRPLFCRKGALRQKVVHEVKSHKFTARFFKQPTFCSHCTDFIWGIGKQGLQCQVCSFVVHRRCHEFVTFECPGAGKGPQTDDPRNKHKFRLHSYSSPTFCDHCGSLLYGLVHQGMKCSCCEMNVHRRCVRSVPSLCGVDHTERRGRLQLEIRAPTADEIHVTVGEARNLIPMDPNGLSDPYVKLKLIPDPRNLTKQKTRTVKATLNPVWNETFVFNLKPGDVERRLSVEVWDWDRTSRNDFMGAMSFGVSELLKAPVDGWLVTTPWNCMSGCGWAPLPLPSPPLPLVPPTPSAASSGRVQDACTSPTSASSWF

SEQ ID NO: 7857 - protein, 710 aa, Homo sapiens
MAGLGPGVGDSEGGPRPLFCRKGALRQKVVHEVKSHKFTARFFKQPTFCSHCTDFIWGIGKQGLQCQVCSFVVHRRCHEFVTFECPGAGKGPQTDDPRNKHKFRLHSYSSPTFCDHCGSLLYGLVHQGMKCSCCEMNVHRRCVRSVPSLCGVDHTERRGRLQLEIRAPTADEIHVTVGEARNLIPMDPNGLSDPYVKLKLIPDPRNLTKQKTRTVKATLNPVWNETFVFNLKPGDVERRLSVEVWDWDRTSRNDFMGAMSFGVSELLKAPVDGWYKLLNQEEGEYYNVPVADADNCSLLQKFEACNYPLELYERVRMGPSSSPIPSPSPSPTDPKRCFFGASPGRLHISDFSFLMVLGKGSFGKVMLAERRGSDELYAIKILKKDVIVQDDDVDCTLVEKRVLALGGRGPGGRPHFLTQLHSTFQTPDRLYFVMEYVTGGDLMYHIQQLGKFKEPHAAFYAAEIAIGLFFLHNQGIIYRDLKLDNVMLDAEGHIKITDFGMCKENVFPGTTTRTFCGTPDYIAPEIIAYQPYGKSVDWWSFGVLLYEMLAGQPPFDGEDEEELFQAIMEQTVTYPKSLSREAVAICKGFLTKHPGKRLGSGPDGEPTIRAHGFFRWIDWERLERLEIPPPFRPRPCGRSGENFDKFFTRAAPALTPPDRLVLASIDQADFQGFTYVNPDFVHPDARSPTSPVPVPVISCTPAFQLCPRGF

SEQ ID NO: 7858 - protein, 548 aa, Homo sapiens
MPRICDLRVSRRWEGPPDGRCEMNVHRRCVRSVPSLCGVDHTERRGRLQLEIRAPTADEIHVTVGEARNLIPMDPNGLSDPYVKLKLIPDPRNLTKQKTRTVKATLNPVWNETFVFNLKPGDVERRLSVEVWDWDRTSRNDFMGAMSFGVSELLKAPVDGWYKLLNQEEGEYYNVPVADADNCSLLQKFEACNYPLELYERVRMGPSSSPIPSPSPSPTDPKRCFFGASPGRLHISDFSFLMVLGKGSFGKVMLAERRGSDELYAIKILKKDVIVQDDDVDCTLVEKRVLALGGRGPGGRPHFLTQLHSTFQTPDRLYFVMEYVTGGDLMYHIQQLGKFKEPHAAFYAAEIAIGLFFLHNQGIIYRDLKLDNVMLDAEGHIKITDFGMCKENVFPGTTTRTFCGTPDYIAPEIIAYQPYGKSVDWWSFGVLLYEMLAGQFLTKHPGKRLGSGPDGEPTIRAHGFFRWIDWERLERLEIPPPFRPRPCGRSGENFDKFFTRAAPALTPPDRLVLASIDQADFQGFTYVNPDFVHPDARSPTSPVPVPVM

SEQ ID NO: 7859 - protein, 592 aa, Homo sapiens
MPSRTGPKMEGSGGRVRLKAHYGGDIFITSVDAATTFEELCEEVRDMCRLHQQHPLTLKWVDSEGDPCTVSSQMELEEAFRLARQCRDEGLIIHVFPSTPEQPGLPCPGEDKSIYRRGARRWRKLYRANGHLFQAKRFNRRAYCGQCSERIWGLARQGYRCINCKLLVHKRCHGLVPLTCRKHMDSVMPSQEPPVDDKNEDADLPSEETDGIAYISSSRKHDSIKDDSEDLKPVIDGMDGIKISQGLGLQDFDLIRVIGRGSYAKVLLVRLKKNDQIYAMKVVKKELVHDDEDIDWVQTEKHVFEQASSNPFLVGLHSCFQTTSRLFLVIEYVNGGDLMFHMQRQRKLPEEHARFYAAEICIALNFLHERGIIYRDLKLDNVLLDADGHIKLTDYGMCKEGLGPGDTTSTFCGTPNYIAPEILRGEEYGFSVDWWALGVLMFEMMAGRSPFDIITDNPDMNTEDYLFQVILEKPIRIPRFLSVKASHVLKGFLNKDPKERLGCRPQTGFSDIKSHAFFRSIDWDLLEKKQALPPFQPQITDDYGLDNFDTQFTSEPVQLTPDDEDAIKRIDQSEFEGFEYINPLLLSTEESV

SEQ ID NO: 7860 - protein, 409 aa, Homo sapiens
MDSVMPSQEPPVDDKNEDADLPSEETDGIAYISSSRKHDSIKDDSEDLKPVIDGMDGIKISQGLGLQDFDLIRVIGRGSYAKVLLVRLKKNDQIYAMKVVKKELVHDDEDIDWVQTEKHVFEQASSNPFLVGLHSCFQTTSRLFLVIEYVNGGDLMFHMQRQRKLPEEHARFYAAEICIALNFLHERGIIYRDLKLDNVLLDADGHIKLTDYGMCKEGLGPGDTTSTFCGTPNYIAPEILRGEEYGFSVDWWALGVLMFEMMAGRSPFDIITDNPDMNTEDYLFQVILEKPIRIPRFLSVKASHVLKGFLNKDPKERLGCRPQTGFSDIKSHAFFRSIDWDLLEKKQALPPFQPQITDDYGLDNFDTQFTSEPVQLTPDDEDAIKRIDQSEFEGFEYINPLLLSTEESV

SEQ ID NO: 7861 - protein, 409 aa, Homo sapiens; identical to SEQ ID NO: 7860

SEQ ID NO: 7862 - protein, 488 aa, Homo sapiens
MLTPRTDESIYRRGARRWRKLYRANGHLFQAKRFNRRAYCGQCSERIWGLARQGYRCINCKLLVHKRCHGLVPLTCRKHMDSVMPSQEPPVDDKNEDADLPSEETDGIAYISSSRKHDSIKDDSEDLKPVIDGMDGIKISQGLGLQDFDLIRVIGRGSYAKVLLVRLKKNDQIYAMKVVKKELVHDDEDIDWVQTEKHVFEQASSNPFLVGLHSCFQTTSRLFLVIEYVNGGDLMFHMQRQRKLPEEHARFYAAEICIALNFLHERGIIYRDLKLDNVLLDADGHIKLTDYGMCKEGLGPGDTTSTFCGTPNYIAPEILRGEEYGFSVDWWALGVLMFEMMAGRSPFDIITDNPDMNTEDYLFQVILEKPIRIPRFLSVKASHVLKGFLNKDPKERLGCRPQTGFSDIKSHAFFRSIDWDLLEKKQALPPFQPQITDDYGLDNFDTQFTSEPVQLTPDDEDAIKRIDQSEFEGFEYINPLLLSTEESV

SEQ ID NO: 7863 - protein, 25 aa, Homo sapiens
MDSVMPSQEPPVDDKNEDADLPSEE

SEQ ID NO: 7864 - protein, 82 aa, Homo sapiens
MDSVMPSQEPPVDDKNEDADLPSEETDGIAYISSSRKHDSIKDDSEDLKPVIDGMDGIKISQGLGLQDFDLIRVIGRGSYAK

SEQ ID NO: 7865 - protein, 98 aa, Homo sapiens
MDSVMPSQEPPVDDKNEDADLPSEETDGIAYISSSRKHDSIKDDSEDLKPVIDGMDGIKISQGLGLQDFDLIRVIGRGSYAKVLLVRLKKNDQIYAMK

SEQ ID NO: 7866 - protein, 109 aa, Homo sapiens
MDSVMPSQEPPVDDKNEDADLPSEETDGIAYISSSRKHDSIKDDSEDLKPVIDGMDGIKISQGLGLQDFDLIRVIGRGSYAKVLLVRLKKNDQIYAMKVVKKELVHDDE

SEQ ID NO: 7867 - protein, 46 aa, Homo sapiens
MDSVMPSQEPPVDDKNEDADLPSEETDGIAYISSSRKHDSIKDDSE

SEQ ID NO: 7868 - protein, 73 aa, Homo sapiens
MDSVMPSQEPPVDDKNEDADLPSEETDGIAYISSSRKHDSIKDDSEDLKPVIDGMDGIKISQGLGLQDFDLIR

SEQ ID NO: 7869 - protein, 21 aa, Homo sapiens
MDSVMPSQEPPVDDKNEDADL

SEQ ID NO: 7870 - protein, 71 aa, Homo sapiens
MDSVMPSQEPPVDDKNEDADLPSEETDGIAYISSSRKHDSIKDDSEDLKPVIDGMDGIKISQGLGLQDFDL

SEQ ID NO: 7871 - protein, 270 aa, Homo sapiens
MGNTSSERAALERHGGHKTPRRDSSGGTKDGDRPKILMDSPEDADLFHSEEIKAPEKEEFLAWQHDLEVNDKAPAQARPTVFRWTGGGKEVYLSGSFNNWSKLPLTRSHNNFVAILDLPEGEHQYKFFVDGQWTHDPSEPIVTSQLGTVNNIIQVKKTDFEVFDALMVDSQKCSDVSELSSSPPGPYHQEPYVCKPEERFRAPPILPPHLLQVILNKDTGISCDPALLPEPNHVMLNHLYALSIKDGVMVLSATHRYKKKYVTTLLYKPI

SEQ ID NO: 7872 - protein, 233 aa, Homo sapiens
MDSPEDADLFHSEEIKAPEKEEFLAWQHDLEVNDKAPAQARPTVFRWTGGGKEVYLSGSFNNWSKLPLTRSHNNFVAILDLPEGEHQYKFFVDGQWTHDPSEPIVTSQLGTVNNIIQVKKTDFEVFDALMVDSQKCSDVSELSSSPPGPYHQEPYVCKPEERFRAPPILPPHLLQVILNKDTGISCDPALLPEPNHVMLNHLYALSIKDGVMVLSATHRYKKKYVTTLLYKPI

SEQ ID NO: 7873 - protein, 270 aa, Homo sapiens; identical to SEQ ID NO: 7871

SEQ ID NO: 7874 - protein, 4127 aa, Homo sapiens
MAGSGAGVRCSLLRLQETLSAADRCGAALAGHQLIRGLGQECVLSSSPAVLALQTSLVFSRDFGLLVFVRKSLNSIEFRECREEILKFLCIFLEKMGQKIAPYSVEIKNTCTSVYTKDRAAKCKIPALDLLIKLLQTFRSSRLMDEFKIGELFSKFYGELALKKKIPDTVLEKVYELLGLLGEVHPSEMINNAENLFRAFLGELKTQMTSAVREPKLPVLAGCLKGLSSLLCNFTKSMEEDPQTSREIFNFVLKAIRPQIDLKRYAVPSAGLRLFALHASQFSTCLLDNYVSLFEVLLKWCAHTNVELKKAALSALESFLKQVSNMVAKNAEMHKNKLQYFMEQFYGIIRNVDSNNKELSIAIRGYGLFAGPCKVINAKDVDFMYVELIQRCKQMFLTQTDTGDDRVYQMPSFLQSVASVLLYLDTVPEVYTPVLEHLVVMQIDSFPQYSPKMQLVCCRAIVKVFLALAAKGPVLRNCISTVVHQGLIRICSKPVVLPKGPESESEDHRASGEVRTGKWKVPTYKDYVDLFRHLLSSDQMMDSILADEAFFSVNSSSESLNHLLYDEFVKSVLKIVEKLDLTLEIQTVGEQENGDEAPGVWMIPTSDPAANLHPAKPKDFSAFINLVEFCREILPEKQAEFFEPWVYSFSYELILQSTRLPLISGFYKLLSITVRNAKKIKYFEGVSPKSLKHSPEDPEKYSCFALFVKFGKEVAVKMKQYKDELLASCLTFLLSLPHNIIELDVRAYVPALQMAFKLGLSYTPLAEVGLNALEEWSIYIDRHVMQPYYKDILPCLDGYLKTSALSDETKNNWEVSALSRAAQKGFNKVVLKHLKKTKNLSSNEAISLEEIRIRVVQMLGSLGGQINKNLLTVTSSDEMMKSYVAWDREKRLSFAVPFREMKPVIFLDVFLPRVTELALTASDRQTKVAACELLHSMVMFMLGKATQMPEGGQGAPPMYQLYKRTFPVLLRLACDVDQVTRQLYEPLVMQLIHWFTNNKKFESQDTVALLEAILDGIVDPVDSTLRDFCGRCIREFLKWSIKQITPQQQEKSPVNTKSLFKRLYSLALHPNAFKRLGASLAFNNIYREFREEESLVEQFVFEALVIYMESLALAHADEKSLGTIQQCCDAIDHLCRIIEKKHVSLNKAKKRRLPRGFPPSASLCLLDLVKWLLAHCGRPQTECRHKSIELFYKFVPLLPGNRSPNLWLKDVLKEEGVSFLINTFEGGGCGQPSGILAQPTLLYRGPFSLQATLCWLDLLLAALECYNTFIGERTVGALQVLGTEAQSSLLKAVAFFLESIAMHDIIAAEKCFGTGAAGNRTSPQEGERYNYSKCTVVVRIMEFTTTLLNTSPEGWKLLKKDLCNTHLMRVLVQTLCEPASIGFNIGDVQVMAHLPDVCVNLMKALKMSPYKDILETHLREKITAQSIEELCAVNLYGPDAQVDRSRLAAVVSACKQLHRAGLLHNILPSQSTDLHHSVGTELLSLVYKGIAPGDERQCLPSLDLSCKQLASGLLELAFAFGGLCERLVSLLLNPAVLSTASLGSSQGSVIHFSHGEYFYSLFSETINTELLKNLDLAVLELMQSSVDNTKMVSAVLNGMLDQSFRERANQKHQGLKLATTILQHWKKCDSWWAKDSPLETKMAVLALLAKILQIDSSVSFNTSHGSFPEVFTTYISLLADTKLDLHLKGQAVTLLPFFTSLTGGSLEELRRVLEQLIVAHFPMQSREFPPGTPRFNNYVDCMKKFLDALELSQSPMLLELMTEVLCREQQHVMEELFQSSFRRIARRGSCVTQVGLLESVYEMFRKDDPRLSFTRQSFVDRSLLTLLWHCSLDALREFFSTIVVDAIDVLKSRFTKLNESTFDTQITKKMGYYKILDVMYSRLPKDDVHAKESKINQVFHGSCITEGNELTKTLIKLCYDAFTENMAGENQLLERRRLYHCAAYNCAISVICCVFNELKFYQGFLFSEKPEKNLLIFENLIDLKRRYNFPVEVEVPMERKKKYIEIRKEAREAANGDSDGPSYMSSLSYLADSTLSEEMSQFDFSTGVQSYSYSSQDPRPATGRFRRREQRDPTVHDDVLELEMDELNRHECMAPLTALVKHMHRSLGPPQGEEDSVPRDLPSWMKFLHGKLGNPIVPLNIRLFLAKLVINTEEVFRPYAKHWLSPLLQLAASENNGGEGIHYMVVEIVATILSWTGLATPTGVPKDEVLANRLLNFLMKHVFHPKRAVFRHNLEIIKTLVECWKDCLSIPYRLIFEKFSGKDPNSKDNSVGIQLLGIVMANDLPPYDPQCGIQSSEYFQALVNNMSFVRYKEVYAAAAEVLGLILRYVMERKNILEESLCELVAKQLKQHQNTMEDKFIVCLNKVTKSFPPLADRFMNAVFFLLPKFHGVLKTLCLEVVLCRVEGMTELYFQLKSKDFVQVMRHRDDERQKVCLDIIYKMMPKLKPVELRELLNPVVEFVSHPSTTCREQMYNILMWIHDNYRDPESETDNDSQEIFKLAKDVLIQGLIDENPGLQLIIRNFWSHETRLPSNTLDRLLALNSLYSPKIEVHFLSLATNFLLEMTSMSPDYPNPMFEHPLSECEFQEYTIDSDWRFRSTVLTPMFVETQASQGTLQTRTQEGSLSARWPVAGQIRATQQQHDFTLTQTADGRSSFDWLTGSSTDPLVDHTSPSSDSLLFAHKRSERLQRAPLKSVGPDFGKKRLGLPGDEVDNKVKGAAGRTDLLRLRRRFMRDQEKLSLMYARKGVAEQKREKEIKSELKMKQDAQVVLYRSYRHGDLPDIQIKHSSLITPLQAVAQRDPIIAKQLFSSLFSGILKEMDKFKTLSEKNNITQKLLQDFNRFLNTTFSFFPPFVSCIQDISCQHAALLSLDPAAVSAGCLASLQQPVGIRLLEEALLRLLPAELPAKRVRGKARLPPDVLRWVELAKLYRSIGEYDVLRGIFTSEIGTKQITQSALLAEARSDYSEAAKQYDEALNKQDWVDGEPTEAEKDFWELASLDCYNHLAEWKSLEYCSTASIDSENPPDLNKIWSEPFYQETYLPYMIRSKLKLLLQGEADQSLLTFIDKAMHGELQKAILELHYSQELSLLYLLQDDVDRAKYYIQNGIQSFMQNYSSIDVLLHQSRLTKLQSVQALTEIQEFISFISKQGNLSSQVPLKRLLNTWTNRYPDAKMDPMNIWDDIITNRCFFLSKIEEKLTPLPEDNSMNVDQDGDPSDRMEVQEQEEDISSLIRSCKFSMKMKMIDSARKQNNFSLAMKLLKELHKESKTRDDWLVSWVQSYCRLSHCRSRSQGCSEQVLTVLKTVSLLDENNVSSYLSKNILAFRDQNILLGTTYRIIANALSSEPACLAEIEEDKARRILELSGSSSEDSEKVIAGLYQRAFQHLSEAVQAAEEEAQPPSWSCGPAAGVIDAYMTLADFCDQQLRKEEENASVIDSAELQAYPALVVEKMLKALKLNSNEARLKFPRLLQIIERYPEETLSLMTKEISSVPCWQFISWISHMVALLDKDQAVAVQHSVEEITDNYPQAIVYPFIISSESYSFKDTSTGHKNKEFVARIKSKLDQGGVIQDFINALDQLSNPELLFKDWSNDVRAELAKTPVNKKNIEKMYERMYAALGDPKAPGLGAFRRKFIQTFGKEFDKHFGKGGSKLLRMKLSDFNDITNMLLLKMNKDSKPPGNLKECSPWMSDFKVEFLRNELEIPGQYDGRGKPLPEYHVRIAGFDERVTVMASLRRPKRIIIRGHDEREHPFLVKGGEDLRQDQRVEQLFQVMNGILAQDSACSQRALQLRTYSVVPMTSRLGLIEWLENTVTLKDLLLNTMSQEEKAAYLSDPRAPPCEYKDWLTKMSGKHDVGAYMLMYKGANRTETVTSFRKRESKVPADLLKRAFVRMSTSPEAFLALRSHFASSHALICISHWILGIGDRHLNNFMVAMETGGVIGIDFGHAFGSATQFLPVPELMPFRLTRQFINLMLPMKETGLMYSIMVHALRAFRSDPGLLTNTMDVFVKEPSFDWKNFEQKMLKKGGSWIQEINVAEKNWYPRQKICYAKRKLAGANPAVITCDELLLGHEKAPAFRDYVAVARGSKDHNIRAQEPESGLSEETQVKCLMDQATDPNILGRTWEGWEPWM

SEQ ID NO: 7875 - protein, 4096 aa, Homo sapiens
MAGSGAGVRCSLLRLQETLSAADRCGAALAGHQLIRGLGQECVLSSSPAVLALQTSLVFSRDFGLLVFVRKSLNSIEFRECREEILKFLCIFLEKMGQKIAPYSVEIKNTCTSVYTKDRAAKCKIPALDLLIKLLQTFRSSRLMDEFKIGELFSKFYGELALKKKIPDTVLEKVYELLGLLGEVHPSEMINNAENLFRAFLGELKTQMTSAVREPKLPVLAGCLKGLSSLLCNFTKSMEEDPQTSREIFNFVLKAIRPQIDLKRYAVPSAGLRLFALHASQFSTCLLDNYVSLFEVLLKWCAHTNVELKKAALSALESFLKQVSNMVAKNAEMHKNKLQYFMEQFYGIIRNVDSNNKELSIAIRGYGLFAGPCKVINAKDVDFMYVELIQRCKQMFLTQTDTGDDRVYQMPSFLQSVASVLLYLDTVPEVYTPVLEHLVVMQIDSFPQYSPKMQLVCCRAIVKVFLALAAKGPVLRNCISTVVHQGLIRICSKPVVLPKGPESESEDHRASGEVRTGKWKVPTYKDYVDLFRHLLSSDQMMDSILADEAFFSVNSSSESLNHLLYDEFVKSVLKIVEKLDLTLEIQTVGEQENGDEAPGVWMIPTSDPAANLHPAKPKDFSAFINLVEFCREILPEKQAEFFEPWVYSFSYELILQSTRLPLISGFYKLLSITVRNAKKIKYFEGVSPKSLKHSPEDPEKYSCFALFVKFGKEVAVKMKQYKDELLASCLTFLLSLPHNIIELDVRAYVPALQMAFKLGLSYTPLAEVGLNALEEWSIYIDRHVMQPYYKDILPCLDGYLKTSALSDETKNNWEVSALSRAAQKGFNKVVLKHLKKTKNLSSNEAISLEEIRIRVVQMLGSLGGQINKNLLTVTSSDEMMKSYVAWDREKRLSFAVPFREMKPVIFLDVFLPRVTELALTASDRQTKVAACELLHSMVMFMLGKATQMPEGGQGAPPMYQLYKRTFPVLLRLACDVDQVTRQLYEPLVMQLIHWFTNNKKFESQDTVALLEAILDGIVDPVDSTLRDFCGRCIREFLKWSIKQITPQQQEKSPVNTKSLFKRLYSLALHPNAFKRLGASLAFNNIYREFREEESLVEQFVFEALVIYMESLALAHADEKSLGTIQQCCDAIDHLCRIIEKKHVSLNKAKKRRLPRGFPPSASLCLLDLVKWLLAHCGRPQTECRHKSIELFYKFVPLLPGNRSPNLWLKDVLKEEGVSFLINTFEGGGCGQPSGILAQPTLLYRGPFSLQATLCWLDLLLAALECYNTFIGERTVGALQVLGTEAQSSLLKAVAFFLESIAMHDIIAAEKCFGTGAAGNRTSPQEGERYNYSKCTVVVRIMEFTTTLLNTSPEGWKLLKKDLCNTHLMRVLVQTLCEPASIGFNIGDVQVMAHLPDVCVNLMKALKMSPYKDILETHLREKITAQSIEELCAVNLYGPDAQVDRSRLAAVVSACKQLHRAGLLHNILPSQSTDLHHSVGTELLSLVYKGIAPGDERQCLPSLDLSCKQLASGLLELAFAFGGLCERLVSLLLNPAVLSTASLGSSQGSVIHFSHGEYFYSLFSETINTELLKNLDLAVLELMQSSVDNTKMVSAVLNGMLDQSFRERANQKHQGLKLATTILQHWKKCDSWWAKDSPLETKMAVLALLAKILQIDSSVSFNTSHGSFPEVFTTYISLLADTKLDLHLKGQAVTLLPFFTSLTGGSLEELRRVLEQLIVAHFPMQSREFPPGTPRFNNYVDCMKKFLDALELSQSPMLLELMTEVLCREQQHVMEELFQSSFRRIARRGSCVTQVGLLESVYEMFRKDDPRLSFTRQSFVDRSLLTLLWHCSLDALREFFSTIVVDAIDVLKSRFTKLNESTFDTQITKKMGYYKILDVMYSRLPKDDVHAKESKINQVFHGSCITEGNELTKTLIKLCYDAFTENMAGENQLLERRRLYHCAAYNCAISVICCVFNELKFYQGFLFSEKPEKNLLIFENLIDLKRRYNFPVEVEVPMERKKKYIEIRKEAREAANGDSDGPSYMSSLSYLADSTLSEEMSQFDFSTGVQSYSYSSQDPRPATGRFRRREQRDPTVHDDVLELEMDELNRHECMAPLTALVKHMHRSLGPPQGEEDSVPRDLPSWMKFLHGKLGNPIVPLNIRLFLAKLVINTEEVFRPYAKHWLSPLLQLAASENNGGEGIHYMVVEIVATILSWTGLATPTGVPKDEVLANRLLNFLMKHVFHPKRAVFRHNLEIIKTLVECWKDCLSIPYRLIFEKFSGKDPNSKDNSVGIQLLGIVMANDLPPYDPQCGIQSSEYFQALVNNMSFVRYKEVYAAAAEVLGLILRYVMERKNILEESLCELVAKQLKQHQNTMEDKFIVCLNKVTKSFPPLADRFMNAVFFLLPKFHGVLKTLCLEVVLCRVEGMTELYFQLKSKDFVQVMRHRDDERQKVCLDIIYKMMPKLKPVELRELLNPVVEFVSHPSTTCREQMYNILMWIHDNYRDPESETDNDSQEIFKLAKDVLIQGLIDENPGLQLIIRNFWSHETRLPSNTLDRLLALNSLYSPKIEVHFLSLATNFLLEMTSMSPDYPNPMFEHPLSECEFQEYTIDSDWRFRSTVLTPMFVETQASQGTLQTRTQEGSLSARWPVAGQIRATQQQHDFTLTQTADGRSSFDWLTGSSTDPLVDHTSPSSDSLLFAHKRSERLQRAPLKSVGPDFGKKRLGLPGDEVDNKVKGAAGRTDLLRLRRRFMRDQEKLSLMYARKGVAEQKREKEIKSELKMKQDAQVVLYRSYRHGDLPDIQIKHSSLITPLQAVAQRDPIIAKQLFSSLFSGILKEMDKFKTLSEKNNITQKLLQDFNRFLNTTFSFFPPFVSCIQDISCQHAALLSLDPAAVSAGCLASLQQPVGIRLLEEALLRLLPAELPAKRVRGKARLPPDVLRWVELAKLYRSIGEYDVLRGIFTSEIGTKQITQSALLAEARSDYSEAAKQYDEALNKQDWVDGEPTEAEKDFWELASLDCYNHLAEWKSLEYCSTASIDSENPPDLNKIWSEPFYQETYLPYMIRSKLKLLLQGEADQSLLTFIDKAMHGELQKAILELHYSQELSLLYLLQDDVDRAKYYIQNGIQSFMQNYSSIDVLLHQSRLTKLQSVQALTEIQEFISFISKQGNLSSQVPLKRLLNTWTNRYPDAKMDPMNIWDDIITNRCFFLSKIEEKLTPLPEDNSMNVDQDGDPSDRMEVQEQEEDISSLIRSCKFSMKMKMIDSARKQNNFSLAMKLLKELHKESKTRDDWLVSWVQSYCRLSHCRSRSQGCSEQVLTVLKTVSLLDENNVSSYLSKNILAFRDQNILLGTTYRIIANALSSEPACLAEIEEDKARRILELSGSSSEDSEKVIAGLYQRAFQHLSEAVQAAEEEAQPPSWSCGPAAGVIDAYMTLADFCDQQLRKEEENASVIDSAELQAYPALVVEKMLKALKLNSNEARLKFPRLLQIIERYPEETLSLMTKEISSVPCWQFISWISHMVALLDKDQAVAVQHSVEEITDNYPQAIVYPFIISSESYSFKDTSTGHKNKEFVARIKSKLDQGGVIQDFINALDQLSNPELLFKDWSNDVRAELAKTPVNKKNIEKMYERMYAALGDPKAPGLGAFRRKFIQTFGKEFDKHFGKGGSKLLRMKLSDFNDITNMLLLKMNKDSKPPGNLKECSPWMSDFKVEFLRNELEIPGQYDGRGKPLPEYHVRIAGFDERVTVMASLRRPKRIIIRGHDEREHPFLVKGGEDLRQDQRVEQLFQVMNGILAQDSACSQRALQLRTYSVVPMTSSDPRAPPCEYKDWLTKMSGKHDVGAYMLMYKGANRTETVTSFRKRESKVPADLLKRAFVRMSTSPEAFLALRSHFASSHALICISHWILGIGDRHLNNFMVAMETGGVIGIDFGHAFGSATQFLPVPELMPFRLTRQFINLMLPMKETGLMYSIMVHALRAFRSDPGLLTNTMDVFVKEPSFDWKNFEQKMLKKGGSWIQEINVAEKNWYPRQKICYAKRKLAGANPAVITCDELLLGHEKAPAFRDYVAVARGSKDHNIRAQEPESGLSEETQVKCLMDQATDPNILGRTWEGWEPWM

SEQ ID NO: 7876 - protein, 147 aa, Homo sapiens
MAAQRLGKRVLSKLQSPSRARGPGGSPGGLQKRHARVTVKYDRRELQRRLDVEKWIDGRLEELYRGMEADMPDEINIDELLELESEEERSRKIQGLLKSCGKPVEDFIQELLAKLQGLHRQPGLRQPSPSHDGSLSPLQDRARTAHP

SEQ ID NO: 7877 - protein, 120 aa, Homo sapiens
MAAQRLGKRVLSKLQSPSRARGPGGSPGGLQKRHARVTVKYDRRELQRRLDVEKWIDGRLEELYRGMGLLKSCGKPVEDFIQELLAKLQGLHRQPGLRQPSPSHDGSLSPLQDRARTAHP

SEQ ID NO: 7878 - protein, 674 aa, Homo sapiens
MAPGQAPHQATPWRDAHPFFLLSPVMGLLSRAWSRLRGLGPLEPWLVEAVKGAALVEAGLEGEARTPLAIPHTPWGRRPEEEAEDSGGPGEDRETLGLKTSSSLPEAWGLLDDDDGMYGEREATSVPRGQGSQFADGQRAPLSPSLLIRTLQGSDKNPGEEKAEEEGVAEEEGVNKFSYPPSHRECCPAVEEEDDEEAVKKEAHRTSTSALSPGSKPSTWVSCPGEEENQATEDKRTERSKGARKTSVSPRSSGSDPRSWEYRSGEASEEKEEKAHKETGKGEAAPGPQSSAPAQRPQLKSWWCQPSDEEEGEVKALGAAEKDGEAECPPCIPPPSAFLKAWVYWPGEDTEEEEDEEEDEDSDSGSDEEEGEAEASSSTPATGVFLKSWVYQPGEDTEEEEDEDSDTGSAEDEREAETSASTPPASAFLKAWVYRPGEDTEEEEDEDVDSEDKEDDSEAALGEAESDPHPSHPDQRAHFRGWGYRPGKETEEEEAAEDWGEAEPCPFRVAIYVPGEKPPPPWAPPRLPLRLQRRLKRPETPTHDPDPETPLKARKVRFSEKVTVHFLAVWAGPAQAARQGPWEQLARDRSRFARRITQAQEELSPCLTPAARARAWARLRNPPLAPIPALTQTLPSSSVPSSPVQTTPLSQAVATPSRSSAAAAAALDLSGRRG

SEQ ID NO: 7879 - protein, 514 aa, Homo sapiens
MKAEEEGVAEEEGVNKFSYPPSHRECCPAVEEEDDEEAVKKEAHRTSTSALSPGSKPSTWVSCPGEEENQATEDKRTERSKGARKTSVSPRSSGSDPRSWEYRSGEASEEKEEKAHKETGKGEAAPGPQSSAPAQRPQLKSWWCQPSDEEEGEVKALGAAEKDGEAECPPCIPPPSAFLKAWVYWPGEDTEEEEDEEEDEDSDSGSDEEEGEAEASSSTPATGVFLKSWVYQPGEDTEEEEDEDSDTGSAEDEREAETSASTPPASAFLKAWVYRPGEDTEEEEDEDVDSEDKEDDSEAALGEAESDPHPSHPDQRAHFRGWGYRPGKETEEEEAAEDWGEAEPCPFRVAIYVPGEKPPPPWAPPRLPLRLQRRLKRPETPTHDPDPETPLKARKVRFSEKVTVHFLAVWAGPAQAARQGPWEQLARDRSRFARRITQAQEELSPCLTPAARARAWARLRNPPLAPIPALTQTLPSSSVPSSPVQTTPLSQAVATPSRSSAAAAAALDLSGRRG

SEQ ID NO: 7880 - protein, 632 aa, Homo sapiens
MPWLVEAVKGAALVEAGLEGEARTPLAIPHTPWGRRPEEEAEDSGGPGEDRETLGLKTSSSLPEAWGLLDDDDGMYGEREATSVPRGQGSQFADGQRAPLSPSLLIRTLQGSDKNPGEEKAEEEGVAEEEGVNKFSYPPSHRECCPAVEEEDDEEAVKKEAHRTSTSALSPGSKPSTWVSCPGEEENQATEDKRTERSKGARKTSVSPRSSGSDPRSWEYRSGEASEEKEEKAHKETGKGEAAPGPQSSAPAQRPQLKSWWCQPSDEEEGEVKALGAAEKDGEAECPPCIPPPSAFLKAWVYWPGEDTEEEEDEEEDEDSDSGSDEEEGEAEASSSTPATGVFLKSWVYQPGEDTEEEEDEDSDTGSAEDEREAETSASTPPASAFLKAWVYRPGEDTEEEEDEDVDSEDKEDDSEAALGEAESDPHPSHPDQRAHFRGWGYRPGKETEEEEAAEDWGEAEPCPFRVAIYVPGEKPPPPWAPPRLPLRLQRRLKRPETPTHDPDPETPLKARKVRFSEKVTVHFLAVWAGPAQAARQGPWEQLARDRSRFARRITQAQEELSPCLTPAARARAWARLRNPPLAPIPALTQTLPSSSVPSSPVQTTPLSQAVATPSRSSAAAAAALDLSGRRG

SEQ ID NO: 7881 - protein, 556 aa, Homo sapiens
MAGASELGTGPGAAGGDGDDSLYPIAVLIDELRNEDVQLRLNSIKKLSTIALALGVERTRSELLPFLTDTIYDEDEVLLALAEQLGNFTGLVGGPDFAHCLLPPLENLATVEETVVRDKAVESLRQISQEHTPVALEAYFVPLVKRLASGDWFTSRTSACGLFSVCYPRASNAVKAEIRQQFRSLCSDDTPMVRRAAASKLGEFAKVLELDSVKSEIVPLFTSLASDEQDSVRLLAVEACVSIAQLLSQDDLETLVMPTLRQAAEDKSWRVRYMVADRFSELQKAMGPKITLNDLIPAFQNLLKDCEAEVRAAAAHKVKELGENLPIEDRETIIMNQILPYIKCPDVRLNIISNLDCVNEVIGIRQLSQSLLPAIVELAEDAKWRVRLAIIEYMPLLAGQLGVEFFDEKLNSLCMAWLVDHVYAIREAATNNLMKLVQKFGTEWAQNTIVPKVLVMANDPNYLHRMTTLFCINALSEACGQEITTKQMLPIVLKMAGDQVANVRFNVAKSLQKIGPILDTNALQGEVKPVLQKLGQDEDMDVKYFAQEAISVLALA

SEQ ID NO: 7882 - protein, 589 aa, Homo sapiens
MAAADGDDSLYPIAVLIDELRNEDVQLRLNSIKKLSTIALALGVERTRSELLPFLTDTIYDEDEVLLALAEQLGTFTTLVGGPEYVHCLLPPLESLATVEETVVRDKAVESLRAISHEHSPSDLEAHFVPLVKRLAGGDWFTSRTSACGLFSVCYPRVSSAVKAELRQYFRNLCSDDTPMVRRAAASKLGEFAKVLELDNVKSEIIPMFSNLASDEQDSVRLLAVEACVNIAQLLPQEDLEALVMPTLRQAAEDKSWRVRYMVADKFTELQKAVGPEITKTDLVPAFQNLMKDCEAEVRAAASHKVKEFCENLSADCRENVIMSQILPCIKELVSDANQHVKSALASVIMGLSPILGKDNTIEHLLPLFLAQLKDECPEVRLNIISNLDCVNEVIGIRQLSQSLLPAIVELAEDAKWRVRLAIIEYMPLLAGQLGVEFFDEKLNSLCMAWLVDHVYAIREAATSNLKKLVEKFGKEWAHATIIPKVLAMSGDPNYLHRMTTLFCINVLSEVCGQDITTKHMLPTVLRMAGDPVANVRFNVAKSLQKIGPILDNSTLQSEVKPILEKLTQDQDVDVKYFAQEALTVLSLA

SEQ ID NO: 7883 - protein, 579 aa, Homo sapiens
MAAADGDDSLYPIAVLIDELRNEDVQLRLNSIKKLSTIALALGVERTRSELLPFLTDTIYDEDEVLLALAEQLGTFTTLVGGPEYVHCLLPPLESLATVESLRAISHEHSPSDLEAHFVPLVKRLAGGDWFTSRTSACGLFSVCYPRVSSAVKAELRQYFRNLCSDDTPMVRRAAASKLGEFAKVLELDNVKSEIIPMFSNLASDEQDSVRLLAVEACVNIAQLLPQEDLEALVMPTLRQAAEDKSWRVRYMVADKFTELQKAVGPEITKTDLVPAFQNLMKDCEAEVRAAASHKVKEFCENLSADCRENVIMSQILPCIKELVSDANQHVKSALASVIMGLSPILGKDNTIEHLLPLFLAQLKDECPEVRLNIISNLDCVNEVIGIRQLSQSLLPAIVELAEDAKWRVRLAIIEYMPLLAGQLGVEFFDEKLNSLCMAWLVDHVYAIREAATSNLKKLVEKFGKEWAHATIIPKVLAMSGDPNYLHRMTTLFCINVLSEVCGQDITTKHMLPTVLRMAGDPVANVRFNVAKSLQKIGPILDNSTLQSEVKPILEKLTQDQDVDVKYFAQEALTVLSLA

SEQ ID NO: 7884 - protein, 156 aa, Homo sapiens
MAAADGDDSLYPIAVLIDELRNEDVQLRLNSNLKKLVEKFGKEWAHATIIPKVLAMSGDPNYLHRMTTLFCINVLSEVCGQDITTKHMLPTVLRMAGDPVANVRFNVAKSLQKIGPILDNSTLQSEVKPILEKLTQDQDVDVKYFAQEALTVLSLA

SEQ ID NO: 7885 - protein, 534 aa, Homo sapiens
MRTFSFASTASRSCPPSPWPLGLKGPEVSFCLSLQPPLESLATVEETVVRDKAVESLRAISHEHSPSDLEAHFVPLVKRLAGGDWFTSRTSACGLFSVCYPRVSSAVKAELRQYFRNLCSDDTPMVRRAAASKLGEFAKVLELDNVKSEIIPMFSNLASDEQDSVRLLAVEACVNIAQLLPQEDLEALVMPTLRQAAEDKSWRVRYMVADKFTELQKAVGPEITKTDLVPAFQNLMKDCEAEVRAAASHKVKEFCENLSADCRENVIMSQILPCIKELVSDANQHVKSALASVIMGLSPILGKDNTIEHLLPLFLAQLKDECPEVRLNIISNLDCVNEVIGIRQLSQSLLPAIVELAEDAKWRVRLAIIEYMPLLAGQLGVEFFDEKLNSLCMAWLVDHVYAIREAATSNLKKLVEKFGKEWAHATIIPKVLAMSGDPNYLHRMTTLFCINVLSEVCGQDITTKHMLPTVLRMAGDPVANVRFNVAKSLQKIGPILDNSTLQSEVKPILEKLTQDQDVDVKYFAQEALTVLSLA

SEQ ID NO: 7886 - protein, 667 aa, Homo sapiens
MAGASELGTGPGAAGGDGDDSLYPIAVLIDELRNEDVQLRLNSIKKLSTIALALGVERTRSELLPFLTDTIYDEDEVLLALAEQLGNFTGLVGGPDFAHCLLPPLENLATVEETVVRDKAVESLRQISQEHTPVALEAYFVPLVKRLASGDWFTSRTSACGLFSVCYPRASNAVKAEIRQQFRSLCSDDTPMVRRAAASKLGEFAKVLELDSVKSEIVPLFTSLASDEQDSVRLLAVEACVSIAQLLSQDDLETLVMPTLRQAAEDKSWRVRYMVADRFSELQKAMGPKITLNDLIPAFQNLLKDCEAEVRAAAAHKVKELGENLPIEDRETIIMNQILPYIKELVSDTNQHVKSALASVIMGLSTILGKENTIEHLLPLFLAQLKDECPDVRLNIISNLDCVNEVIGIRQLSQSLLPAIVELAEDAKWRVRLAIIEYMPLLAGQLGVEFFDEKLNSLCMAWLVDHVYAIREAATNNLMKLVQKFGTEWAQNTIVPKVLVMANDPNYLHRMTTLFCINALSEACGQEITTKQMLPIVLKMAGDQVANVRFNVAKSLQKIGPILDTNALQGEVKPVLQKLGQDEDMDVKYFAQEAISVVAQRLRKLEFPVKDSGEPSVPRADKNHFPRPTVPGEDMGKGPVYQLRGDTRDTLAQLGIAELVHFSQSTD

SEQ ID NO: 7887 - protein, 474 aa, Homo sapiens
MAGASELGTGPGAAGGDGDDSLYPIAVLIDELRNEDVQLRLNSIKKLSTIALALGVERTRSELLPFLTDTIYDEDEVLLALAEQLGNFTGLVGGPDFAHCLLDSVRLLAVEACVSIAQLLSQDDLETLVMPTLRQAAEDKSWRVRYMVADRFSELQKAMGPKITLNDLIPAFQNLLKDCEAEVRAAAAHKVKELGENLPIEDRETIIMNQILPYIKELVSDTNQHVKSALASVIMGLSTILGKENTIEHLLPLFLAQLKDECPDVRLNIISNLDCVNEVIGIRQLSQSLLPAIVELAEDAKWRVRLAIIEYMPLLAGQLGVEFFDEKLNSLCMAWLVDHVYAIREAATNNLMKLVQKFGTEWAQNTIVPKVLVMANDPNYLHRMTTLFCINALSEACGQEITTKQMLPIVLKMAGDQVANVRFNVAKSLQKIGPILDTNALQGEVKPVLQKLGQDEDMDVKYFAQEAISVLALA

SEQ ID NO: 7888 - protein, 454 aa, Homo sapiens
MAGASELGTGPGAAGGDGDDSLYPIAVLIDELRNEDVQLRLNSIKKLSTIALALGVERTRSELLPFLTDTIYDEDEVLLALAEQLGNFTGLVGGPDFAHCLLDSVRLLAVEACVSIAQLLSQDDLETLVMPTLRQAAEDKSWRVRYMVADRFSELQKAMGPKITLNDLIPAFQNLLKDCEAEVRAAAAHKVKELGENLPIEDRETIIMNQILPYIKELVSDTNQHVKSALASVIMGLSTILGKENTIEHLLPLFLAQLKDECPDVRLNIISNLDCVNEVIGIRQLSQSLLPAIVELAEDAKWRVRLAIIEYMPLLAGQLGVEFFDEKLNSLCMAWLVDHVYAIREAATNNLMKLVQKFGTEWAQNTIVPKVLVMANDPNYLHRMTTLFCINALSEACGQEITTKQMLPIVKNGRRPSSKCSLQCGQISTKDWTNSRYQCFTGRSEASTTEVRSR

SEQ ID NO: 7889 - protein, 603 aa, Homo sapiens
MAGASELGTGPGAAGGDGDDSLYPIAVLIDELRNEDVQPPLENLATVEETVVRDKAVESLRQISQEHTPVALEAYFVPLVKRLASGDWFTSRTSACGLFSVCYPRASNAVKAEIRQQFRSLCSDDTPMVRRAAASKLGEFAKVLELDSVKSEIVPLFTSLASDEQDSVRLLAVEACVSIAQLLSQDDLETLVMPTLRQAAEDKSWRVRYMVADRFSELQKAMGPKITLNDLIPAFQNLLKDCEAEVRAAAAHKVKELGENLPIEDRETIIMNQILPYIKELVSDTNQHVKSALASVIMGLSTILGKENTIEHLLPLFLAQLKDECPDVRLNIISNLDCVNEVIGIRQLSQSLLPAIVELAEDAKWRVRLAIIEYMPLLAGQLGVEFFDEKLNSLCMAWLVDHVYAIREAATNNLMKLVQKFGTEWAQNTIVPKVLVMANDPNYLHRMTTLFCINALSEACGQEITTKQMLPIVLKMAGDQVANVRFNVAKSLQKIGPILDTNALQGEVKPVLQKLGQDEDMDVKYFAQEAISVVAQRLRKLEFPVKDSGEPSVPRADKNHFPRPTVPGEDMGKGPVYQLRGDTRDTLAQLGIAELVHFSQSTD

SEQ ID NO: 7890 - protein, 440 aa, Homo sapiens
MMQLTFWLRVPPPFSHFKRQFRSLCSDDTPMVRRAAASKLGEFAKVLELDSVKSEIVPLFTSLASDEQDSVRLLAVEACVSIAQLLSQDDLETLVMPTLRQAAEDKSWRVRYMVADRFSELQKAMGPKITLNDLIPAFQNLLKDCEAEVRAAAAHKVKELGENLPIEDRETIIMNQILPYIKELVSDTNQHVKSALASVIMGLSTILGKENTIEHLLPLFLAQLKDECPDVRLNIISNLDCVNEVIGIRQLSQSLLPAIVELAEDAKWRVRLAIIEYMPLLAGQLGVEFFDEKLNSLCMAWLVDHVYAIREAATNNLMKLVQKFGTEWAQNTIVPKVLVMANDPNYLHRMTTLFCINALSEACGQEITTKQMLPIVLKMAGDQVANVRFNVAKSLQKIGPILDTNALQGEVKPVLQKLGQDEDMDVKYFAQEAISVLALA

SEQ ID NO: 7891 - protein, 601 aa, Homo sapiens
MAGASELGTGPGAAGGDGDDSLYPIAVLIDELRNEDVQLRLNSIKKLSTIALALGVERTRSELLPFLTDTIYDEDEVLLALAEQLGNFTGLVGGPDFAHCLLPPLENLATVEETVVRDKAVESLRQISQEHTPVALEAYFVPLVKRLASGDWFTSRTSACGLFSVCYPRASNAVKAEIRQQFRSLCSDDTPMVRRAAASKLGEFAKVLELDSVKSEIVPLFTSLASDEQDSVRLLAVEACVSIAQLLSQDDLETLVMPTLRQAAEDKSWRVRYMVADRFSELQKAMGPKITLNDLIPAFQNLLKDCEAEVRAAAAHKVKELGENLPIEDRETIIMNQILPYIKELVSDTNQHVKSALASVIMGLSTILGKENTIEHLLPLFLAQLKDECPDVRLNIISNLDCVNEVIGIRQLSQSLLPAIVELAEDAKWRVRLAIIEYMPLLAGQLGVEFFDEKLNSLCMAWLVDHVYAIREAATNNLMKLVQKFGTEWAQNTIVPKVLVMANDPNYLHRMTTLFCINALSEACGQEITTKQMLPIVLKMAGDQVANVRFNVAKSLQKIGPILDTNALQGEVKPVLQKLGQDEDMDVKYFAQEAISVLALA

SEQ ID NO: 7892 - protein, 119 aa, Homo sapiens
MPRSPLKCPWIPSSRLGTGSACWLRLNSIKKLSTIALALGVERTRSELLPFLTDTIYDEDEVLLALAEQLGNFTGLVGGPDFAHCLLPPLENLATVEETVVRDKAVESLRQISQEHTPV

SEQ ID NO: 7893 - protein, 224 aa, Homo sapiens
  VARIANT 1: note = MOD_RES - Any amino acid
XNLLKDCEAEVRAAAAHKVKELGENLPIEDRETIIMNQILPYIKELVSDTNQHVKSALASVIMGLSTILGKENTIEHLLPLFLAQLKDECPDVRLNIISNLDCVNEVIGIRQLSQSLLPAIVELAEDAKWRVRLAIIEYMPLLAGQLALSEACGQEITTKQMLPIVLKMAGDQVANVRFNVAKSLQKIGPILDTNALQGEVKPVLQKLGQDEDMDVKYFAQEAI

SEQ ID NO: 7894 - protein, 521 aa, Homo sapiens
MSGRRFHLSTTDRVIKAVPFPPTQRLTFKEVFENGKPKVDVLKNHLVKEGRLEEEVALKIINDGAAILRQEKTMIEVDAPITVCGDIHGQFFDLMKLFEVGGSPSNTRYLFLGDYVDRGYFSIECVLYLWSLKINHPKTLFLLRGNHECRHLTDYFTFKQECRIKYSEQVYDACMETFDCLPLAALLNQQFLCVHGGMSPEITSLDDIRKLDRFTEPPAFGPVCDLLWSDPSEDYGNEKTLEHYTHNTVRGCSYFYSYPAVCEFLQNNNLLSIIRAHEAQDAGYRMYRKSQATGFPSLITIFSAPNYLDVYNNKAAVLKYENNVMNIRQFNCSPHPYWLPNFMDVFTWSLPFVGEKVTEMLVNVLNICSDDELISDDEAEDHYIPSYQKGSTTVRKEIIRNKIRAIGKMARVFSILRQESESVLTLKGLTPTGTLPLGVLSGGKQTIETATVEAVEAREAIRGFSLQHKIRSFEEARGLDRINERMPPRKDSIHAGGPMKSVTSAHSHAAHRSDQGKKAHS

SEQ ID NO: 7895 - protein, 469 aa, Homo sapiens
MSEPKAIDPKLSTTDRVVKAVPFPPSHRLTAKEVFDNDGKPRVDILKAHLMKEGRLEESVALRIITEGASILRQEKNLLDIDAPVTVCGDIHGQFFDLMKLFEVGGSPANTRYLFLGDYVDRGYFSIECVLYLWALKILYPKTLFLLRGNHECRHLTEYFTFKQECKIKYSERVYDACMDAFDCLPLAALMNQQFLCVHGGLSPEINTLDDIRKLDRFKEPPAYGPMCDILWSDPLEDFGNEKTQEHFTHNTVRGCSYFYSYPAVCEFLQHNNLLSILRAHEAQDAGYRMYRKSQTTGFPSLITIFSAPNYLDVYNNKVTEMLVNVLNICSDDELGSEEDGFDGATAAARKEVIRNKIRAIGKMARVFSVLREESESVLTLKGLTPTGMLPSGVLSGGKQTLQSAIKGFSPQHKITSFEEAKGLDRINERMPPRRDAMPSDANLNSINKALTSETNGTDSNGSNSSNIQ

SEQ ID NO: 7896 - protein, 511 aa, Homo sapiens
MSEPKAIDPKLSTTDRVVKAVPFPPSHRLTAKEVFDNDGKPRVDILKAHLMKEGRLEESVALRIITEGASILRQEKNLLDIDAPVTVCGDIHGQFFDLMKLFEVGGSPANTRYLFLGDYVDRGYFSIECVLYLWALKILYPKTLFLLRGNHECRHLTEYFTFKQECKIKYSERVYDACMDAFDCLPLAALMNQQFLCVHGGLSPEINTLDDIRKLDRFKEPPAYGPMCDILWSDPLEDFGNEKTQEHFTHNTVRGCSYFYSYPAVCEFLQHNNLLSILRAHEAQDAGYRMYRKSQTTGFPSLITIFSAPNYLDVYNNKAAVLKYENNVMNIRQFNCSPHPYWLPNFMDVFTWSLPFVGEKVTEMLVNVLNICSDDELGSEEDGFDGATAAARKEVIRNKIRAIGKMARVFSVLREESESVLTLKGLTPTGMLPSGVLSGGKQTLQSAIKGFSPQHKITSFEEAKGLDRINERMPPRRDAMPSDANLNSINKALTSETNGTDSNGSNSSNIQ

SEQ ID NO: 7897 - protein, 521 aa, Homo sapiens
MSEPKAIDPKLSTTDRVVKAVPFPPSHRLTAKEVFDNDGKPRVDILKAHLMKEGRLEESVALRIITEGASILRQEKNLLDIDAPVTVCGDIHGQFFDLMKLFEVGGSPANTRYLFLGDYVDRGYFSIECVLYLWALKILYPKTLFLLRGNHECRHLTEYFTFKQECKIKYSERVYDACMDAFDCLPLAALMNQQFLCVHGGLSPEINTLDDIRKLDRFKEPPAYGPMCDILWSDPLEDFGNEKTQEHFTHNTVRGCSYFYSYPAVCEFLQHNNLLSILRAHEAQDAGYRMYRKSQTTGFPSLITIFSAPNYLDVYNNKAAVLKYENNVMNIRQFNCSPHPYWLPNFMDVFTWSLPFVGEKVTEMLVNVLNICSDDELGSEEDGFDGATAAARKEVIRNKIRAIGKMARVFSVLREESESVLTLKGLTPTGMLPSGVLSGGKQTLQSATVEAIEADEAIKGFSPQHKITSFEEAKGLDRINERMPPRRDAMPSDANLNSINKALTSETNGTDSNGSNSSNIQ

SEQ ID NO: 7898 - protein, 423 aa, Homo sapiens
MKLFEVGGSPANTRYLFLGDYVDRGYFSIECVLYLWALKILYPKTLFLLRGNHECRHLTEYFTFKQECKIKYSERVYDACMDAFDCLPLAALMNQQFLCVHGGLSPEINTLDDIRKLDRFKEPPAYGPMCDILWSDPLEDFGNEKTQEHFTHNTVRGCSYFYSYPAVCEFLQHNNLLSILRAHEAQDAGYRMYRKSQTTGFPSLITIFSAPNYLDVYNNKAAVLKYENNVMNIRQFNCSPHPYWLPNFMDVFTWSLPFVGEKVTEMLVNVLNICSDDELGSEEDGFDGATAAARKEVIRNKIRAIGKMARVFSVLREESESVLTLKGLTPTGMLPSGVLSGGKQTLQSATVEAIEADEAIKGFSPQHKITSFEEAKGLDRINERMPPRRDAMPSDANLNSINKALTSETNGTDSNGSNSSNIQ

SEQ ID NO: 7899 - protein, 289 aa, Homo sapiens
MSEPKAIDPKLSTTDRVVKAVPFPPSHRLTAKEVFDNDGKPRVDILKAHLMKEGRLEESVALRIITEGASILRQEKNLLDIDAPVTAAVLKYENNVMNIRQFNCSPHPYWLPNFMDVFTWSLPFVGEKVTEMLVNVLNICSDDELGSEEDGFDGATAAARKEVIRNKIRAIGKMARVFSVLREESESVLTLKGLTPTGMLPSGVLSGGKQTLQSATVEAIEADEAIKGFSPQHKITSFEEAKGLDRINERMPPRRDAMPSDANLNSINKALTSETNGTDSNGSNSSNIQ

SEQ ID NO: 7900 - protein, 454 aa, Homo sapiens
MSEPKAIDPKLSTTDRVVKVCGDIHGQFFDLMKLFEVGGSPANTRYLFLGDYVDRGYFSIECVLYLWALKILYPKTLFLLRGNHECRHLTEYFTFKQECKIKYSERVYDACMDAFDCLPLAALMNQQFLCVHGGLSPEINTLDDIRKLDRFKEPPAYGPMCDILWSDPLEDFGNEKTQEHFTHNTVRGCSYFYSYPAVCEFLQHNNLLSILRAHEAQDAGYRMYRKSQTTGFPSLITIFSAPNYLDVYNNKAAVLKYENNVMNIRQFNCSPHPYWLPNFMDVFTWSLPFVGEKVTEMLVNVLNICSDDELGSEEDGFDGATAAARKEVIRNKIRAIGKMARVFSVLREESESVLTLKGLTPTGMLPSGVLSGGKQTLQSATVEAIEADEAIKGFSPQHKITSFEEAKGLDRINERMPPRRDAMPSDANLNSINKALTSETNGTDSNGSNSSNIQ

SEQ ID NO: 7901 - protein, 132 aa, Homo sapiens
MKEGRLEESVALRIITEGASILRQEKNLLDIDAPVTVCGDIHGQFFDLMKLFEVGGSPANTRYLFLGDYVDRGYFSIECVLYLWALKILYPKTLFLLRGNHECRHLTEYFTFKQECKIKYSERVYDACMDAF

SEQ ID NO: 7902 - protein, 147 aa, Homo sapiens
MKEGRLEESVALRIITEGASILRQEKNLLDIDAPVTVCGDIHGQFFDLMKLFEVGGSPANTRYLFLGDYVDRGYFSIECVLYLWALKILYPKTLFLLRGNHECRHLTEYFTFKQECKIKYSERVYDACMDAFDCLPLAALMNQQFLC

SEQ ID NO: 7903 - protein, 496 aa, Homo sapiens
MAAPEPARAAPPPPPPPPPPPGADRVVKAVPFPPTHRLTSEEVFDLDGIPRVDVLKNHLVKEGRVDEEIALRIINEGAAILRREKTMIEVEAPITVCGDIHGQFFDLMKLFEVGGSPANTRYLFLGDYVDRGYFSIECVLYLWVLKILYPSTLFLLRGNHECRHLTEYFTFKQECKIKYSERVYEACMEAFDSLPLAALLNQQFLCVHGGLSPEIHTLDDIRRLDRFKEPPAFGPMCDLLWSDPSEDFGNEKSQEHFSHNTVRGCSYFYNYPAVCEFLQNNNLLSIIRAHEAQDAGYRMYRKSQTTGFPSLITIFSAPNYLDVYNNKAAVLKYENNVMNIRQFNCSPHPYWLPNFMDVFTWSLPFVGEKVTEMLVNVLSICSDDELMTEGEDQFDGSAAARKEIIRNKIRAIGKMARVFSVLREESESVLTLKGLTPTGMLPSGVLAGGRQTLQSGNDVMQLAVPQMDWGTPHSFANNSHNACREFLLFFSSCLSS

SEQ ID NO: 7904 - protein, 524 aa, Homo sapiens
MAAPEPARAAPPPPPPPPPPPGADRVVKAVPFPPTHRLTSEEVFDLDGIPRVDVLKNHLVKEGRVDEEIALRIINEGAAILRREKTMIEVEAPITVCGDIHGQFFDLMKLFEVGGSPANTRYLFLGDYVDRGYFSIECVLYLWVLKILYPSTLFLLRGNHECRHLTEYFTFKQECKIKYSERVYEACMEAFDSLPLAALLNQQFLCVHGGLSPEIHTLDDIRRLDRFKEPPAFGPMCDLLWSDPSEDFGNEKSQEHFSHNTVRGCSYFYNYPAVCEFLQNNNLLSIIRAHEAQDAGYRMYRKSQTTGFPSLITIFSAPNYLDVYNNKAAVLKYENNVMNIRQFNCSPHPYWLPNFMDVFTWSLPFVGEKVTEMLVNVLSICSDDELMTEGEDQFDGSAAARKEIIRNKIRAIGKMARVFSVLREESESVLTLKGLTPTGMLPSGVLAGGRQTLQSATVEAIEAEKAIRGFSPPHRICSFEEAKGLDRINERMPPRKDAVQQDGFNSLNTAHATENHGTGNHTAQ

SEQ ID NO: 7905 - protein, 514 aa, Homo sapiens
MAAPEPARAAPPPPPPPPPPPGADRVVKAVPFPPTHRLTSEEVFDLDGIPRVDVLKNHLVKEGRVDEEIALRIINEGAAILRREKTMIEVEAPITVCGDIHGQFFDLMKLFEVGGSPANTRYLFLGDYVDRGYFSIEHVLGTEDISINPHNNINECVLYLWVLKILYPSTLFLLRGNHECRHLTEYFTFKQECKIKYSERVYEACMEAFDSLPLAALLNQQFLCVHGGLSPEIHTLDDIRRLDRFKEPPAFGPMCDLLWSDPSEDFGNEKSQEHFSHNTVRGCSYFYNYPAVCEFLQNNNLLSIIRAHEAQDAGYRMYRKSQTTGFPSLITIFSAPNYLDVYNNKAAVLKYENNVMNIRQFNCSPHPYWLPNFMDVFTWSLPFVGEKVTEMLVNVLSICSDDELMTEGEDQFDGSAAARKEIIRNKIRAIGKMARVFSVLREESESVLTLKGLTPTGMLPSGVLAGGRQTLQSGNDVMQLAVPQMDWGTPHSFANNSHNACREFLLFFSSCLSS

SEQ ID NO: 7906 - protein, 196 aa, Homo sapiens
MNIRQFNCSPHPYWLPNFMDVFTWSLPFVGEKVTEMLVNVLSICSDDELMTEGEDQFDERLIYGNKKGSAAARKEIIRNKIRAIGKMARVFSVLREESESVLTLKGLTPTGMLPSGVLAGGRQTLQSATVEAIEAEKAIRGFSPPHRICSFEEAKGLDRINERMPPRKDAVQQDGFNSLNTAHATENHGTGNHTAQ

SEQ ID NO: 7907 - protein, 515 aa, Homo sapiens
MAAPEPARAAPPPPPPPPPPPGADRVVKAVPFPPTHRLTSEEVFDLDGIPRVDVLKNHLVKEGRVDEEIALRIINEGAAILRREKTMIEVEAPITVCGDIHGQFFDLMKLFEVGGSPANTRYLFLGDYVDRGYFSIECVLYLWVLKILYPSTLFLLRGNHECRHLTEYFTFKQECKIKYSERVYEACMEAFDSLPLAALLNQQFLCVHGGLSPEIHTLDDIRRLDRFKEPPAFGPMCDLLWSDPSEDFGNEKSQEHFSHNTVRGCSYFYNYPAVCEFLQNNNLLSIIRAHEAQDAGYRMYRKSQTTGFPSLITIFSAPNYLDVYNNKAAVLKYENNVMNIRQFNCSPHPYWLPNFMDVFTWSLPFVGEKVTEMLVNVLSICSDDELMTEGEDQFDVGSAAARKEIIRNKIRAIGKMARVFSVLREESESVLTLKGLTPTGMLPSGVLAGGRQTLQSAIRGFSPPHRICSFEEAKGLDRINERMPPRKDAVQQDGFNSLNTAHATENHGTGNHTAQ

SEQ ID NO: 7908 - protein, 525 aa, Homo sapiens
MAAPEPARAAPPPPPPPPPPPGADRVVKAVPFPPTHRLTSEEVFDLDGIPRVDVLKNHLVKEGRVDEEIALRIINEGAAILRREKTMIEVEAPITVCGDIHGQFFDLMKLFEVGGSPANTRYLFLGDYVDRGYFSIECVLYLWVLKILYPSTLFLLRGNHECRHLTEYFTFKQECKIKYSERVYEACMEAFDSLPLAALLNQQFLCVHGGLSPEIHTLDDIRRLDRFKEPPAFGPMCDLLWSDPSEDFGNEKSQEHFSHNTVRGCSYFYNYPAVCEFLQNNNLLSIIRAHEAQDAGYRMYRKSQTTGFPSLITIFSAPNYLDVYNNKAAVLKYENNVMNIRQFNCSPHPYWLPNFMDVFTWSLPFVGEKVTEMLVNVLSICSDDELMTEGEDQFDVGSAAARKEIIRNKIRAIGKMARVFSVLREESESVLTLKGLTPTGMLPSGVLAGGRQTLQSATVEAIEAEKAIRGFSPPHRICSFEEAKGLDRINERMPPRKDAVQQDGFNSLNTAHATENHGTGNHTAQ

SEQ ID NO: 7909 - protein, 186 aa, Homo sapiens
HPYWLPNFMDVFTWSLPFVGEKVTEMLVNVLSICSDDELMTEGEDQFDERLIYGNKKGSAAARKEIIRNKIRAIGKMARVFSVLREESESVLTLKGLTPTGMLPSGVLAGGRQTLQSATVEAIEAEKAIRGFSPPHRICSFEEAKGLDRINERMPPRKDAVQQDGFNSLNTAHATENHGTGNHTAQ

SEQ ID NO: 7910 - protein, 152 aa, Homo sapiens
MLVNVLSICSDDELMTEGEDQFDGSAAARKEIIRNKIRAIGKMARVFSVLREESESVLTLKGLTPTGMLPSGVLAGGRQTLQSATVEAIEAEKAIRGFSPPHRICSFEEAKGLDRINERMPPRKDAVQQDGFNSLNTAHATENHGTGNHTAQ

SEQ ID NO: 7911 - protein, 411 aa, Homo sapiens [sequence omitted]

SEQ ID NO: 7912 - protein, 512 aa, Homo sapiens
MSGRRFHLSTTDRVIKAVPFPPTQRLTFKEVFENGKPKVDVLKNHLVKEGRLEEEVALKIINDGAAILRQEKTMIEVDAPITVCGDIHGQFFDLMKLFEVGGSPSNTRYLFLGDYVDRGYFSIECVLYLWSLKINHPKTLFLLRGNHECRHLTDYFTFKQECRIKYSEQVYDACMETFDCLPLAALLNQQFLCVHGGMSPEITSLDDIRKLDRFTEPPAFGPVCDLLWSDPSEDYGNEKTLEHYTHNTVRGCSYFYSYPAVCEFLQNNNLLSIIRAHEAQDAGYRMYRKSQATGFPSLITIFSAPNYLDVYNNKAAVLKYENNVMNIRQFNCSPHPYWLPNFMDVFTWSLPFVGEKVTEMLVNVLNICSDDELISDDEAEGSTTVRKEIIRNKIRAIGKMARVFSILRQESESVLTLKGLTPTGTLPLGVLSGGKQTIETATVEAVEAREAIRGFSLQHKIRSFEEARGLDRINERMPPRKDSIHAGGPMKSVTSAHSHAAHRSDQGKKAHS

SEQ ID NO: 7913 - protein, 502 aa, Homo sapiens
MSGRRFHLSTTDRVIKAVPFPPTQRLTFKEVFENGKPKVDVLKNHLVKEGRLEEEVALKIINDGAAILRQEKTMIEVDAPITVCGDIHGQFFDLMKLFEVGGSPSNTRYLFLGDYVDRGYFSIECVLYLWSLKINHPKTLFLLRGNHECRHLTDYFTFKQECRIKYSEQVYDACMETFDCLPLAALLNQQFLCVHGGMSPEITSLDDIRKLDRFTEPPAFGPVCDLLWSDPSEDYGNEKTLEHYTHNTVRGCSYFYSYPAVCEFLQNNNLLSIIRAHEAQDAGYRMYRKSQATGFPSLITIFSAPNYLDVYNNKAAVLKYENNVMNIRQFNCSPHPYWLPNFMDVFTWSLPFVGEKVTEMLVNVLNICSDDELISDDEAEGSTTVRKEIIRNKIRAIGKMARVFSILRQESESVLTLKGLTPTGTLPLGVLSGGKQTIETAIRGFSLQHKIRSFEEARGLDRINERMPPRKDSIHAGGPMKSVTSAHSHAAHRSDQGKKAHS

SEQ ID NO: 7914 - protein, 170 aa, Homo sapiens
MGNEASYPLEMCSHFDADEIKRLGKRFKKLDLDNSGSLSVEEFMSLPELQQNPLVQRVIDIFDTDGNGEVDFKEFIEGVSQFSVKGDKEQKLRFAFRIYDMDKDGYISNGELFQVLKMMVGNNLKDTQLQQIVDKTIINADKDGDGRISFEEFCAVVGGLDIHKKMVVDV

SEQ ID NO: 7915 - protein, 173 aa, Homo sapiens
MSTMGNEASYPAEMCSHFDNDEIKRLGRRFKKLDLDKSGSLSVEEFMSLPELRHNPLVRRVIDVFDTDGDGEVDFKEFILGTSQFSVKGDEEQKLRFAFSIYDMDKDGYISNGELFQVLKMMVGNNLTDWQLQQLVDKTIIILDKDGDGKISFEEFSAVVRDLEIHKKLVLIV

SEQ ID NO: 7916 - protein, 139 aa, Homo sapiens [sequence omitted]

SEQ ID NO: 7917 - protein, 605 aa, Homo sapiens
MAGLYSLGVSVFSDQGGRKYMEDVTQIVVEPEPTAEEKPSPRRSLSQPLPPRPSPAALPGGEVSGKGPAVAAREARDPLPDAGASPAPSRCCRRRSSVAFFAVCDGHGGREAAQFAREHLWGFIKKQKGFTSSEPAKVCAAIRKGFLACHLAMWKKLAEWPKTMTGLPSTSGTTASVVIIRGMKMYVAHVGDSGVVLGIQDDPKDDFVRAVEVTQDHKPELPKERERIEGLGGSVMNKSGVNRVVWKRPRLTHNGPVRRSTVIDQIPFLAVARALGDLWSYDFFSGEFVVSPEPDTSVHTLDPQKHKYIILGSDGLWNMIPPQDAISMCQDQEEKKYLMGEHGQSCAKMLVNRALGRWRQRMLRADNTSAIVICISPEVDNQGNFTNEDELYLNLTDSPSYNSQETCVMTPSPCSTPPVKSLEEDPWPRVNSKDHIPALVRSNAFSENFLEVSAEIARENVQGVVIPSKDPEPLEENCAKALTLRIHDSLNNSLPIGLVPTNSTNTVMDQKNLKMSTPGQMKAQEIERTPPTNFKRTLEESNSGPLMKKHRRNGLSRSSGAQPASLPTTSQRKNSVKLTMRRRLRGQKKIGNPLLHQHRKTVCVC

SEQ ID NO: 7918 - protein, 430 aa, Homo sapiens
MAGLYSLGVSVFSDQGGRKYMEDVTQIVVEPEPTAEEKPSPRRSLSQPLPPRPSPAALPGGEVSGKGPAVAAREARDPLPDAGASPAPSRCCRRRSSVAFFAVCDGHGGREAAQFAREHLWGFIKKQKGFTSSEPAKVCAAIRKGFLACHLAMWKKLAEWPKTMTGLPSTSGTTASVVIIRGMKMYVAHVGDSGVVLGIQDDPKDDFVRAVEVTQDHKPELPKERERIEGLGGSVMNKSGVNRVVWKRPRLTHNGPVRRSTVIDQIPFLAVARALGDLWSYDFFSGEFVVSPEPDTSVHTLDPQKHKYIILGSDGLWNMIPPQDAISMCQDQEEKKYLMGEHGQSCAKMLVNRALGRWRQRMLRADNTSAIVICISPEVDNQGNFTNEDELYLNLTDSPSYNSQETCVMTPSPCSTPPVKDFGFELDSRK

SEQ ID NO: 7919 - protein, 278 aa, Homo sapiens
MWKKLAEWPKTMTGLPSTSGTTASVVIIRGMKMYVAHVGDSGVVLGIQDDPKDDFVRAVEVTQDHKPELPKERERIEGLGGSVMNKSGVNRVVWKRPRLTHNGPVRRSTVIDQIPFLAVARALGDLWSYDFFSGEFVVSPEPDTSVHTLDPQKHKYIILGSDGLWNMIPPQDAISMCQDQEEKKYLMGEHGQSCAKMLVNRALGRWRQRMLRADNTSAIVICISPEVDNQGNFTNEDELYLNLTDSPSYNSQETCVMTPSPCSTPPVKDFGFELDSRK

SEQ ID NO: 7920 - protein, 1143 aa, Homo sapiens
MYLWLKLLAFGFAFLDTEVFVTGQSPTPSPTDAYLNASETTTLSPSGSAVISTTTIATTPSKPTCDEKYANITVDYLYNKETKLFTAKLNVNENVECGNNTCTNNEVHNLTECKNASVSISHNSCTAPDKTLILDVPPGVEKFQLHDCTQVEKADTTICLKWKNIETFTCDTQNITYRFQCGNMIFDNKEIKLENLEPEHEYKCDSEILYNNHKFTNASKIIKTDFGSPGEPQIIFCRSEAAHQGVITWNPPQRSFHNFTLCYIKETEKDCLNLDKNLIKYDLQNLKPYTKYVLSLHAYIIAKVQRNGSAAMCHFTTKSAPPSQVWNMTVSMTSDNSMHVKCRPPRDRNGPHERYHLEVEAGNTLVRNESHKNCDFRVKDLQYSTDYTFKAYFHNGDYPGEPFILHHSTSYNSKALIAFLAFLIIVTSIALLVVLYKIYDLHKKRSCNLDEQQELVERDDEKQLMNVEPIHADILLETYKRKIADEGRLFLAEFQSIPRVFSKFPIKEARKPFNQNKNRYVDILPYDYNRVELSEINGDAGSNYINASYIDGFKEPRKYIAAQGPRDETVDDFWRMIWEQKATVIVMVTRCEEGNRNKCAEYWPSMEEGTRAFGDVVVKINQHKRCPDYIIQKLNIVNKKEKATGREVTHIQFTSWPDHGVPEDPHLLLKLRRRVNAFSNFFSGPIVVHCSAGVGRTGTYIGIDAMLEGLEAENKVDVYGYVVKLRRQRCLMVQVEAQYILIHQALVEYNQFGETEVNLSELHPYLHNMKKRDPPSEPSPLEAEFQRLPSYRSWRTQHIGNQEENKSKNRNSNVIPYDYNRVPLKHELEMSKESEHDSDESSDDDSDSEEPSKYINASFIMSYWKPEVMIAAQGPLKETIGDFWQMIFQRKVKVIVMLTELKHGDQEICAQYWGEGKQTYGDIEVDLKDTDKSSTYTLRVFELRHSKRKDSRTVYQYQYTNWSVEQLPAEPKELISMIQVVKQKLPQKNSSEGNKHHKSTPLLIHCRDGSQQTGIFCALLNLLESAETEEVVDIFQVVKALRKARPGMVSTFEQYQFLYDVIASTYPAQNGQVKKNNHQEDKIEFDNEVDKVKQDANCVNPLGAPEKLPEAKEQAEGSEPTSGTEGPEHSVNGPASPALNQGS

SEQ ID NO: 7921 - protein, 34 aa, Homo sapiens
MYLWLKLLAFGFAFLDTEVFVTGQSPTPSPTGKN

SEQ ID NO: 7922 - protein, 148 aa, Homo sapiens
MARMNRPAPVEVTYKNMRFLITHNPTNATLNKFIEELKKYGVTTIVRVCEATYDTTLVEKEGIHVLDWPFDDGAPPSNQIVDDWLSLVKIKFREEPGCCIAVHCVAGLGRKRRGAFNSKQLLYLEKYRPKMRLRFKDSNGHRNNCCIQ

SEQ ID NO: 7923 - protein, 148 aa, Homo sapiens; identical to SEQ ID NO: 7922

SEQ ID NO: 7924 - protein, 173 aa, Homo sapiens
MARMNRPAPVEVTYKNMRFLITHNPTNATLNKFIEELKKYGVTTIVRVCEATYDTTLVEKEGIHVLDWPFDDGAPPSNQIVDDWLSLVKIKFREEPGCCIAVHCVAGLGRAPVLVALALIEGGMKYEDAVQFIRQKRRGAFNSKQLLYLEKYRPKMRLRFKDSNGHRNNCCIQ

SEQ ID NO: 7925 - protein, 435 aa, Homo sapiens
MEMEKEFEQIDKSGSWAAIYQDIRHEASDFPCRVAKLPKNKNRNRYRDVSPFDHSRIKLHQEDNDYINASLIKMEEAQRSYILTQGPLPNTCGHFWEMVWEQKSRGVVMLNRVMEKGSLKCAQYWPQKEEKEMIFEDTNLKLTLISEDIKSYYTVRQLELENLTTQETREILHFHYTTWPDFGVPESPASFLNFLFKVRESGSLSPEHGPVVVHCSAGIGRSGTFCLADTCLLLMDKRKDPSSVDIKKVLLEMRKFRMGLIQTADQLRFSYLAVIEGAKFIMGDSSVQDQWKELSHEDLEPPPEHIPPPPRPPKRILEPHNGKCREFFPNHQWVKEETQEDKDCPIKEEKGSPLNAAPYGIESMSQDTEVRSRVVGGSLRGAQAASPAKGEPSLPEKDEDHALSYWKPFLVNMCVATVLTAGAYLCYRFLFNSNT

SEQ ID NO: 7926 - protein, 362 aa, Homo sapiens
MEEAQRSYILTQGPLPNTCGHFWEMVWEQKSRGVVMLNRVMEKGSLKCAQYWPQKEEKEMIFEDTNLKLTLISEDIKSYYTVRQLELENLTTQETREILHFHYTTWPDFGVPESPASFLNFLFKVRESGSLSPEHGPVVVHCSAGIGRSGTFCLADTCLLLMDKRKDPSSVDIKKVLLEMRKFRMGLIQTADQLRFSYLAVIEGAKFIMGDSSVQDQWKELSHEDLEPPPEHIPPPPRPPKRILEPHNGKCREFFPNHQWVKEETQEDKDCPIKEEKGSPLNAAPYGIESMSQDTEVRSRVVGGSLRGAQAASPAKGEPSLPEKDEDHALSYWKPFLVNMCVATVLTAGAYLCYRFLFNSNT

SEQ ID NO: 7927 - protein, 593 aa, Homo sapiens [sequence omitted]

SEQ ID NO: 7928 - protein, 216 aa, Homo sapiens
MTSRRWFHPNITGVEAENLLLTRGVDGSFLARPSKSNPGDFTLSVRRNGAVTHIKIQNTGDYYDLYGGEKFATLAELVQYYMEHHGQLKEKNGDVIELKYPLNCADPTSERWFHGHLSGKEAEKLLTEKGKHGSFLVRESQSHPGDFVLSVRTGDDKGESNDGKSKVTHVMIRCQELKYDVGGGERFDSLTDLVEHYKKNPMVETLGTVLQLKQPL

SEQ ID NO: 7929 - protein, 460 aa, Homo sapiens
MTSRRWFHPNITGVEAENLLLTRGVDGSFLARPSKSNPGDFTLSVRRNGAVTHIKIQNTGDYYDLYGGEKFATLAELVQYYMEHHGQLKEKNGDVIELKYPLNCADPTSERWFHGHLSGKEAEKLLTEKGKHGSFLVRESQSHPGDFVLSVRTGDDKGESNDGKSKVTHVMIRCQELKYDVGGGERFDSLTDLVEHYKKNPMVETLGTVLQLKQPLNTTRINAAEIESRVRELSKLAETTDKVKQGFWEEFETLQQQECKLLYSRKEGQRQENKNKNRYKNILPFDHTRVVLHDGDPNEPVSDYINANIIMPEFETKCNNSKPKKSYIATQGCLQNTVNDFWRMVFQENSRVIVMTTKEVERGKSKCVKYWPDEYALKEYGVMRVRNVKESAAHDYTLRELKLSKVGQGNTERTVWQYHFRTWPDHGVPSDPGGVLDFLEEVHHKQESIMDAGPVVVHCR

SEQ ID NO: 7930 - protein, 240 aa, Homo sapiens
MYLWLKLLAFGFAFLDTEVFVTGQSPTPSPTGHLQAEEQGSQSKSPNLKSREADSSAFSWWPKAREPLTNHWRLTTAKMPSVPLSSDPLPTHTTAFSPASTFERENDFSETTTSLSPDNTSTQVSPDSLDNASAFNTTGVSSVQTPHLPTHADSQTPSAGTDTQTFSGSAANAKLNPTPGSNAISDVPGERSTASTFPTDPVSPLTTTLSLAHHSSAALPARTSNTTITANTSDAYLNAS

SEQ ID NO: 7931 - protein, 1143 aa, Homo sapiens; identical to SEQ ID NO: 7920

SEQ ID NO: 7932 - protein, 1256 aa, Homo sapiens
MYLWLKLLAFGFAFLDTEVFVTGQSPTPSPTGLTTAKMPSVPLSSDPLPTHTTAFSPASTFERENDFSETTTSLSPDNTSTQVSPDSLDNASAFNTTGVSSVQTPHLPTHADSQTPSAGTDTQTFSGSAANAKLNPTPGSNAISDAYLNASETTTLSPSGSAVISTTTIATTPSKPTCDEKYANITVDYLYNKETKLFTAKLNVNENVECGNNTCTNNEVHNLTECKNASVSISHNSCTAPDKTLILDVPPGVEKFQLHDCTQVEKADTTICLKWKNIETFTCDTQNITYRFQCGNMIFDNKEIKLENLEPEHEYKCDSEILYNNHKFTNASKIIKTDFGSPGEPQIIFCRSEAAHQGVITWNPPQRSFHNFTLCYIKETEKDCLNLDKNLIKYDLQNLKPYTKYVLSLHAYIIAKVQRNGSAAMCHFTTKSAPPSQVWNMTVSMTSDNSMHVKCRPPRDRNGPHERYHLEVEAGNTLVRNESHKNCDFRVKDLQYSTDYTFKAYFHNGDYPGEPFILHHSTSYNSKALIAFLAFLIIVTSIALLVVLYKIYDLHKKRSCNLDEQQELVERDDEKQLMNVEPIHADILLETYKRKIADEGRLFLAEFQSIPRVFSKFPIKEARKPFNQNKNRYVDILPYDYNRVELSEINGDAGSNYINASYIDGFKEPRKYIAAQGPRDETVDDFWRMIWEQKATVIVMVTRCEEGNRNKCAEYWPSMEEGTRAFGDVVVKINQHKRCPDYIIQKLNIVNKKEKATGREVTHIQFTSWPDHGVPEDPHLLLKLRRRVNAFSNFFSGPIVVHCSAGVGRTGTYIGIDAMLEGLEAENKVDVYGYVVKLRRQRCLMVQVEAQYILIHQALVEYNQFGETEVNLSELHPYLHNMKKRDPPSEPSPLEAEFQRLPSYRSWRTQHIGNQEENKSKNRNSNVIPYDYNRVPLKHELEMSKESEHDSDESSDDDSDSEEPSKYINASFIMSYWKPEVMIAAQGPLKETIGDFWQMIFQRKVKVIVMLTELKHGDQEICAQYWGEGKQTYGDIEVDLKDTDKSSTYTLRVFELRHSKRKDSRTVYQYQYTNWSVEQLPAEPKELISMIQVVKQKLPQKNSSEGNKHHKSTPLLIHCRDGSQQTGIFCALLNLLESAETEEVVDIFQVVKALRKARPGMVSTFEQYQFLYDVIASTYPAQNGQVKKNNHQEDKIEFDNEVDKVKQDANCVNPLGAPEKLPEAKEQAEGSEPTSGTEGPEHSVNGPASPALNQGS

SEQ ID NO: 7933 - protein, 735 aa, Homo sapiens
MTMYLWLKLLAFGFAFLDTEVFVTGQSPTPSPTGVSSVQTPHLPTHADSQTPSAGTDTQTFSGSAANAKLNPTPGSNAISDVPGERSTASTFPTDPVSPLTTTLSLAHHSSAALPARTSNTTITANTSDAYLNASETTTLSPSGSAVISTTTIATTPSKPTCDEKYANITVDYLYNKETKLFTAKLNVNENVECGNNTCTNNEVHNLTECKNASVSISHNSCTAPDKTLILDVPPGVEKFQLHDCTQVEKADTTICLKWKNIETFTCDTQNITYRFQCGNMIFDNKEIKLENLEPEHEYKCDSEILYNNHKFTNASKIIKTDFGSPGEPQIIFCRSEAAHQGVITWNPPQRSFHNFTLCYIKETEKDCLNLDKNLIKYDLQNLKPYTKYVLSLHAYIIAKVQRNGSAAMCHFTTKSAPPSQVWNMTVSMTSDNSMHVKCRPPRDRNGPHERYHLEVEAGNTLVRNESHKNCDFRVKDLQYSTDYTFKAYFHNGDYPGEPFILHHSTSYNSKALIAFLAFLIIVTSIALLVVLYKIYDLHKKRSCNLDEQQELVERDDEKQLMNVEPIHADILLETYKRKIADEGRLFLAEFQSIPRVFSKFPIKEARKPFNQNKNRYVDILPYDYNRVELSEINGDAGSNYINASYIDGFKEPRKYIAAQGPRDETVDDFWRMIWEQKATVIVMVTRCEEGNRNKCAEYWPSMEEGTRAFGDVVVKINQHKRCPDYIIQKLNIVN

SEQ ID NO: 7934 - protein, 733 aa, Homo sapiens
MYLWLKLLAFGFAFLDTEVFVTGQSPTPSPTGVSSVQTPHLPTHADSQTPSAGTDTQTFSGSAANAKLNPTPGSNAISDVPGERSTASTFPTDPVSPLTTTLSLAHHSSAALPARTSNTTITANTSDAYLNASETTTLSPSGSAVISTTTIATTPSKPTCDEKYANITVDYLYNKETKLFTAKLNVNENVECGNNTCTNNEVHNLTECKNASVSISHNSCTAPDKTLILDVPPGVEKFQLHDCTQVEKADTTICLKWKNIETFTCDTQNITYRFQCGNMIFDNKEIKLENLEPEHEYKCDSEILYNNHKFTNASKIIKTDFGSPGEPQIIFCRSEAAHQGVITWNPPQRSFHNFTLCYIKETEKDCLNLDKNLIKYDLQNLKPYTKYVLSLHAYIIAKVQRNGSAAMCHFTTKSAPPSQVWNMTVSMTSDNSMHVKCRPPRDRNGPHERYHLEVEAGNTLVRNESHKNCDFRVKDLQYSTDYTFKAYFHNGDYPGEPFILHHSTSYNSKALIAFLAFLIIVTSIALLVVLYKIYDLHKKRSCNLDEQQELVERDDEKQLMNVEPIHADILLETYKRKIADEGRLFLAEFQSIPRVFSKFPIKEARKPFNQNKNRYVDILPYDYNRVELSEINGDAGSNYINASYIDGFKEPRKYIAAQGPRDETVDDFWRMIWEQKATVIVMVTRCEEGNRNKCAEYWPSMEEGTRAFGDVVVKINQHKRCPDYIIQKLNIVN

SEQ ID NO: 7935 - protein, 1306 aa, Homo sapiens
MTMYLWLKLLAFGFAFLDTEVFVTGQSPTPSPTGLTTAKMPSVPLSSDPLPTHTTAFSPASTFERENDFSETTTSLSPDNTSTQVSPDSLDNASAFNTTGVSSVQTPHLPTHADSQTPSAGTDTQTFSGSAANAKLNPTPGSNAISDVPGERSTASTFPTDPVSPLTTTLSLAHHSSAALPARTSNTTITANTSDAYLNASETTTLSPSGSAVISTTTIATTPSKPTCDEKYANITVDYLYNKETKLFTAKLNVNENVECGNNTCTNNEVHNLTECKNASVSISHNSCTAPDKTLILDVPPGVEKFQLHDCTQVEKADTTICLKWKNIETFTCDTQNITYRFQCGNMIFDNKEIKLENLEPEHEYKCDSEILYNNHKFTNASKIIKTDFGSPGEPQIIFCRSEAAHQGVITWNPPQRSFHNFTLCYIKETEKDCLNLDKNLIKYDLQNLKPYTKYVLSLHAYIIAKVQRNGSAAMCHFTTKSAPPSQVWNMTVSMTSDNSMHVKCRPPRDRNGPHERYHLEVEAGNTLVRNESHKNCDFRVKDLQYSTDYTFKAYFHNGDYPGEPFILHHSTSYNSKALIAFLAFLIIVTSIALLVVLYKIYDLHKKRSCNLDEQQELVERDDEKQLMNVEPIHADILLETYKRKIADEGRLFLAEFQSIPRVFSKFPIKEARKPFNQNKNRYVDILPYDYNRVELSEINGDAGSNYINASYIDGFKEPRKYIAAQGPRDETVDDFWRMIWEQKATVIVMVTRCEEGNRNKCAEYWPSMEEGTRAFGDVVVKINQHKRCPDYIIQKLNIVNKKEKATGREVTHIQFTSWPDHGVPEDPHLLLKLRRRVNAFSNFFSGPIVVHCSAGVGRTGTYIGIDAMLEGLEAENKVDVYGYVVKLRRQRCLMVQVEAQYILIHQALVEYNQFGETEVNLSELHPYLHNMKKRDPPSEPSPLEAEFQRLPSYRSWRTQHIGNQEENKSKNRNSNVIPYDYNRVPLKHELEMSKESEHDSDESSDDDSDSEEPSKYINASFIMSYWKPEVMIAAQGPLKETIGDFWQMIFQRKVKVIVMLTELKHGDQEICAQYWGEGKQTYGDIEVDLKDTDKSSTYTLRVFELRHSKRKDSRTVYQYQYTNWSVEQLPAEPKELISMIQVVKQKLPQKNSSEGNKHHKSTPLLIHCRDGSQQTGIFCALLNLLESAETEEVVDIFQVVKALRKARPGMVSTFEQYQFLYDVIASTYPAQNGQVKKNNHQEDKIEFDNEVDKVKQDANCVNPLGAPEKLPEAKEQAEGSEPTSGTEGPEHSVNGPASPALNQGS

SEQ ID NO: 7936 - protein, 146 aa, Homo sapiens
MYLWLKLLAFGFAFLDTEVFVTGQSPTPSPTDAYLNASETTTLSPSGSAVISTTTIATTPSKPTCDEKYANITVDYLYNKETKLFTAKLNVNENVECGNNTCTNNEVHNLTECKNASVSISHNSCTAPDKTLILDVPPGVEKFQLH

SEQ ID NO: 7937 - protein, 116 aa, Homo sapiens
MYLWLKLLAFGFAFLDTEVFVTGQSPTPSPTGLTTAKMPSVPLSSDPLPTHTTAFSPASTFERENDFSETTTSLSPDNTSTQVSPDSLDNASAFNTTGVSSVQTPHLPTHADSQTP

SEQ ID NO: 7938 - protein, 1304 aa, Homo sapiens
MYLWLKLLAFGFAFLDTEVFVTGQSPTPSPTGLTTAKMPSVPLSSDPLPTHTTAFSPASTFERENDFSETTTSLSPDNTSTQVSPDSLDNASAFNTTGVSSVQTPHLPTHADSQTPSAGTDTQTFSGSAANAKLNPTPGSNAISDVPGERSTASTFPTDPVSPLTTTLSLAHHSSAALPARTSNTTITANTSDAYLNASETTTLSPSGSAVISTTTIATTPSKPTCDEKYANITVDYLYNKETKLFTAKLNVNENVECGNNTCTNNEVHNLTECKNASVSISHNSCTAPDKTLILDVPPGVEKFQLHDCTQVEKADTTICLKWKNIETFTCDTQNITYRFQCGNMIFDNKEIKLENLEPEHEYKCDSEILYNNHKFTNASKIIKTDFGSPGEPQIIFCRSEAAHQGVITWNPPQRSFHNFTLCYIKETEKDCLNLDKNLIKYDLQNLKPYTKYVLSLHAYIIAKVQRNGSAAMCHFTTKSAPPSQVWNMTVSMTSDNSMHVKCRPPRDRNGPHERYHLEVEAGNTLVRNESHKNCDFRVKDLQYSTDYTFKAYFHNGDYPGEPFILHHSTSYNSKALIAFLAFLIIVTSIALLVVLYKIYDLHKKRSCNLDEQQELVERDDEKQLMNVEPIHADILLETYKRKIADEGRLFLAEFQSIPRVFSKFPIKEARKPFNQNKNRYVDILPYDYNRVELSEINGDAGSNYINASYIDGFKEPRKYIAAQGPRDETVDDFWRMIWEQKATVIVMVTRCEEGNRNKCAEYWPSMEEGTRAFGDVVVKINQHKRCPDYIIQKLNIVNKKEKATGREVTHIQFTSWPDHGVPEDPHLLLKLRRRVNAFSNFFSGPIVVHCSAGVGRTGTYIGIDAMLEGLEAENKVDVYGYVVKLRRQRCLMVQVEAQYILIHQALVEYNQFGETEVNLSELHPYLHNMKKRDPPSEPSPLEAEFQRLPSYRSWRTQHIGNQEENKSKNRNSNVIPYDYNRVPLKHELEMSKESEHDSDESSDDDSDSEEPSKYINASFIMSYWKPEVMIAAQGPLKETIGDFWQMIFQRKVKVIVMLTELKHGDQEICAQYWGEGKQTYGDIEVDLKDTDKSSTYTLRVFELRHSKRKDSRTVYQYQYTNWSVEQLPAEPKELISMIQVVKQKLPQKNSSEGNKHHKSTPLLIHCRDGSQQTGIFCALLNLLESAETEEVVDIFQVVKALRKARPGMVSTFEQYQFLYDVIASTYPAQNGQVKKNNHQEDKIEFDNEVDKVKQDANCVNPLGAPEKLPEAKEQAEGSEPTSGTEGPEHSVNGPASPALNQGS

SEQ ID NO: 7939 - protein, 598 aa, Homo sapiens
MYLWLKLLAFGFAFLDTEVFVTGQSPTPSPTGVSSVQTPHLPTHADSQTPSAGTDTQTFSGSAANAKLNPTPGSNAISDAYLNASETTTLSPSGSAVISTTTIATTPSKPTCDEKYANITVDYLYNKETKLFTAKLNVNENVECGNNTCTNNEVHNLTECKNASVSISHNSCTAPDKTLILDVPPGVEKFQLHDCTQVEKADTTICLKWKNIETFTCDTQNITYRFQCGNMIFDNKEIKLENLEPEHEYKCDSEILYNNHKFTNASKIIKTDFGSPGEPQIIFCRSEAAHQGVITWNPPQRSFHNFTLCYIKETEKDCLNLDKNLIKYDLQNLKPYTKYVLSLHAYIIAKVQRNGSAAMCHFTTKSAPPSQVWNMTVSMTSDNSMHVKCRPPRDRNGPHERYHLEVEAGNTLVRNESHKNCDFRVKDLQYSTDYTFKAYFHNGDYPGEPFILHHSTSYNSKALIAFLAFLIIVTSIALLVVLYKIYDLHKKRSCNLDEQQELVERDDEKQLMNVEPIHADILLETYKRKIADEGRLFLAEFQSIPRVFSKFPIKEARKPFNQNKNRYVDILPYDYNRVELSEINGDAGSNYINASYID

SEQ ID NO: 7940 - protein, 756 aa, Homo sapiens
MYLWLKLLAFGFAFLDTEVFVTGQSPTPSPTGLTTAKMPSVPLSSDPLPTHTTAFSPASTFERENDFSETTTSLSPDNTSTQVSPDSLDNASAFNTTGVSSVQTPHLPTHADSQTPSAGTDTQTFSGSAANAKLNPTPGSNAISDAYLNASETTTLSPSGSAVISTTTIATTPSKPTCDEKYANITVDYLYNKETKLFTAKLNVNENVECGNNTCTNNEVHNLTECKNASVSISHNSCTAPDKTLILDVPPGVEKFQLHDCTQVEKADTTICLKWKNIETFTCDTQNITYRFQCGNMIFDNKEIKLENLEPEHEYKCDSEILYNNHKFTNASKIIKTDFGSPGEPQIIFCRSEAAHQGVITWNPPQRSFHNFTLCYIKETEKDCLNLDKNLIKYDLQNLKPYTKYVLSLHAYIIAKVQRNGSAAMCHFTTKSAPPSQVWNMTVSMTSDNSMHVKCRPPRDRNGPHERYHLEVEAGNTLVRNESHKNCDFRVKDLQYSTDYTFKAYFHNGDYPGEPFILHHSTSYNSKALIAFLAFLIIVTSIALLVVLYKIYDLHKKRSCNLDEQQELVERDDEKQLMNVEPIHADILLETYKRKIADEGRLFLAEFQSIPRVFSKFPIKEARKPFNQNKNRYVDILPYDYNRVELSEINGDAGSNYINASYIDGFKEPRKYIAAQGPRDETVDDFWRMIWEQKATVIVMVTRCEEGNRNKCAEYWPSMEEGTRAFGDVVVKINQHKRCPDYIIQKLNIVNKQKSK

SEQ ID NO: 7941 - protein, 553 aa, Homo sapiens
SDYMIIKKKSNYEVLEKDVGLKRFFPKSLLDSVKAKTLRKLIQQTFRQFANLNREESILKFFEILSPVYRFDKECFKCALGSSWIISVELAIGPEEGISYLTDKGCNPTHLADFTQVQTIQYSNSEDKDRKGMLQLKIAGAPEPLTVTAPSLTIAENMADLIDGYCRLVNGTSQSFIIRPQKEGERALPSIPKLANSEKQGMRTHAVSVSETDDYAEIIDEEDTYTMPSTRDYEIQRERIELGRCIGEGQFGDVHQGIYMSPENPALAVAIKTCKNCTSDSVREKFLQEACHYTSLHWNWCRYISDPNVDCPDPRNAEVTMRQFDHPHIVKLIGVITENPVWIIMELCTLGELRSFLQVRKYSLDLASLILYAYQLSTALAYLESKRFVHRDIAARNVLVSSNDCVKLGDFGLSRYMEDSTYYKASKGKLPIKWMAPESINFRRFTSASDVWMFGVCMWEILMHGVKPFQGVKNNDVIGRIENGERLPMPPNCPPTLYSLMTKCWAYDPSRRPRFTELKAQLSFQNPAQMLPASGRLPNQPCPERENYSFATF

SEQ ID NO: 7942 - protein, 976 aa, Homo sapiens
RSFIILKAIVSQPPGPVLSGMEMLLMSGYELRIRYLPKGFLNQFTEDKPTLNFFYQQVKSDYMLEIADQVDQEIALKLGCLEIRRSYWEMRGNALEKKSNYEVLEKDVGLKRFFPKSLLDSVKAKTLRKLIQQTFRQFANLNREESILKFFEILSPVYRFDKECFKCALGSSWIISVELAIGPEEGISYLTDKGCNPTHLADFTQVQTIQYSNSEDKDRKGMLQLKIAGAPEPLTVTAPSLTIAENMADLIDGYCRLVNGTSQSFIIRPQKEGERALPSIPKLANSEKQGMRTHAVSVSDEIPGAETDDYAEIIDEEDTYTMPSIKSYCIDVARDYEIQRERIELGRCIGEGQFGDVHQGIYMSPENPALAVAIKTCKNCTSDSVREKFLQEALTMRQFDHPHIVKLIGVITENPVWIIMELCTLGELRSFLQVRKYSLDLASLILYAYQLSTALAYLESKRFVHRDIAARNVLVSSNDCVKLGDFGLSRYMEDSTYYKASKGKLPIKWMAPESINFRRFTSASDVWMFGVCMWEILMHGVKPFQGVKNNDVIGRIENGERLPMPPNCPPTLYSLMTKCWAYDPSRRPRFTELKAQLSTILEEEKAQQEERMRMESRRQATVSWDSGGSDEAPPKPSRPGYPSPRSSEGFYPSPQHMVQTNHYQVSGYPGSHGITAMAGSIYPGQASLLDQTDSWNHRPQEIAMWQPNVEDSTVLDLRGIGQVLPTHLMEERLIRQQQEMEEDQRWLEKEERFLKPDVRLSRGSIDREDGSLQGPIGNQHIYQPVGKPDPAAPPKKPPRPGAPGHLGSLASLSSPADSYNEGVKPLRLQPQEISPPPTANLDRSNDKVYENVTGLVKAVIEMSSKIQPAPPEEYVPMVKEVGLALRTLLATVDETIPLLPASTHREIEMAQKLLNSDLGELINKMKLAQQYVMTSLQQEYKKQMLTAAHALAVDAKNLLDVIDQARLKMLGQTRPH

SEQ ID NO: 7943 - protein, 1007 aa, Homo sapiens
KAEYDRYLASSKIMAAAYLDPNLNHTPKEWKYELRIRYLPKGFLNQFTEDKPTLNFFYQQVKSDYMLEIADQVDQEIALKLGCLEIRRSYWEMRGNALEKKSNYEVLEKDVGLKRFFPKSLLDSVKAKTLRKLIQQTFRQFANLNREESILKFFEILSPVYRFDKECFKCALGSSWIISVELAIGPEEGISYLTDKGCNPTHLADFTQVQTIQYSNSEDKDRKGMLQLKIAGAPEPLTVTAPSLTIAENMADLIDGYCRLVNGTSQSFIIRPQKEGERALPSIPKLANSEKQGMRTHAVSVSGVSHCQHKVKKARRFLPLVFCSHDPPSTDEISGDETDDYAEIIDEEDTYTMPSIKSYCIDVARDYEIQRERIELGRCIGEGQFGDVHQGIYMSPENPALAVAIKTCKNCTSDSVREKFLQEALTMRQFDHPHIVKLIGVITENPVWIIMELCTLGELRSFLQVRKYSLDLASLILYAYQLSTALAYLESKRFVHRDIAARNVLVSSNDCVKLGDFGLSRYMEDSTYYKASKGKLPIKWMAPESINFRRFTSASDVWMFGVCMWEILMHGVKPFQGVKNNDVIGRIENGERLPMPPNCPPTLYSLMTKCWAYDPSRRPRFTELKAQLSTILEEEKAQQEERMRMESRRQATVSWDSGGSDEAPPKPSRPGYPSPRSSEGFYPSPQHMVQTNHYQVSGYPGSHGITAMAGSIYPGQASLLDQTDSWNHRPQEIAMWQPNVEDSTVLDLRGIGQVLPTHLMEERLIRQQQEMEEDQRWLEKEERFLKPDVRLSRGSIDREDGSLQGPIGNQHIYQPVGKPDPAAPPKKPPRPGAPGHLGSLASLSSPADSYNEGVKPLRLQPQEISPPPTANLDRSNDKVYENVTGLVKAVIEMSSKIQPAPPEEYVPMVKEVGLALRTLLATVDETIPLLPASTHREIEMAQKLLNSDLGELINKMKLAQQYVMTSLQQEYKKQMLTAAHALAVDAKNLLDVIDQARLKMLGQTRPH

SEQ ID NO: 7944 - protein, 1065 aa, Homo sapiens
MAAAYLDPNLNHTPNSSTKTHLGTGMERSPGAMERVLKVFHYFESNSEPTTWASIIRHGDATDVRGIIQKIVDSHKVKHVACYGFRLSHLRSEEVHWLHVDMGVSSVREKYELAHPPEEWKYELRIRYLPKGFLNQFTEDKPTLNFFYQQVKSDYMLEIADQVDQEIALKLGCLEIRRSYWEMRGNALEKKSNYEVLEKDVGLKRFFPKSLLDSVKAKTLRKLIQQTFRQFANLNREESILKFFEILSPVYRFDKECFKCALGSSWIISVELAIGPEEGISYLTDKGCNPTHLADFTQVQTIQYSNSEDKDRKGMLQLKIAGAPEPLTVTAPSLTIAENMADLIDGYCRLVNGTSQSFIIRPQKEGERALPSIPKLANSEKQGMRTHAVSVSETDDYAEIIDEEDTYTMPSTRDYEIQRERIELGRCIGEGQFGDVHQGIYMSPENPALAVAIKTCKNCTSDSVREKFLQEALTMRQFDHPHIVKLIGVITENPVWIIMELCTLGELRSFLQVRKYSLDLASLILYAYQLSTALAYLESKRFVHRDIAARNVLVSSNDCVKLGDFGLSRYMEDSTYYKASKGKLPIKWMAPESINFRRFTSASDVWMFGVCMWEILMHGVKPFQGVKNNDVIGRIENGERLPMPPNCPPTLYSLMTKCWAYDPSRRPRFTELKAQLSTILEEEKAQQEERMRMESRRQATVSWDSGGSDEAPPKPSRPGYPSPRSSEGFYPSPQHMVQTNHYQVSGYPGSHGITAMAGSIYPGQASLLDQTDSWNHRPQEIAMWQPNVEDSTVLDLRGIGQVLPTHLMEERLIRQQQEMEEDQRWLEKEERFLKPDVRLSRGSIDREDGSLQGPIGNQHIYQPVGKPGKEEKNWAERNPAAPPKKPPRPGAPGHLGSLASLSSPADSYNEGVKPNQLQPQEISPPPTANLDRSNDKVYENVTGLVKAVIEMSSKIQPAPPEEYVPMVKEVGLALRTLLATVDETIPLLPASTHREIEMAQKLLNSDLGELINKMKLAQQYVMTSLQQEYKKQMLTAAHALAVDAKNLLDVIDQARLKMLGQTRPH

SEQ ID NO: 7945 - protein, 750 aa, Homo sapiens
MADLIDGYCRLVNGTSQSFIIRPQKEGERALPSIPKLANSEKQGMRTHAVSVSGVSHCQHKVKKARRFLPLVFCSHDPPSTDEISGDETDDYAEIIDEEDTYTMPSTRDYEIQRERIELGRCIGEGQFGDVHQGIYMSPENPALAVAIKTCKNCTSDSVREKFLQEALTMRQFDHPHIVKLIGVITENPVWIIMELCTLGELRSFLQVRKYSLDLASLILYAYQLSTALAYLESKRFVHRDIAARNVLVSSNDCVKLGDFGLSRYMEDSTYYKASKGKLPIKWMAPESINFRRFTSASDVWMFGVCMWEILMHGVKPFQGVKNNDVIGRIENGERLPMPPNCPPTLYSLMTKCWAYDPSRRPRFTELKAQLSTILEEEKAQQEERMRMESRRQATVSWDSGGSDEAPPKPSRPGYPSPRSSEGFYPSPQHMVQTNHYQVSGYPGSHGITAMAGSIYPGQASLLDQTDSWNHRPQEIAMWQPNVEDSTVLDLRGIGQVLPTHLMEERLIRQQQEMEEDQRWLEKEERFLKPDVRLSRGSIDREDGSLQGPIGNQHIYQPVGKPDPAAPPKKPPRPGAPGHLGSLASLSSPADSYNEGVKPCRLQPQEISPPPTANLDRSNDKVYENVTGLVKAVIEMSSKIQPAPPEEYVPMVKEVGLALRTLLATVDETIPLLPASTHREIEMAQKLLNSDLGELINKMKLAQQYVMTSLQQEYKKQMLTAAHALAVDAKNLLDVIDQARLKMLGQTRPH

SEQ ID NO: 7946 - protein, 362 aa, Homo sapiens
MRMESRRQATVSWDSGGSDEAPPKPSRPGYPSPRSSEGFYPSPQHMVQTNHYQVSGYPGSHGITAMAGSIYPGQASLLDQTDSWNHRPQEIAMWQPNVEDSTVLDLRGIGQVLPTHLMEERLIRQQQEMEEDQRWLEKEERFLKPDVRLSRGSIDREDGSLQGPIGNQHIYQPVGKPDPAAPPKKPPRPGAPGHLGSLASLSSPADSYNEGVKLQPQEISPPPTANLDRSNDKVYENVTGLVKAVIEMSSKIQPAPPEEYVPMVKEVGLALRTLLATVDETIPLLPASTHREIEMAQKLLNSDLGELINKMKLAQQYVMTSLQQEYKKQMLTAAHALAVDAKNLLDVIDQARLKMLGQTRPH

SEQ ID NO: 7947 - protein, 117 aa, Homo sapiens
MAAAYLDPNLNHTPNSSTKTHLGTGMERSPGAMERVLKVFHYFESNSEPTTWASIIRHGDATDVRGIIQKIVDSHKVKHVACYGFRLSHLRSEEVHWLHVDMGVSSVREKYELAHPP

SEQ ID NO: 7948 - protein, 1096 aa, Homo sapiens
MLLELAGQEALKPAGAIYMEKSGCSPFPVCWAKEYDRYLASSKIMAAAYLDPNLNHTPNSSTKTHLGTGMERSPGAMERVLKVFHYFESNSEPTTWASIIRHGDATDVRGIIQKIVDSHKVKHVACYGFRLSHLRSEEVHWLHVDMGVSSVREKYELAHPPEEWKYELRIRYLPKGFLNQFTEDKPTLNFFYQQVKSDYMLEIADQVDQEIALKLGCLEIRRSYWEMRGNALEKKSNYEVLEKDVGLKRFFPKSLLDSVKAKTLRKLIQQTFRQFANLNREESILKFFEILSPVYRFDKECFKCALGSSWIISVELAIGPEEGISYLTDKGCNPTHLADFTQVQTIQYSNSEDKDRKGMLQLKIAGAPEPLTVTAPSLTIAENMADLIDGYCRLVNGTSQSFIIRPQKEGERALPSIPKLANSEKQGMRTHAVSVSETDDYAEIIDEEDTYTMPSTRDYEIQRERIELGRCIGEGQFGDVHQGIYMSPENPALAVAIKTCKNCTSDSVREKFLQEALTMRQFDHPHIVKLIGVITENPVWIIMELCTLGELRSFLQVRKYSLDLASLILYAYQLSTALAYLESKRFVHRDIAARNVLVSSNDCVKLGDFGLSRYMEDSTYYKASKGKLPIKWMAPESINFRRFTSASDVWMFGVCMWEILMHGVKPFQGVKNNDVIGRIENGERLPMPPNCPPTLYSLMTKCWAYDPSRRPRFTELKAQLSTILEEEKAQQEERMRMESRRQATVSWDSGGSDEAPPKPSRPGYPSPRSSEGFYPSPQHMVQTNHYQVSGYPGSHGITAMAGSIYPGQASLLDQTDSWNHRPQEIAMWQPNVEDSTVLDLRGIGQVLPTHLMEERLIRQQQEMEEDQRWLEKEERFLKPDVRLSRGSIDREDGSLQGPIGNQHIYQPVGKPDPAAPPKKPPRPGAPGHLGSLASLSSPADSYNEGVKLQPQEISPPPTANLDRSNDKVYENVTGLVKAVIEMSSKIQPAPPEEYVPMVKEVGLALRTLLATVDETIPLLPASTHREIEMAQKLLNSDLGELINKMKLAQQYVMTSLQQEYKKQMLTAAHALAVDAKNLLDVIDQARLKMLGQTRPH

SEQ ID NO: 7949 - protein, 1096 aa, Homo sapiens; identical to SEQ ID NO: 7948

SEQ ID NO: 7950 - protein, 680 aa, Homo sapiens
MKYQEVRCLTSFNISVSFPAETDDYAEIIDEEDTYTMPSTRDYEIQRERIELGRCIGEGQFGDVHQGIYMSPENPALAVAIKTCKNCTSDSVREKFLQEALTMRQFDHPHIVKLIGVITENPVWIIMELCTLGELRSFLQVRKYSLDLASLILYAYQLSTALAYLESKRFVHRDIAARNVLVSSNDCVKLGDFGLSRYMEDSTYYKASKGKLPIKWMAPESINFRRFTSASDVWMFGVCMWEILMHGVKPFQGVKNNDVIGRIENGERLPMPPNCPPTLYSLMTKCWAYDPSRRPRFTELKAQLSTILEEEKAQQEERMRMESRRQATVSWDSGGSDEAPPKPSRPGYPSPRSSEGFYPSPQHMVQTNHYQVSGYPGSHGITAMAGSIYPGQASLLDQTDSWNHRPQEIAMWQPNVEDSTVLDLRGIGQVLPTHLMEERLIRQQQEMEEDQRWLEKEERFLKPDVRLSRGSIDREDGSLQGPIGNQHIYQPVGKPDPAAPPKKPPRPGAPGHLGSLASLSSPADSYNEGVKLQPQEISPPPTANLDRSNDKVYENVTGLVKAVIEMSSKIQPAPPEEYVPMVKEVGLALRTLLATVDETIPLLPASTHREIEMAQKLLNSDLGELINKMKLAQQYVMTSLQQEYKKQMLTAAHALAVDAKNLLDVIDQARLKMLGQTRPH

SEQ ID NO: 7951 - protein, 1017 aa, Homo sapiens
  VARIANT 1: note = MOD_RES - Any amino acid
XYDRYLASSKIMAAAYLDPNLNHTPNSSTKTHLGTGMERSPGAMERVLKVFHYFESNSEPTTWASIIRHGDATDVRGIIQKIVDSHKVKHVACYGFRLSHLRSEEVHWLHVDMGVSSVREKYELAHPPEEWKYELRIRYLPKGFLNQFTEDKPTLNFFYQQVKSDYMLEIADQVDQEIALKLGCLEIRRSYWEMRGNALEKKSNYEVLEKDVGLKRFFPKSLLDSVKAKTLRKLIQQTFRQFANLNREESILKFFEILSPVYRFDKECFKCALGSSWIISVELAIGPEEGISYLTDKGCNPTHLADFTQVQTIQYSNSEDKDRKGMLQLKIAGAPEPLTVTAPSLTIAENMADLIDGYCRLVNGTSQSFIIRPQKEGERALPSIPKLANSEKQGMRTHAVSVSETDDYAEIIDEEDTYTMPSTRDYEIQRERIELGRCIGEGQFGDVHQGIYMSPENPALAVAIKTCKNCTSDSVREKFLQEALTMRQFDHPHIVKLIGVITENPVWIIMELCTLGELRSFLQVRKYSLDLASLILYAYQLSTALAYLESKRFVHRDIAARNVLVSSNDCVKLGDFGLSRYMEDSTYYKASKGKLPIKWMAPESINFRRFTSASDVWMFGVCMWEILMHGVKPFQGVKNNDVIGRIENGERLPMPPNCPPTLYSLMTKCWAYDPSRRPRFTELKAQLSTILEEEKAQQEERMRMESRRQATVSWDSGGSDEAPPKPSRPGYPSPRSSEGFYPSPQHMVQTNHYQDSTVLDLRGIGQVLPTHLMEERLIRQQQEMEEDQRWLEKEERFLKPDVRLSRGSIDREDGSLQGPIGNQHIYQPVGKPDPAAPPKKPPRPGAPGHLGSLASLSSPADSYNEGVKLQPQEISPPPTANLDRSNDKVYENVTGLVKAVIEMSSKIQPAPPEEYVPMVKEVGLALRTLLATVDETIPLLPASTHREIEMAQKLLNSDLGELINKMKLAQQYVMTSLQQEYKKQMLTAAHALAVDAKNLLDVIDQARLKMLGQTRPH

SEQ ID NO: 7952 - protein, 117 aa, Homo sapiens; identical to SEQ ID NO: 7947

SEQ ID NO: 7953 - protein, 156 aa, Homo sapiens
MAAAYLDPNLNHTPNSSTKTHLGTGMERSPGAMERVLKVFHYFESNSEPTTWASIIRHGDATDVRGIIQKIVDSHKVKHVACYGFRLSHLRSEEVHWLHVDMGVSSVREKYELAHPPEEWKYELRIRYLPKGFLNQFTEDKPTLNFFYQQVKSDYM

SEQ ID NO: 7954 - protein, 1052 aa, Homo sapiens
MAAAYLDPNLNHTPNSSTKTHLGTGMERSPGAMERVLKVFHYFESNSEPTTWASIIRHGDATDVRGIIQKIVDSHKVKHVACYGFRLSHLRSEEVHWLHVDMGVSSVREKYELAHPPEEWKYELRIRYLPKGFLNQFTEDKPTLNFFYQQVKSDYMLEIADQVDQEIALKLGCLEIRRSYWEMRGNALEKKSNYEVLEKDVGLKRFFPKSLLDSVKAKTLRKLIQQTFRQFANLNREESILKFFEILSPVYRFDKECFKCALGSSWIISVELAIGPEEGISYLTDKGCNPTHLADFTQVQTIQYSNSEDKDRKGMLQLKIAGAPEPLTVTAPSLTIAENMADLIDGYCRLVNGTSQSFIIRPQKEGERALPSIPKLANSEKQGMRTHAVSVSETDDYAEIIDEEDTYTMPSTRDYEIQRERIELGRCIGEGQFGDVHQGIYMSPENPALAVAIKTCKNCTSDSVREKFLQEALTMRQFDHPHIVKLIGVITENPVWIIMELCTLGELRSFLQVRKYSLDLASLILYAYQLSTALAYLESKRFVHRDIAARNVLVSSNDCVKLGDFGLSRYMEDSTYYKASKGKLPIKWMAPESINFRRFTSASDVWMFGVCMWEILMHGVKPFQGVKNNDVIGRIENGERLPMPPNCPPTLYSLMTKCWAYDPSRRPRFTELKAQLSTILEEEKAQQEERMRMESRRQATVSWDSGGSDEAPPKPSRPGYPSPRSSEGFYPSPQHMVQTNHYQVSGYPGSHGITAMAGSIYPGQASLLDQTDSWNHRPQEIAMWQPNVEDSTVLDLRGIGQVLPTHLMEERLIRQQQEMEEDQRWLEKEERFLKPDVRLSRGSIDREDGSLQGPIGNQHIYQPVGKPDPAAPPKKPPRPGAPGHLGSLASLSSPADSYNEGVKLQPQEISPPPTANLDRSNDKVYENVTGLVKAVIEMSSKIQPAPPEEYVPMVKEVGLALRTLLATVDETIPLLPASTHREIEMAQKLLNSDLGELINKMKLAQQYVMTSLQQEYKKQMLTAAHALAVDAKNLLDVIDQARLKMLGQTRPH

SEQ ID NO: 7955 - protein, 65 aa, Homo sapiens
MAAAYLDPNLNHTPNSSTKTHLGTGMERSPGAMERVLKVFHYFESNSEPTTWASIIRHGDATDVR

SEQ ID NO: 7956 - protein, 107 aa, Homo sapiens
MAAAYLDPNLNHTPNSSTKTHLGTGMERSPGAMERVLKVFHYFESNSEPTTWASIIRHGDATDVRGIIQKIVDSHKVKHVACYGFRLSHLRSEEVHWLHVDMGVSSV

SEQ ID NO: 7957 - protein, 119 aa, Homo sapiens
MAAAYLDPNLNHTPNSSTKTHLGTGMERSPGAMERVLKVFHYFESNSEPTTWASIIRHGDATDVRGIIQKIVDSHKVKHVACYGFRLSHLRSEEVHWLHVDMGVSSVREKYELAHPPEE

SEQ ID NO: 7958 - protein, 753 aa, Homo sapiens
AENMADLIDGYCRLVNGTSQSFIIRPQKEGERALPSIPKLANSEKQGMRTHAVSVSGVSHCQHKVKKARRFLPLVFCSHDPPSTDEISGDETDDYAEIIDEEDTYTMPSTRDYEIQRERIELGRCIGEGQFGDVHQGIYMSPENPALAVAIKTCKNCTSDSVREKFLQEALTMRQFDHPHIVKLIGVITENPVWIIMELCTLGELRSFLQVRKYSLDLASLILYAYQLSTALAYLESKRFVHRDIAARNVLVSSNDCVKLGDFGLSRYMEDSTYYKASKGKLPIKWMAPESINFRRFTSASDVWMFGVCMWEILMHGVKPFQGVKNNDVIGRIENGERLPMPPNCPPTLYSLMTKCWAYDPSRRPRFTELKAQLSTILEEEKAQQEERMRMESRRQATVSWDSGGSDEAPPKPSRPGYPSPRSSEGFYPSPQHMVQTNHYQVSGYPGSHGITAMAGSIYPGQASLLDQTDSWNHRPQEIAMWQPNVEDSTVLDLRGIGQVLPTHLMEERLIRQQQEMEEDQRWLEKEERFLKPDVRLSRGSIDREDGSLQGPIGNQHIYQPVGKPDPAAPPKKPPRPGAPGHLGSLASLSSPADSYNEGVKPWRLQPQEISPPPTANLDRSNDKVYENVTGLVKAVIEMSSKIQPAPPEEYVPMVKEVGLALRTLLATVDETIPLLPASTHREIEMAQKLLNSDLGELINKMKLAQQYVMTSLQQEYKKQMLTAAHALAVDAKNLLDVIDQARLKMLGQTRPH

SEQ ID NO: 7959 - protein, 1052 aa, Homo sapiens; identical to SEQ ID NO: 7954

SEQ ID NO: 7960 - protein, 724 aa, Homo sapiens
IAENMADLIDGYCRLVNGTSQSFIIRPQKEGERALPSIPKLANSEKQGMRTHAVSVSETDDYAEIIDEEDTYTMPSKSYGIDEARDYEIQRERIELGRCIGEGQFGDVHQGIYMSPENPALAVAIKTCKNCTSDSVREKFLQEALTMRQFDHPHIVKLIGVITENPVWIIMELCTLGELRSFLQVRKYSLDLASLILYAYQLSTALAYLESKRFVHRDIAARNVLVSSNDCVKLGDFGLSRYMEDSTYYKASKGKLPIKWMAPESINFRRFTSASDVWMFGVCMWEILMHGVKPFQGVKNNDVIGRIENGERLPMPPNCPPTLYSLMTKCWAYDPSRRPRFTELKAQLSTILEEEKAQQEERMRMESRRQATVSWDSGGSDEAPPKPSRPGYPSPRSSEGFYPSPQHMVQTNHYQVSGYPGSHGITAMAGSIYPGQASLLDQTDSWNHRPQEIAMWQPNVEDSTVLDLRGIGQVLPTHLMEERLIRQQQEMEEDQRWLEKEERFLKPDVRLSRGSIDREDGSLQGPIGNQHIYQPVGKPDPAAPPKKPPRPGAPGHLGSLASLSSPADSYNEGVKLQPQEISPPPTANLDRSNDKVYENVTGLVKAVIEMSSKIQPAPPEEYVPMVKEVGLALRTLLATVDETIPLLPASTHREIEMAQKLLNSDLGELINKMKLAQQYVMTSLQQEYKKQMLTAAHALAVDAKNLLDVIDQARLKMLGQTRPH

SEQ ID NO: 7961 - protein, 120 aa, Homo sapiens
MAAAYLDPNLNHTPNSSTKTHLGTGMERSPGAMERVLKVFHYFESNSEPTTWASIIRHGDATDVRGIIQKIVDSHKVKHVACYGFRLSHLRSEEVHWLHVDMGVSSVREKYELAHPPEEW

SEQ ID NO: 7962 - protein, 51 aa, Homo sapiens
MAAAYLDPNLNHTPNSSTKTHLGTGMERSPGAMERVLKVFHYFESNSEPTT

SEQ ID NO: 7963 - protein, 1006 aa, Homo sapiens
MAAAYLDPNLNHTPNSSTKTHLGTGMERSPGAMERVLKVFHYFESNSEPTTWASIIRHGDATDVRGIIQKIVDSHKVKHVACYGFRLSHLRSEEVHWLHVDMGVSSVREKYELAHPPEEWKYELRIRYLPKGFLNQFTEDKPTLNFFYQQVKSDYMLEIADQVDQEIALKLGCLEIRRSYWEMRGNALEKKSNYEVLEKDVGLKRFFPKSLLDSVKAKTLRKLIQQTFRQFANLNREESILKFFEILSPVYRFDKECFKCALGSSWIISVELAIGPEEGISYLTDKGCNPTHLADFTQVQTIQYSNSEDKDRKGMLQLKIAGAPEPLTVTAPSLTIAENMADLIDGYCRLVNGTSQSFIIRPQKEGERALPSIPKLANSEKQGMRTHAVSVSETDDYAEIIDEEDTYTMPSTRDYEIQRERIELGRCIGEGQFGDVHQGIYMSPENPALAVAIKTCKNCTSDSVREKFLQEALTMRQFDHPHIVKLIGVITENPVWIIMELCTLGELRSFLQVRKYSLDLASLILYAYQLSTALAYLESKRFVHRDIAARNVLVSSNDCVKLGDFGLSRYMEDSTYYKASKGKLPIKWMAPESINFRRFTSASDVWMFGVCMWEILMHGVKPFQGVKNNDVIGRIENGERLPMPPNCPPTLYSLMTKCWAYDPSRRPRFTELKAQLSTILEEEKAQQEERMRMESRRQATVSWDSGGSDEAPPKPSRPGYPSPRSSEGFYPSPQHMVQTNHYQDSTVLDLRGIGQVLPTHLMEERLIRQQQEMEEDQRWLEKEERFLKPDVRLSRGSIDREDGSLQGPIGNQHIYQPVGKPDPAAPPKKPPRPGAPGHLGSLASLSSPADSYNEGVKLQPQEISPPPTANLDRSNDKVYENVTGLVKAVIEMSSKIQPAPPEEYVPMVKEVGLALRTLLATVDETIPLLPASTHREIEMAQKLLNSDLGELINKMKLAQQYVMTSLQQEYKKQMLTAAHALAVDAKNLLDVIDQARLKMLGQTRPH

SEQ ID NO: 7964 - protein, 720 aa, Homo sapiens
MADLIDGYCRLVNGTSQSFIIRPQKEGERALPSIPKLANSEKQGMRTHAVSVSETDDYAEIIDEEDTYTMPSKSYGIDEARDYEIQRERIELGRCIGEGQFGDVHQGIYMSPENPALAVAIKTCKNCTSDSVREKFLQEALTMRQFDHPHIVKLIGVITENPVWIIMELCTLGELRSFLQVRKYSLDLASLILYAYQLSTALAYLESKRFVHRDIAARNVLVSSNDCVKLGDFGLSRYMEDSTYYKASKGKLPIKWMAPESINFRRFTSASDVWMFGVCMWEILMHGVKPFQGVKNNDVIGRIENGERLPMPPNCPPTLYSLMTKCWAYDPSRRPRFTELKAQLSTILEEEKAQQEERMRMESRRQATVSWDSGGSDEAPPKPSRPGYPSPRSSEGFYPSPQHMVQTNHYQVSGYPGSHGITAMAGSIYPGQASLLDQTDSWNHRPQEIAMWQPNVEDSTVLDLRGIGQVLPTHLMEERLIRQQQEMEEDQRWLEKEERFLKPDVRLSRGSIDREDGSLQGPIGNQHIYQPVGKPDPAAPPKKPPRPGAPGHLGSLASLSSPADSYNEGVKLQPQEISPPPTANLDRSNDKVYENVTGLVKAVIEMSSKIQPAPPEEYVPMVKEVGLALRTLLATVDETIPLLPASTHREIEMAQKLLNSDLGELINKMKLAQQYVMTSLQQEYKKQMLTAAHALAVDAKNLLDVIDQARLKMLGQTRPH

SEQ ID NO: 7965 - protein, 1065 aa, Homo sapiens
MAAAYLDPNLNHTPNSSTKTHLGTGMERSPGAMERVLKVFHYFESNSEPTTWASIIRHGDATDVRGIIQKIVDSHKVKHVACYGFRLSHLRSEEVHWLHVDMGVSSVREKYELAHPPEEWKYELRIRYLPKGFLNQFTEDKPTLNFFYQQVKSDYMLEIADQVDQEIALKLGCLEIRRSYWEMRGNALEKKSNYEVLEKDVGLKRFFPKSLLDSVKAKTLRKLIQQTFRQFANLNREESILKFFEILSPVYRFDKECFKCALGSSWIISVELAIGPEEGISYLTDKGCNPTHLADFTQVQTIQYSNSEDKDRKGMLQLKIAGAPEPLTVTAPSLTIAENMADLIDGYCRLVNGTSQSFIIRPQKEGERALPSIPKLANSEKQGMRTHAVSVSETDDYAEIIDEEDTYTMPSTRDYEIQRERIELGRCIGEGQFGDVHQGIYMSPENPALAVAIKTCKNCTSDSVREKFLQEALTMRQFDHPHIVKLIGVITENPVWIIMELCTLGELRSFLQVRKYSLDLASLILYAYQLSTALAYLESKRFVHRDIAARNVLVSSNDCVKLGDFGLSRYMEDSTYYKASKGKLPIKWMAPESINFRRFTSASDVWMFGVCMWEILMHGVKPFQGVKNNDVIGRIENGERLPMPPNCPPTLYSLMTKCWAYDPSRRPRFTELKAQLSTILEEEKAQQEERMRMESRRQATVSWDSGGSDEAPPKPSRPGYPSPRSSEGFYPSPQHMVQTNHYQVSGYPGSHGITAMAGSIYPGQASLLDQTDSWNHRPQEIAMWQPNVEDSTVLDLRGIGQVLPTHLMEERLIRQQQEMEEDQRWLEKEERFLKPDVRLSRGSIDREDGSLQGPIGNQHIYQPVGKPGKEEKNWAERNPAAPPKKPPRPGAPGHLGSLASLSSPADSYNEGVKPWRLQPQEISPPPTANLDRSNDKVYENVTGLVKAVIEMSSKIQPAPPEEYVPMVKEVGLALRTLLATVDETIPLLPASTHREIEMAQKLLNSDLGELINKMKLAQQYVMTSLQQEYKKQMLTAAHALAVDAKNLLDVIDQARLKMLGQTRPH

SEQ ID NO: 7966 - protein, 967 aa, Homo sapiens
MSGVSEPLSRVKLGTLRRPEGPAEPMVVVPVDVEKEDVRILKVCFYSNSFNPGKNFKLVKCTVQTEIREIITSILLSGRIGPNIRLAECYGLRLKHMKSDEIHWLHPQMTVGEVQDKYECLHVEAEWRYDLQIRYLPEDFMESLKEDRTTLLYFYQQLRNDYMQRYASKVSEGMALQLGCLELRRFFKDMPHNALDKKSNFELLEKEVGLDLFFPKQMQENLKPKQFRKMIQQTFQQYASLREEECVMKFFNTLAGFANIDQETYRCELIQGWNITVDLVIGPKGIRQLTSQDAKPTCLAEFKQIRSIRCLPLEEGQAVLQLGIEGAPQALSIKTSSLAEAENMADLIDGYCRLQGEHQGSLIIHPRKDGEKRNSLPQIPMLNLEARRSHLSESCSIESDIYAEIPDETLRRPGGPQYGIAREDVVLNRILGEGFFGEVYEGVYTNHKGEKINVAVKTCKKDCTLDNKEKFMSEAVIMKNLDHPHIVKLIGIIEEEPTWIIMELYPYGELGHYLERNKNSLKVLTLVLYSLQICKAMAYLESINCVHRDIAVRNILVASPECVKLGDFGLSRYIEDEDYYKASVTRLPIKWMSPESINFRRFTTASDVWMFAVCMWEILSFGKQPFFWLENKDVIGVLEKGDRLPKPDLCPPVLYTLMTRCWDYDPSDRPRFTELVCSLSDVYQMEKDIAMEQERNARYRTPKILEPTAFQEPPPKPSRPKYRPPPQTNLLAPKLQFQEEDFIQPSSREEAQQLWEAEKVKMRQILDKQQKQMVEDYQWLRQEEKSLDPMVYMNDKSPLTPEKEVGYLEFTGPPQKPPRLGAQSIQPTANLDRTDDLVYLNVMELVRAVLELKNELCQLPPEGYVVVVKNVGLTLRKLIGSVDDLLPSLPSSSRTEIEGTQKLLNKDLAELINKMRLAQQNAVTSLSEECKRQMLTASHTLAVDAKNLLDAVDQAKVLANLAHPPAE

SEQ ID NO: 7967 - protein, 1009 aa, Homo sapiens
MSGVSEPLSRVKLGTLRRPEGPAEPMVVVPVDVEKEDVRILKVCFYSNSFNPGKNFKLVKCTVQTEIREIITSILLSGRIGPNIRLAECYGLRLKHMKSDEIHWLHPQMTVGEVQDKYECLHVEAEWRYDLQIRYLPEDFMESLKEDRTTLLYFYQQLRNDYMQRYASKVSEGMALQLGCLELRRFFKDMPHNALDKKSNFELLEKEVGLDLFFPKQMQENLKPKQFRKMIQQTFQQYASLREEECVMKFFNTLAGFANIDQETYRCELIQGWNITVDLVIGPKGIRQLTSQDAKPTCLAEFKQIRSIRCLPLEEGQAVLQLGIEGAPQALSIKTSSLAEAENMADLIDGYCRLQGEHQGSLIIHPRKDGEKRNSLPQIPMLNLEARRSHLSESCSIESDIYAEIPDETLRRPGGPQYGIAREDVVLNRILGEGFFGEVYEGVYTNHKGEKINVAVKTCKKDCTLDNKEKFMSEAVIMKNLDHPHIVKLIGIIEEEPTWIIMELYPYGELGHYLERNKNSLKVLTLVLYSLQICKAMAYLESINCVHRDIAVRNILVASPECVKLGDFGLSRYIEDEDYYKASVTRLPIKWMSPESINFRRFTTASDVWMFAVCMWEILSFGKQPFFWLENKDVIGVLEKGDRLPKPDLCPPVLYTLMTRCWDYDPSDRPRFTELVCSLSDVYQMEKDIAMEQERNARYRTPKILEPTAFQEPPPKPSRPKYRPPPQTNLLAPKLQFQVPEGLCASSPTLTSPMEYPSPVNSLHTPPLHRHNVFKRHSMREEDFIQPSSREEAQQLWEAEKVKMRQILDKQQKQMVEDYQWLRQEEKSLDPMVYMNDKSPLTPEKEVGYLEFTGPPQKPPRLGAQSIQPTANLDRTDDLVYLNVMELVRAVLELKNELCQLPPEGYVVVVKNVGLTLRKLIGSVDDLLPSLPSSSRTEIEGTQKLLNKDLAELINKMRLAQQNAVTSLSEECKRQMLTASHTLAVDAKNLLDAVDQAKVLANLAHPPAE

SEQ ID NO: 7968 - protein, 1009 aa, Homo sapiens; identical to SEQ ID NO: 7967

SEQ ID NO: 7969 - protein, 967 aa, Homo sapiens; identical to SEQ ID NO: 7966

SEQ ID NO: 7970 - protein, 967 aa, Homo sapiens; identical to SEQ ID NO: 7966

SEQ ID NO: 7971 - protein, 802 aa, Homo sapiens
LLPERMSGVSEPLSRVKLGTLRRPEGPAEPMVVVPVDVEKEDVRILKVCFYSNSFNPGKNFKLVKCTVQTEIREIITSILLSGRIGPNIRLAECYGLRLKHMKSDEIHWLHPQMTVGEVQDKYECLHVEAEWRYDLQIRYLPEDFMESLKEDRTTLLYFYQQLRNDYMQRYASKVSEGMALQLGCLELRRFFKDMPHNALDKKSNFELLEKEVGLDLFFPKQMQENLKPKQFRKMIQQTFQQYASLREEECVMKFFNTLAGFANIDQETYRCELIQGWNITVDLVIGPKGIRQLTSQDAKPTCLAEFKQIRSIRCLPLEEGQAVLQLGIEGAPQALSIKTSSLAEAENMADLIDGYCRLQGEHQGSLIIHPRKDGEKRNSLPQIPMLNLEARRSHLSESCSIESDIYAEIPDETLRRPGGPQYGIAREDVVLNRILGEGFFGEVYEGVYTNHKGEKINVAVKTCKKDCTLDNKEKFMSEAVIMKNLDHPHIVKLIGIIEEEPTWIIMELYPYGELGHYLERNKNSLKVLTLVLYSLQICKAMAYLESINCVHRDIAVRNILVASPECVKLGDFGLSRYIEDEDYYKASVTRLPIKWMSPESINFRRFTTASDVWMFAVCMWEILSFGKQPFFWLENKDVIGVLEKGDRLPKPDLCPPVLYTLMTRCWDYDPSDRPRFTELVCSLSDVYQMEKDIAMEQERNARYRTPKILEPTAFQEPPPKPSRPKYRPPPQTNLLAPKLQFQVPEGLCASSPTLTSPMEYPSPVNSLHTPPLHRHNVFKRHSMREEDFIQPSSRGPAAVGG

SEQ ID NO: 7972 - protein, 1009 aa, Homo sapiens; identical to SEQ ID NO: 7967

SEQ ID NO: 7973 - protein, 322 aa, Homo sapiens
MADRDSGSEQGGAALGSGGSLGHPGSGSGSGGGGGGGGGGGGSGGGGGGAPGGLQHETQELASKRVDIQNKRFYLDVKQNAKGRFLKIAEVGAGGNKSRLTLSMSVAVEFRDYLGDFIEHYAQLGPSQPPDLAQAQDEPRRALKSEFLVRENRKYYMDLKENQRGRFLRIRQTVNRGPGLGSTQGQTIALPAQGLIEFRDALAKLIDDYGVEEEPAELPEGTSLTVDNKRFFFDVGSNKYGVFMRVSEVKPTYRNSITVPYKVWAKFGHTFCKYSEEMKKIQEKQREKRAACEQLHQQQQQQQEETAAATLLLQGEEEGEED

SEQ ID NO: 7974 - protein, 195 aa, Homo sapiens
MGRARDAILDALENLTAEELKKFKLKLLSVPLREGYGRIPRGALLSMDALDLTDKLVSFYLETYGAELTANVLRDMGLQEMAGQLQAATHQGSGAAPAGIQAPPQSAAKPGLHFIDQHRAALIARVTNVEWLLDALYGKVLTDEQYQAVRAEPTNPSKMRKLFSFTPAWNWTCKDLLLQALRESQSYLVEDLERS

SEQ ID NO: 7975 - protein, 176 aa, Homo sapiens
MGRARDAILDALENLTAEELKKFKLKLLSVPLREGYGRIPRGALLSMDALDLTDKLVSFYLETYGAELTANVLRDMGLQEMAGQLQAATHQGLHFIDQHRAALIARVTNVEWLLDALYGKVLTDEQYQAVRAEPTNPSKMRKLFSFTPAWNWTCKDLLLQALRESQSYLVEDLERS

SEQ ID NO: 7976 - protein, 135 aa, Homo sapiens
MGRARDAILDALENLTAEELKKFKLQAATHQGSGAAPAGIQAPPQSAAKPGLHFIDQHRAALIARVTNVEWLLDALYGKVLTDEQYQAVRAEPTNPSKMRKLFSFTPAWNWTCKDLLLQALRESQSYLVEDLERS

SEQ ID NO: 7977 - protein, 436 aa, Homo sapiens
MRLARLLRGAALAGPGPGLRAAGFSRSFSSDSGSSPASERGVPGQVDFYARFSPSPLSMKQFLDFGSVNACEKTSFMFLRQELPVRLANIMKEISLLPDNLLRTPSVQLVQSWYIQSLQELLDFKDKSAEDAKAIYDFTDTVIRIRNRHNDVIPTMAQGVIEYKESFGVDPVTSQNVQYFLDRFYMSRISIRMLLNQHSLLFGGKGKGSPSHRKHIGSINPNCNVLEVIKDGYENARRLCDLYYINSPELELEELNAKSPGQPIQVVYVPSHLYHMVFELFKNAMRATMEHHANRGVYPPIQVHVTLGNEDLTVKMSDRGGGVPLRKIDRLFNYMYSTAPRPRVETSRAVPLAGFGYGLPISRLYAQYFQGDLKLYSLEGYGTDAVIYIKALSTDSIERLPVYNKAAWKHYNTNHEADDWCVPSREPKDMTTFRSA

SEQ ID NO: 7978 - protein, 456 aa, Homo sapiens
MRLARLLRGAALAGPGPGLRAAGFSRSFSSDSGSSPASERGVPGQVDFYARFSPSPLSMKQFLDFGSVNACEKTSFMFLRQELPVRLANIMKEISLLPDNLLRTPSVQLVQSWYIQSLQELLDFKDKSAEDAKAIYERPRRTWLQVSSLCCMACKMIFTDTVIRIRNRHNDVIPTMAQGVIEYKESFGVDPVTSQNVQYFLDRFYMSRISIRMLLNQHSLLFGGKGKGSPSHRKHIGSINPNCNVLEVIKDGYENARRLCDLYYINSPELELEELNAKSPGQPIQVVYVPSHLYHMVFELFKNAMRATMEHHANRGVYPPIQVHVTLGNEDLTVKMSDRGGGVPLRKIDRLFNYMYSTAPRPRVETSRAVPLAGFGYGLPISRLYAQYFQGDLKLYSLEGYGTDAVIYIKALSTDSIERLPVYNKAAWKHYNTNHEADDWCVPSREPKDMTTFRSA

SEQ ID NO: 7979 - protein, 436 aa, Homo sapiens; identical to SEQ ID NO: 7977

SEQ ID NO: 7980 - protein, 360 aa, Homo sapiens
MFLRQELPVRLANIMKEISLLPDNLLRTPSVQLVQSWYIQSLQELLDFKDKSAEDAKAIYDFTDTVIRIRNRHNDVIPTMAQGVIEYKESFGVDPVTSQNVQYFLDRFYMSRISIRMLLNQHSLLFGGKGKGSPSHRKHIGSINPNCNVLEVIKDGYENARRLCDLYYINSPELELEELNAKSPGQPIQVVYVPSHLYHMVFELFKNAMRATMEHHANRGVYPPIQVHVTLGNEDLTVKMSDRGGGVPLRKIDRLFNYMYSTAPRPRVETSRAVPLAGFGYGLPISRLYAQYFQGDLKLYSLEGYGTDAVIYIKALSTDSIERLPVYNKAAWKHYNTNHEADDWCVPSREPKDMTTFRSA

SEQ ID NO: 7981 - protein, 281 aa, Homo sapiens
MAQGVIEYKESFGVDPVTSQNVQYFLDRFYMSRISIRMLLNQHSLLFGGKGKGSPSHRKHIGSINPNCNVLEVIKDGYENARRLCDLYYINSPELELEELNAKSPGQPIQVVYVPSHLYHMVFELFKNAMRATMEHHANRGVYPPIQVHVTLGNEDLTVKMSDRGGGVPLRKIDRLFNYMYSTAPRPRVETSRAVPLAGFGYGLPISRLYAQYFQGDLKLYSLEGYGTDAVIYIKALSTDSIERLPVYNKAAWKHYNTNHEADDWCVPSREPKDMTTFRSA

SEQ ID NO: 7982 - protein, 343 aa, Homo sapiens
MKEINLLPDRVLSTPSVQLVQSWYVQSLLDIMEFLDKDPEDHRTLSQFTDALVTIRNRHNDVVPTMAQGVLEYKDTYGDDPVSNQNIQYFLDRFYLSRISIRMLINQHTLIFDGSTNPAHPKHIGSIDPNCNVSEVVKDAYDMAKLLCDKYYMASPDLEIQEINAANSKQPIHMVYVPSHLYHMLFELFKNAMRATVESHESSLILPPIKVMVALGEEDLSIKMSDRGGGVPLRKIERLFSYMYSTAPTPQPGTGGTPLAGFGYGLPISRLYAKYFQGDLQLFSMEGFGTDAVIYLKALSTDSVERLPVYNKSAWRHYQTIQEAGDWCVPSTEPKNTSTYRVS

SEQ ID NO: 7983 - protein, 407 aa, Homo sapiens
MRWVWALLKNASLAGAPKYIEHFSKFSPSPLSMKQFLDFGSSNACEKTSFTFLRQELPVRLANIMKEINLLPDRVLSTPSVQLVQSWYVQSLLDIMEFLDKDPEDHRTLSQFTDALVTIRNRHNDVVPTMAQGVLEYKDTYGDDPVSNQNIQYFLDRFYLSRISIRMLINQHTLIFDGSTNPAHPKHIGSIDPNCNVSEVVKDAYDMAKLLCDKYYMASPDLEIQEINAANSKQPIHMVYVPSHLYHMLFELFKNAMRATVESHESSLILPPIKVMVALGEEDLSIKMSDRGGGVPLRKIERLFSYMYSTAPTPQPGTGGTPLAGFGYGLPISRLYAKYFQGDLQLFSMEGFGTDAVIYLKALSTDSVERLPVYNKSAWRHYQTIQEAGDWCVPSTEPKNTSTYRVS

SEQ ID NO: 7984 - protein, 282 aa, Homo sapiens
MPLLTQQIQDEDDQYSLVASLDNVRNLSTILKAIHFREHATCFATKNGIKVTVENAKCVQANAFIQAGIFQEFKVQEESVTFRINLTVLLDCLSIFGSSPMPGTLTALRMCYQGYGYPLMLFLEEGGVVTVCKINTQEPEETLDFDFCSTNVINKIILQSEGLREAFSELDMTSEVLQITMSPDKPYFRLSTFGNAGSSHLDYPKDSDLMEAFHCNQTQVNRYKISLLKPSTKALVLSCKVSIRTDNRGFLSLQYMIRNEDGQICFVEYYCCPDEEVPESES

SEQ ID NO: 7985 - protein, 282 aa, Homo sapiens; identical to SEQ ID NO: 7984

SEQ ID NO: 7986 - protein, 246 aa, Homo sapiens
MPLLTQQIQDEDDQYSLVASLDNVRNLSTILKAIHFREHATCFATKNGIKVTVENAKCVQANAFIQGTLTALRMCYQGYGYPLMLFLEEGGVVTVCKINTQEPEETLDFDFCSTNVINKIILQSEGLREAFSELDMTSEVLQITMSPDKPYFRLSTFGNAGSSHLDYPKDSDLMEAFHCNQTQVNRYKISLLKPSTKALVLSCKVSIRTDNRGFLSLQYMIRNEDGQICFVEYYCCPDEEVPESES

SEQ ID NO: 7987 - protein, 584 aa, Homo sapiens
MNQHELAVHKKKIEEVETWLKAQVLERQPKQGGSILLITGPPGCGKTTTLKILSKEHGIQVQEWINPVLPDFQKDDFKGMFNTESSFHMFPYQSQIAVFKEFLLRATKYNKLQMLGDDLRTDKKIILVEDLPNQFYRDSHTLHEVLRKYVRIGRCPLIFIISDSLSGDNNQRLLFPKEIQEECSISNISFNPVAPTIMMKFLNRIVTIEANKNGGKITVPDKTSLELLCQGCSGDIRSAINSLQFSSSKGENNLRPRKKGMSLKSDAVLSKSKRRKKPDRVFENQEVQAIGGKDVSLFLFRALGKILYCKRASLTELDSPRLPSHLSEYERDTLLVEPEEVVEMSHMPGDLFNLYLHQNYIDFFMEIDDIVRASEFLSFADILSGDWNTRSLLREYSTSIATRGVMHSNKARGYAHCQGGGSSFRPLHKPQWFLINKKYRENCLAAKALFPDFCLPALCLQTQLLPYLALLTIPMRNQAQISFIQDIGRLPLKRHFGRLKMEALTDREHGMIDPDSGDEAQLNGGHSAEESLGEPTQATVPETWSLPLSQNSASELPASQPQPFSAQGDMEENIIIEDYESDGT

SEQ ID NO: 7988 - protein, 670 aa, Homo sapiens
MNQVTDWVDPSFDDFLECSGVSTITATSLGVNNSSHRRKNGPSTLESSRFPARKRGNLSSLEQIYGLENSKEYLSENEPWVDKYKPETQHELAVHKKKIEEVETWLKAQVLERQPKQGGSILLITGPPGCGKTTTLKILSKEHGIQVQEWINPVLPDFQKDDFKGMFNTESSFHMFPYQSQIAVFKEFLLRATKYNKLQMLGDDLRTDKKIILVEDLPNQFYRDSHTLHEVLRKYVRIGRCPLIFIISDSLSGDNNQRLLFPKEIQEECSISNISFNPVAPTIMMKFLNRIVTIEANKNGGKITVPDKTSLELLCQGCSGDIRSAINSLQFSSSKGENNLRPRKKGMSLKSDAVLSKSKRRKKPDRVFENQEVQAIGGKDVSLFLFRALGKILYCKRASLTELDSPRLPSHLSEYERDTLLVEPEEVVEMSHMPGDLFNLYLHQNYIDFFMEIDDIVRASEFLSFADILSGDWNTRSLLREYSTSIATRGVMHSNKARGYAHCQGGGSSFRPLHKPQWFLINKKYRENCLAAKALFPDFCLPALCLQTQLLPYLALLTIPMRNQAQISFIQDIGRLPLKRHFGRLKMEALTDREHGMIDPDSGDEAQLNGGHSAEESLGEPTQATVPETWSLPLSQNSASELPASQPQPFSAQGDMEENIIIEDYESDGT

SEQ ID NO: 7989 - protein, 670 aa, Homo sapiens; identical to SEQ ID NO: 7988

SEQ ID NO: 7990 - protein, 670 aa, Homo sapiens; identical to SEQ ID NO: 7988

SEQ ID NO: 7991 - protein, 670 aa, Homo sapiens; identical to SEQ ID NO: 7988

SEQ ID NO: 7992 - protein, 505 aa, Homo sapiens
MFNTESSFHMFPYQSQIAVFKEFLLRATKYNKLQMLGDDLRTDKKIILVEDLPNQFYRDSHTLHEVLRKYVRIGRCPLIFIISDSLSGDNNQRLLFPKEIQEECSISNISFNPVAPTIMMKFLNRIVTIEANKNGGKITVPDKTSLELLCQGCSGDIRSAINSLQFSSSKGENNLRPRKKGMSLKSDAVLSKSKRRKKPDRVFENQEVQAIGGKDVSLFLFRALGKILYCKRASLTELDSPRLPSHLSEYERDTLLVEPEEVVEMSHMPGDLFNLYLHQNYIDFFMEIDDIVRASEFLSFADILSGDWNTRSLLREYSTSIATRGVMHSNKARGYAHCQGGGSSFRPLHKPQWFLINKKYRENCLAAKALFPDFCLPALCLQTQLLPYLALLTIPMRNQAQISFIQDIGRLPLKRHFGRLKMEALTDREHGMIDPDSGDEAQLNGGHSAEESLGEPTQATVPETWSLPLSQNSASELPASQPQPFSAQGDMEENIIIEDYESDGT

SEQ ID NO: 7993 - protein, 670 aa, Homo sapiens; identical to SEQ ID NO: 7988

SEQ ID NO: 7994 - protein, 681 aa, Homo sapiens
MSKTFLRPKVSSTKVTDWVDPSFDDFLECSGVSTITATSLGVNNSSHRRKNGPSTLESSRFPARKRGNLSSLEQIYGLENSKEYLSENEPWVDKYKPETQHELAVHKKKIEEVETWLKAQVLERQPKQGGSILLITGPPGCGKTTTLKILSKEHGIQVQEWINPVLPDFQKDDFKGMFNTESSFHMFPYQSQIAVFKEFLLRATKYNKLQMLGDDLRTDKKIILVEDLPNQFYRDSHTLHEVLRKYVRIGRCPLIFIISDSLSGDNNQRLLFPKEIQEECSISNISFNPVAPTIMMKFLNRIVTIEANKNGGKITVPDKTSLELLCQGCSGDIRSAINSLQFSSSKGENNLRPRKKGMSLKSDAVLSKSKRRKKPDRVFENQEVQAIGGKDVSLFLFRALGKILYCKRASLTELDSPRLPSHLSEYERDTLLVEPEEVVEMSHMPGDLFNLYLHQNYIDFFMEIDDIVRASEFLSFADILSGDWNTRSLLREYSTSIATRGVMHSNKARGYAHCQGGGSSFRPLHKPQWFLINKKYRENCLAAKALFPDFCLPALCLQTQLLPYLALLTIPMRNQAQISFIQDIGRLPLKRHFGRLKMEALTDREHGMIDPDSGDEAQLNGGHSAEESLGEPTQATVPETWSLPLSQNSASELPASQPQPFSAQGDMEENIIIEDYESDGT

SEQ ID NO: 7995 - protein, 169 aa, Homo sapiens
MNQVTDWVDPSFDDFLECSGVSTITATSLGVNNSSHRRKNGPSTLESSRFPARKRGNLSSLEQIYGLENSKEYLSENEPWVDKYKPETQHELAVHKKKIEEVETWLKAQVLERQPKQGGSILLITGPPGCGKTTTLKILSKEHGIQVQEWINPVLPDFQKDDFKGMFNT

SEQ ID NO: 7996 - protein, 21 aa, Homo sapiens
MNQVTDWVDPSFDDFLECSGV

SEQ ID NO: 7997 - protein, 681 aa, Homo sapiens; identical to SEQ ID NO: 7994

SEQ ID NO: 7998 - protein, 505 aa, Homo sapiens; identical to SEQ ID NO: 7992

SEQ ID NO: 7999 - protein, 495 aa, Homo sapiens
MDSLAESRWPPGLAVMKTIDDLLRCGICFEYFNIAMIIPQCSHNYCSLCIRKFLSYKTQCPTCCVTVTEPDLKNNRILDELVKSLNFARNHLLQFALESPAKSPASSSSKNLAVKVYTPVASRQSLKQGSRLMDNFLIREMSGSTSELLIKENKSKFSPQKEASPAAKTKETRSVEEIAPDPSEAKRPEPPSTSTLKQVTKVDCPVCGVNIPESHINKHLDSCLSREEKKESLRSSVHKRKPLPKTVYNLLSDRDLKKKLKEHGLSIQGNKQQLIKRHQEFVHMYNAQCDALHPKSAAEIVREIENIEKTRMRLEASKLNESVMVFTKDQTEKEIDEIHSKYRKKHKSEFQLLVDQARKGYKKIAGMSQKTVTITKEDESTEKLSSVCMGQEDNMTSVTNHFSQSKLDSPEELEPDREEDSSSCIDIQEVLSSSESDSCNSSSSDIIRDLLEEEEAWEASHKNDLQDTEISPRQNRRTRAAESAEIEPRNKRNRN

SEQ ID NO: 8000 - protein, 92 aa, Homo sapiens
MDSLAESRWPPGLAVMKTIDDLLRCGICFEYFNIAMIIPQCSHNYCSLCIRKFLSYKTQCPTCCVTVTEPDLKNNRILDELVKSLNFARNHL

SEQ ID NO: 8001 - protein, 363 aa, Homo sapiens
MAVTITLKTLQQQTFKIRMEPDETVKVLKEKIEAEKGRDAFPVAGQKLIYAGKILSDDVPIRDYRIDEKNFVVVMVTKTKAGQGTSAPPEASPTAAPESSTSFPPAPTSGMSHPPPAAREDKSPSEESAPTTSPESVSGSVPSSGSSGREEDAASTLVTGSEYETMLTEIMSMGYERERVVAALRASYNNPHRAVEYLLTGIPGSPEPEHGSVQESQVSEQPATEAAGENPLEFLRDQPQFQNMRQVIQQNPALLPALLQQLGQENPQLLQQISRHQEQFIQMLNEPPGELADISDVEGEVGAIGEEAPQMNYIQVTPQEKEAIERLKALGFPESLVIQAYFACEKNENLAANFLLSQNFDDE

SEQ ID NO: 8002 - protein, 198 aa, Homo sapiens
MLTEIMSMGYERERVVAALRASYNNPHRAVEYLLTGIPGSPEPEHGSVQESQVSEQPATEAAGENPLEFLRDQPQFQNMRQVIQQNPALLPALLQQLGQENPQLLQQISRHQEQFIQMLNEPPGELADISDVEGEVGAIGEEAPQMNYIQVTPQEKEAIERLKALGFPESLVIQAYFACEKNENLAANFLLSQNFDDE

SEQ ID NO: 8003 - protein, 363 aa, Homo sapiens; identical to SEQ ID NO: 8001

SEQ ID NO: 8004 - protein, 308 aa, Homo sapiens
MAVTITLKTLQQQTFKIRMEPDETVKVLKEKIEAEKGRDAFPVAGQKLIYAGKILSDDVPIRDYRIDEKNFVVVMVTKTKAGQGTSAPPEASPTAAPESSTSFPPAPTSGMSHPPPAAREDKSPSEESAPTTSPESVSGSVPSSGSSGREEDAASTLVTGSEYETMLTEIMSMGYERERVVAALRASYNNPHRAVEYLLTGIPGSPEPEHGSVQESQVSEQPATEAAGENPLEFLRDQPQFQNMRQVIQQNPALLPALLQQLGQENPQLLQLKALGFPESLVIQAYFACEKNENLAANFLLSQNFDDE

SEQ ID NO: 8005 - protein, 409 aa, Homo sapiens
MQVTLKTLQQQTFKIDIDPEETVKALKEKIESEKGKDAFPVAGQKLIYAGKILNDDTALKEYKIDEKNFVVVMVTKPKAVSTPAPATTQQSAPASTTAVTSSTTTTVAQAPTPVPALAPTSTPASITPASATASSEPAPASAAKQEKPAEKPAETPVATSPTATDSTSGDSSRSNLFEDATSALVTGQSYENMVTEIMSMGYEREQVIAALRASFNNPDRAVEYLLMGIPGDRESQAVVDPPQAASTGAPQSSAVAAAAATTTATTTTTSSGGHPLEFLRNQPQFQQMRQIIQQNPSLLPALLQQIGRENPQLLQQISQHQEHFIQMLNEPVQEAGGQGGGGGGGSGGIAEAGSGHMNYIQVTPQEKEAIERLKALGFPEGLVIQAYFACEKNENLAANFLLQQNFDED

SEQ ID NO: 8006 - protein, 172 aa, Homo sapiens
MVTKPKAVSTPAPATTQQSAPASTTAVTSSTTTTVAQAPTPVPALAPTSTPASITPASATASSEPAPASAAKQEKPAEKPAETPVATSPTATDSTSGDSSRSNLFEDATSALVTGQSYENMVTEIMSMGYEREQVIAALRASFNNPDRAVEYLLMIIVKTGNKKKKQPLLGK

SEQ ID NO: 8007 - protein, 337 aa, Homo sapiens
MVTKPKAVSTPAPATTQQSAPASTTAVTSSTTTTVAQAPTPVPALAPTSTPASITPASATASSEPAPASAAKQEKPAEKPAETPVATSPTATDSTSGDSSRSNLFEDATSALVTGQSYENMVTEIMSMGYEREQVIAALRASFNNPDRAVEYLLMGIPGDRESQAVVDPPQAASTGAPQSSAVAAAAATTTATTTTTSSGGHPLEFLRNQPQFQQMRQIIQQNPSLLPALLQQIGRENPQLLQQISQHQEHFIQMLNEPVQEAGGQGGGGGGGSGGIAEAGSGHMNYIQVTPQEKEAIERLKALGFPEGLVIQAYFACEKNENLAANFLLQQNFDED

SEQ ID NO: 8008 - protein, 146 aa, Homo sapiens
MQVTLKTLQQQTFKIDIDPEETVKALKEKIESEKGKDAFPVAGQKLIYAGKILNDDTALKEYKIDEKNFVVVMVTKPKAVSTPAPATTQQSAPASTTAVTSSTTTTVAQAPTPVPALAPTSTPASITPASATASSEPAPASAAKQE

SEQ ID NO: 8009 - protein, 80 aa, Homo sapiens
MVKALKEKIESEKGKDAFPVAGQKLIYAGKILNDDTALKEYKIDEKNFVVVMVTKPKAVSTPAPATTQQSAPASTTAVTS

SEQ ID NO: 8010 - protein, 114 aa, Homo sapiens
  VARIANT 1: note = MOD_RES - Any amino acid
XTASSEPAPASAAKQEKPAEKPAETPVATSPTATDSTSGDSSRSNLFEDATSALVTGQSYENMVTEIMSMGYEREQVIAALRASFNNPDRAVEYLLMIIVKTGNKKKKQPLLGK

SEQ ID NO: 8011 - protein, 1312 aa, Homo sapiens
MSRIEKMSILGVRSFGIEDKDKQIITFFSPLTILVGPNGAGKTTIIECLKYICTGDFPPGTKGNTFVHDPKVAQETDVRAQIRLQFRDVNGELIAVQRSMVCTQKSKKTEFKTLEGVITRTKHGEKVSLSSKCAEIDREMISSLGVSKAVLNNVIFCHQEDSNWPLSEGKALKQKFDEIFSATRYIKALETLRQVRQTQGQKVKEYQMELKYLKQYKEKACEIRDQITSKEAQLTSSKEIVKSYENELDPLKNRLKEIEHNLSKIMKLDNEIKALDSRKKQMEKDNSELEEKMEKVFQGTDEQLNDLYHNHQRTVREKERKLVDCHRELEKLNKESRLLNQEKSELLVEQGRLQLQADRHQEHIRARDSLIQSLATQLELDGFERGPFSERQIKNFHKLVRERQEGEAKTANQLMNDFAEKETLKQKQIDEIRDKKTGLGRIIELKSEILSKKQNELKNVKYELQQLEGSSDRILELDQELIKAERELSKAEKNSNVETLKMEVISLQNEKADLDRTLRKLDQEMEQLNHHTTTRTQMEMLTKDKADKDEQIRKIKSRHSDELTSLLGYFPNKKQLEDWLHSKSKEINQTRDRLAKLNKELASSEQNKNHINNELKRKEEQLSSYEDKLFDVCGSQDFESDLDRLKEEIEKSSKQRAMLAGATAVYSQFITQLTDENQSCCPVCQRVFQTEAELQEVISDLQSKLRLAPDKLKSTESELKKKEKRRDEMLGLVPMRQSIIDLKEKEIPELRNKLQNVNRDIQRLKNDIEEQETLLGTIMPEEESAKVCLTDVTIMERFQMELKDVERKIAQQAAKLQGIDLDRTVQQVNQEKQEKQHKLDTVSSKIELNRKLIQDQQEQIQHLKSTTNELKSEKLQISTNLQRRQQLEEQTVELSTEVQSLYREIKDAKEQVSPLETTLEKFQQEKEELINKKNTSNKIAQDKLNDIKEKVKNIHGYMKDIENYIQDGKDDYKKQKETELNKVIAQLSECEKHKEKINEDMRLMRQDIDTQKIQERWLQDNLTLRKRNEELKEVEEERKQHLKEMGQMQVLQMKSEHQKLEENIDNIKRNHNLALGRQKGYEEEIIHFKKELREPQFRDAEEKYREMMIVMRTTELVNKDLDIYYKTLDQAIMKFHSMKMEEINKIIRDLWRSTYRGQDIEYIEIRSDADENVSASDKRRNYNYRVVMLKGDTALDMRGRCSAGQKVLASLIIRLALAETFCLNCGIIALDEPTTNLDRENIESLAHALVEIIKSRSQQRNFQLLVITHDEDFVELLGRSEYVEKFYRIKKNIDQCSEIVKCSVSSLGFNVH

SEQ ID NO: 8012 - protein, 1173 aa, Homo sapiens
MISSLGVSKAVLNNVIFCHQEDSNWPLSEGKALKQKFDEIFSATRYIKALETLRQVRQTQGQKVKEYQMELKYLKQYKEKACEIRDQITSKEAQLTSSKEIVKSYENELDPLKNRLKEIEHNLSKIMKLDNEIKALDSRKKQMEKDNSELEEKMEKVFQGTDEQLNDLYHNHQRTVREKERKLVDCHRELEKLNKESRLLNQEKSELLVEQGRLQLQADRHQEHIRARDSLIQSLATQLELDGFERGPFSERQIKNFHKLVRERQEGEAKTANQLMNDFAEKETLKQKQIDEIRDKKTGLGRIIELKSEILSKKQNELKNVKYELQQLEGSSDRILELDQELIKAERELSKAEKNSNVETLKMEVISLQNEKADLDRTLRKLDQEMEQLNHHTTTRTQMEMLTKDKADKDEQIRKIKSRHSDELTSLLGYFPNKKQLEDWLHSKSKEINQTRDRLAKLNKELASSEQNKNHINNELKRKEEQLSSYEDKLFDVCGSQDFESDLDRLKEEIEKSSKQRAMLAGATAVYSQFITQLTDENQSCCPVCQRVFQTEAELQEVISDLQSKLRLAPDKLKSTESELKKKEKRRDEMLGLVPMRQSIIDLKEKEIPELRNKLQNVNRDIQRLKNDIEEQETLLGTIMPEEESAKVCLTDVTIMERFQMELKDVERKIAQQAAKLQGIDLDRTVQQVNQEKQEKQHKLDTVSSKIELNRKLIQDQQEQIQHLKSTTNELKSEKLQISTNLQRRQQLEEQTVELSTEVQSLYREIKDAKEQVSPLETTLEKFQQEKEELINKKNTSNKIAQDKLNDIKEKVKNIHGYMKDIENYIQDGKDDYKKQKETELNKVIAQLSECEKHKEKINEDMRLMRQDIDTQKIQERWLQDNLTLRKRNEELKEVEEERKQHLKEMGQMQVLQMKSEHQKLEENIDNIKRNHNLALGRQKGYEEEIIHFKKELREPQFRDAEEKYREMMIVMRTTELVNKDLDIYYKTLDQAIMKFHSMKMEEINKIIRDLWRSTYRGQDIEYIEIRSDADENVSASDKRRNYNYRVVMLKGDTALDMRGRCSAGQKVLASLIIRLALAETFCLNCGIIALDEPTTNLDRENIESLAHALVEIIKSRSQQRNFQLLVITHDEDFVELLGRSEYVEKFYRIKKNIDQCSEIVKCSVSSLGFNVH

SEQ ID NO: 8013 - protein, 339 aa, Homo sapiens
MAMQMQLEANADTSVEEESFGPQPISRLEQCGINANDVKKLEEAGFHTVEAVAYAPKKELINIKGISEAKADKILAEAAKLVPMGFTTATEFHQRRSEIIQITTGSKELDKLLQGGIETGSITEMFGEFRTGKTQICHTLAVTCQLPIDRGGGEGKAMYIDTEGTFRPERLLAVAERYGLSGSDVLDNVAYARAFNTDHQTQLLYQASAMMVESRYALLIVDSATALYRTDYSGRGELSARQMHLARFLRMLLRLADEFGVAVVITNQVVAQVDGAAMFAADPKKPIGGNIIAHASTTRLYLRKGRGETRICKIYDSPCLPEAEAMFAINADGVGDAKD

SEQ ID NO: 8014 - protein, 242 aa, Homo sapiens
MAMQMQLEANADTSVEEESFGPQPISRLEQCGINANDVKKLEEAGFHTVEAVAYAPKKELINIKGISEAKADKILLLSHRYGLSGSDVLDNVAYARAFNTDHQTQLLYQASAMMVESRYALLIVDSATALYRTDYSGRGELSARQMHLARFLRMLLRLADEFGVAVVITNQVVAQVDGAAMFAADPKKPIGGNIIAHASTTRLYLRKGRGETRICKIYDSPCLPEAEAMFAINADGVGDAKD

SEQ ID NO: 8015 - protein, 340 aa, Homo sapiens
MAMQMQLEANADTSVEEESFGPQPISRLEQCGINANDVKKLEEAGFHTVEAVAYAPKKELINIKGISEAKADKILTESRSVARLECNSVILVYCTLRLSGSSDSPASASRVVGTTGGIETGSITEMFGEFRTGKTQICHTLAVTCQLPIDRGGGEGKAMYIDTEGTFRPERLLAVAERYGLSGSDVLDNVAYARAFNTDHQTQLLYQASAMMVESRYALLIVDSATALYRTDYSGRGELSARQMHLARFLRMLLRLADEFGVAVVITNQVVAQVDGAAMFAADPKKPIGGNIIAHASTTRLYLRKGRGETRICKIYDSPCLPEAEAMFAINADGVGDAKD

SEQ ID NO: 8016 - protein, 280 aa, Homo sapiens
MAMQMQLEANADTSVEEESFGPQPISRLEQCGINANDVKKLEEAGFHTVEAVAYAPKKELINIKGISEAKADKILAEAAKLVPMGFTTATEFHQRRSEIIQITTGSKELDKLLQGGIETGSITEMFGEFRTGKTQICHTLAVTCQLPIDRGGGEGKAMYIDTEGTFRPERLLAVAERYGLSGSDVLDNVAYARAFNTDHQTQLLYQASAMMVESRYALLIVDSATALYRTDYSGRGELSARQMHLARFLRMLLRLADEIVSEERKRGNQNLQNLRLSLSS

SEQ ID NO: 8017 - protein, 151 aa, Homo sapiens
MAMQMQLEANADTSVEEESFGPQPISRLEQCGINANDVKKLEEAGFHTVEAVAYAPKKELINIKGISEAKADKILAEAAKLVPMGFTTATEFHQRRSEIIQITTGSKELDKLLQGGIETGSITEMFGEFRTGKTQICHTLAVTCQVWSLWQ

SEQ ID NO: 8018 - protein, 75 aa, Homo sapiens
MAMQMQLEANADTSVEEESFGPQPISRLEQCGINANDVKKLEEAGFHTVEAVAYAPKKELINIKGISEAKADKIL

SEQ ID NO: 8019 - protein, 172 aa, Homo sapiens
MAMQMQLEANADTSVEEESFGPQPISRLEQCGINANDVKKLEEAGFHTVEAVAYAPKKELINIKGISEAKADKILAEAAKLVPMGFTTATEFHQRRSEIIQITTGSKELDKLLQGGIETGSITEMFGEFRTGKTQICHTLAVTCQLPIDRGGGEGKAMYIDTEGTFRPERLL

SEQ ID NO: 8020 - protein, 100 aa, Homo sapiens
MAMQMQLEANADTSVEEESFGPQPISRLEQCGINANDVKKLEEAGFHTVEAVAYAPKKELINIKGISEAKADKILVELRLDLSQKCLENSELGRPRSVIR

SEQ ID NO: 8021 - protein, 340 aa, Homo sapiens; identical to SEQ ID NO: 8015

SEQ ID NO: 8022 - protein, 242 aa, Homo sapiens
MAMQMQLEANADTSVEEESFGPQPISRLEQCGINANDVKKLEEAGFHTVEAVAYAPKKELINIKGISEAKADKILAVAERYGLSGSDVLDNVAYARAFNTDHQTQLLYQASAMMVESRYALLIVDSATALYRTDYSGRGELSARQMHLARFLRMLLRLADEFGVAVVITNQVVAQVDGAAMFAADPKKPIGGNIIAHASTTRLYLRKGRGETRICKIYDSPCLPEAEAMFAINADGVGDAKD

SEQ ID NO: 8023 - protein, 350 aa, Homo sapiens
MGSKKLKRVGLSQELCDRLSRHQILTCQDFLCLSPLELMKVTGLSYRGVHELLCMVSRACAPKMQTAYGIKAQRSADFSPAFLSTTLSALDEALHGGVACGSLTEITGPPGCGKTQFCIMMSILATLPTNMGGLEGAVVYIDTESAFSAERLVEIAESRFPRYFNTEEKLLLTSSKVHLYRELTCDEVLQRIESLEEEIISKGIKLVILDSVASVVRKEFDAQLQGNLKERNKFLAREASSLKYLAEEFSIPVILTNQITTHLSGALASQADLVSPADDLSLSEGTSGSSCVIAALGNTWSHSVNTRLILQYLDSERRQILIAKSPLAPFTSFVYTIKEEGLVLQAYAQC

SEQ ID NO: 8024 - protein, 366 aa, Homo sapiens
MGSKKLKRVGLSQELCDRLSRHQILTCQDFLCLSPLELMKVTGLSYRGVHELLCMVSRACAPKMQTAYGIKAQRSADFSPAFLSTTLSALDEALHGGVACGSLTEITGPPGCGKTQFCIMMSILATLPTNMGGLEGAVVYIDTESAFSAERLVEIAESRFPRYFNTEEKLLLTSSKVHLYRELTCDEVLQRIESLEEEIISKGIKLVILDSVASVVRKEFDAQLQGNLKERNKFLAREASSLKYLAEEFSIPVILTNQITTHLSGALASQADLVSPADDLSLSEGTSGSSCVIAALGNTWSHSVNTRLILQYLDSERRQILIAKSPLAPFTSFVYTIKEEGLVLQEFWHICISGFSIQNRLKENES

SEQ ID NO: 8025 - protein, 350 aa, Homo sapiens
MGSKKLKRVGLSQELCDRLSRHQILTCQDFLCLSPLELMKVTGLSYRGVHELLCMVSRACAPKMQTAYGIKAQRSADFSPAFLSTTLSALDEALHGGVACGSLTEITGPPGCGKTQFCIMMSILATLPTNMGGLEGAVVYIDTESAFSAERLVEIAESRFPRYFNTEEKLLLTSSKVHLYRELTCDEVLQRIESLEEEIISKGIKLVILDSVASVVRKEFDAQLQGNLKERNKFLAREASSLKYLAEEFSIPVILTNQITTHLSGALASQADLVSPADDLSLSEGTSGSSCVIAALGNTWSHSVNTRLILQYLDSERRQILIAKSPLAPFTSFVYTIKEEGLVLQGQETP

SEQ ID NO: 8026 - protein, 350 aa, Homo sapiens
MGSKKLKRVGLSQELCDRLSRHQILTCQDFLCLSPLELMKVTGLSYRGVHELLCMVSRACAPKMQTAYGIKAQRSADFSPAFLSTTLSALDEALHGGVACGSLTEITGPPGCGKTQFCIMMSILATLPTNMGGLEGAVVYIDTESAFSAERLVEIAESRFPRYFNTEEKLLLTSSKVHLYRELTCDEVLQRIESLEEEIISKGIKLVILDSVASVVRKEFDAQLQGNLKERNKFLAREASSLKYLAEEFSIPVILTNQITTHLSGALASQADLVSPADDLSLSEGTSGSSCVIAALGNTWSHSVNTRLILQYLDSERRQILIAKSPLAPFTSFVYTIKEEGLVLQGQEKP

SEQ ID NO: 8027 - protein, 133 aa, Homo sapiens
MGSKKLKRVGLSQELCDRLSRHQILTCQDFLCLSPLELMKVTGLSYRGVHELLCMVSRACAPKMQTAYGIKAQRSADFSPAFLSTTLSALDEALHGGVACGSLTEITGPPGCGKTQFCIMMSILATLPTNMGG

SEQ ID NO: 8028 - protein, 384 aa, Homo sapiens
MGSKKLKRVGLSQELCDRLSRHQILTCQDFLCLSPLELMKVTGLSYRGVHELLCMVSRACAPKMQTAYGIKAQRSADFSPAFLSTTLSALDEALHGGVACGSLTEITGPPGCGKTQFCIMMSILATLPTNMGGLEGAVVYIDTESAFSAERLVEIAESRFPRYFNTEEKLLLTSSKVHLYRELTCDEVLQRIESLEEEIISKGIKLVILDSVASVVRKEFDAQLQGNLKERNKFLAREASSLKYLAEEFSIPVILTNQITTHLSGALASQADLVSPADDLSLSEGTSGSSCVIAALGNTWSHSVNTRLILQYLDSERRQILIAKSPLAPFTSFVYTIKEEGLVLQETTFCSVTQAELNWAPEILPPQPPEQLGLQMCHHTQLIF

SEQ ID NO: 8029 - protein, 366 aa, Homo sapiens; identical to SEQ ID NO: 8024

SEQ ID NO: 8030 - protein, 75 aa, Homo sapiens
MGSKKLKRVGLSQELCDRLSRHQILTCQDFLCLSPLELMKVTGLSYRGVHELLCMVSRACAPKMQTAYGIKAQRS

SEQ ID NO: 8031 - protein, 376 aa, Homo sapiens
MRGKTFRFEMQRDLVSFPLSPAVRVKLVSAGFQTAEELLEVKPSELSKEVGISKAEALETLQIIRRECLTNKPRYAGTSESHKKCTALELLEQEHTQGFIITFCSALDDILGGGVPLMKTTEICGAPGVGKTQLCMQLAVDVQIPECFGGVAGEAVFIDTEGSFMVDRVVDLATACIQHLQLIAEKHKGEEHRKALEDFTLDNILSHIYYFRCRDYTELLAQVYLLPDFLSEHSKVRLVIVDGIAFPFRHDLDDLSLRTRLLNGLAQQMISLANNHRLAVILTNQMTTKIDRNQALLVPALGESWGHAATIRLIFHWDRKQRLATLYKSPSQKECTVLFQIKPQGFRDTVVTSACSLQTEGSLSTRKRSRDPEEEL

SEQ ID NO: 8032 - protein, 328 aa, Homo sapiens
MGVLRVGLCPGLTEEMIQLLRSHRIKTVVDLVSADLEEVAQKCGLSYKALVALRRVLLAQFSAFPVNGADLYEELKTSTAILSTGIGRIRLSGNARWLMPKVTEIVGGPGSGKTQVCLCMAANVAHGLQQNVLYVDSNGGLTASRLLQLLQAKTQDEEEQAEALRRIQVVHAFDIFQMLDVLQELRGTVAQQVTGSSGTVKVVVVDSVTAVVSPLLGGQQREGLALMMQLARELKTLARDLGMAVVVTNHITRDRDSGRLKPALGRSWSFVPSTRILLDTIEGAGASGGRRMACLAKSSRQPTGFQEMVDIGTWGTSEQSATLQGDQT

SEQ ID NO: 8033 - protein, 328 aa, Homo sapiens
MGVLRVGLCPGLTEEMIQLLRSHRIKTVVDLVSADLEEVAQKCGLSYKALVALRRVLLAQFSAFPVNGADLYEELKTSTAILSTGIGSLDKLLDAGLYTGEVTEIVGGPGSGKTQVCLCMAANVAHGLQQNVLYVDSNGGLTASRLLQLLQAKTQDEEEQAEALRRIQVVHAFDIFQMLDVLQELRGTVAQQVTGSSGTVKVVVVDSVTAVVSPLLGGQQREGLALMMQLARELKTLARDLGMAVVVTNHITRDRDSGRLKPALGRSWSFVPSTRILLDTIEGAGASGGRRMACLAKSSRQPTGFQEMVDIGTWGTSEQSATLQGDQT

SEQ ID NO: 8034 - protein, 216 aa, Homo sapiens
MGVLRVGLCPGLTEEMIQLLRSHRIKTVVDLVSADLEEVAQKCGLSYKAEALRRIQVVHAFDIFQMLDVLQELRGTVAQQVTGSSGTVKVVVVDSVTAVVSPLLGGQQREGLALMMQLARELKTLARDLGMAVVVTNHITRDRDSGRLKPALGRSWSFVPSTRILLDTIEGAGASGGRRMACLAKSSRQPTGFQEMVDIGTWGTSEQSATLQGDQT

SEQ ID NO: 8035 - protein, 118 aa, Homo sapiens
MGVLRVGLCPGLTEEMIQLLRSHRIKTVVDLVSADLEEVAQKCGLSYKALVALRRVLLAQFSAFPVNGADLYEELKTSTAILSTGIGRHGGRTQVGTWEDCSCLRSPQGDRGVGSGML

SEQ ID NO: 8036 - protein, 283 aa, Homo sapiens
MGVLRVGLCPGLTEEMIQLLRSHRIKTVVDLVSADLEEVAQKCGLSYKALVALRRVLLAQFSAFPVNGADLYEELKTSTAILSTGIGSLDKLLDAGLYTGEVTEIVGGPGSGKTQAEALRRIQVVHAFDIFQMLDVLQELRGTVAQQVTGSSGTVKVVVVDSVTAVVSPLLGGQQREGLALMMQLARELKTLARDLGMAVVVTNHITRDRDSGRLKPALGRSWSFVPSTRILLDTIEGAGASGGRRMACLAKSSRQPTGFQEMVDIGTWGTSEQSATLQGDQT

SEQ ID NO: 8037 - protein, 348 aa, Homo sapiens
MGVLRVGLCPGLTEEMIQLLRSHRIKTVVDLVSADLEEVAQKCGLSYKTWRAHSSGNLGGLQLPQVPAGRSWSGVRNALKKAGLGHGGTDGLSLNAFDERGTAVSTSRLDKLLDAGLYTGEVTEIVGGPGSGKTQVCLCMAANVAHGLQQNVLYVDSNGGLTASRLLQLLQAKTQDEEEQAEALRRIQVVHAFDIFQMLDVLQELRGTVAQQVTGSSGTVKVVVVDSVTAVVSPLLGGQQREGLALMMQLARELKTLARDLGMAVVVTNHITRDRDSGRLKPALGRSWSFVPSTRILLDTIEGAGASGGRRMACLAKSSRQPTGFQEMVDIGTWGTSEQSATLQGDQT

SEQ ID NO: 8038 - protein, 215 aa, Homo sapiens
MVMAALPFSEDLKMPDTCVLPHCPGKENKDVVDLVSADLEEVAQKCGLSYKALVALRRVLLAQFSAFPVNGADLYEELKTSTAILSTGIGSLDKLLDAGLYTGEVTEIVGGPGSGKTQVCLCMAANVAHGLQQNVLYVDSNGGLTASRLLQLLQAKTQDEEEQAEALRRIQVVHAFDIFQMLDVLQELRGTVAQQDGIPEHLNHIPHCLHVHLPC

SEQ ID NO: 8039 - protein, 236 aa, Homo sapiens
MGVLRVGLCPGLTEEMIQLLRSHRIKTVVDLVSADLEEVAQKCGLSYKALVALRRVLLAQFSAFPVNGADLYEELKTSTAILSTGIGSLDKLLDAGLYTGEVTEIVGGPGSGKTQVCLCMAANVAHGLQQNVLYVDSNGGLTASRLLQLLQAKTQDEEEQAEALRRIQVVHAFDIFQMLDVLQELRGTVAQQVTGSSGTVKVVVVDSVTAVVSPLLGGQQREGLALMMQLARELKT

SEQ ID NO: 8040 - protein, 348 aa, Homo sapiens; identical to SEQ ID NO: 8037

SEQ ID NO: 8041 - protein, 418 aa, Homo sapiens
MSGTEEAILGGRDSHPAAGGGSVLCFGQCQYTAEEYQAIQKALRQRLGPEYISSRMAGGGQKVCYIEGHRVINLANEMFGYNGWAHSITQQNVDFVDLNNGKFYVGVCAFVRVQLKDGSYHEDVGYGVSEGLKSKALSLEKARKEAVTDGLKRALRSFGNALGNCILDKDYLRSLNKLPRQLPLEVDLTKAKRQDLEPSVEEARYNSCRPNMALGHPQLQQVTSPSRPSHAVIPADQDCSSRSLSSSAVESEATHQRKLRQKQLQQQFRERMEKQQVRVSTPSAEKSEAAPPAPPVTHSTPVTVSEPLLEKDFLAGVTQELIKTLEDNSEKWAVTPDAGDGVVKPSSRADPAQTSDTLALNNQMVTQNRTPHSVCHQKPQAKSGSWDLQTYSADQRTTGNWESHRKSQDMKKRKYDPS

SEQ ID NO: 8042 - protein, 418 aa, Homo sapiens; identical to SEQ ID NO: 8041

SEQ ID NO: 8043 - protein, 341 aa, Homo sapiens
MFGYNGWAHSITQQNVDFVDLNNGKFYVGVCAFVRVQLKDGSYHEDVGYGVSEGLKSKALSLEKARKEAVTDGLKRALRSFGNALGNCILDKDYLRSLNKLPRQLPLEVDLTKAKRQDLEPSVEEARYNSCRPNMALGHPQLQQVTSPSRPSHAVIPADQDCSSRSLSSSAVESEATHQRKLRQKQLQQQFRERMEKQQVRVSTPSAEKSEAAPPAPPVTHSTPVTVSEPLLEKDFLAGVTQELIKTLEDNSEKWAVTPDAGDGVVKPSSRADPAQTSDTLALNNQMVTQNRTPHSVCHQKPQAKSGSWDLQTYSADQRTTGNWESHRKSQDMKKRKYDPS

SEQ ID NO: 8044 - protein, 226 aa, Homo sapiens
MSGTEEAILGGRDSHPAAGGGSVLCFGQCQYTAEEYQAIQKALRQRLGPEYISSRMAGGGQKVCYIEGHRVINLANEMFGYNGWAHSITQQNVDFVDLNNGKFYVGVCAFVRVQLKDGSYHEDVGYGVSEGLKSKALSLEKARKEAVTDGLKRALRLPLLGVSGRILYSLFSVHSVMCAGGLPTPTASAQTAPSSPCSSAVLRYAQEFWECTWKLYSGQRLPEITK

SEQ ID NO: 8045 - protein, 747 aa, Homo sapiens
MRRSLAPSQLAKRKPEGRSCDDEDWQPGLVTPRKRKSSSETQIQECFLSPFRKPLSQLTNQPPCLDSSQHEAFIRSILSKPFKVPIPNYQGPLGSRALGLKRAGVRRALHDPLEKDALVLYEPPPLSAHDQLKLDKEKLPVHVVVDPILSKVLRPHQREGVKFLWECVTSRRIPGSHGCIMADEMGLGKTLQCITLMWTLLRQSPECKPEIDKAVVVSPSSLVKNWYNEVGKWLGGRIQPLAIDGGSKDEIDQKLEGFMNQRGARVSSPILIISYETFRLHVGVLQKGSVGLVICDEGHRLKNSENQTYQALDSLNTSRRVLISGTPIQNDLLEYFSLVHFVNSGILGTAHEFKKHFELPILKGRDAAASEADRQLGEERLRELTSIVNRCLIRRTSDILSKYLPVKIEQVVCCRLTPLQTELYKRFLRQAKPAEELLEGKMSVSSLSSITSLKKLCNHPALIYDKCVEEEDGFVGALDLFPPGYSSKALEPQLSGKMLVLDYILAVTRSRSSDKVVLVSNYTQTLDLFEKLCRARRYLYVRLDGTMSIKKRAKVVERFNSPSSPDFVFMLSSKAGGCGLNLIGANRLVMFDPDWNPANDEQAMARVWRDGQKKTCYIYRLLSAGTIEEKIFQRQSHKKALSSCVVDEEQDVERHFSLGELKELFILDEASLSDTHDRLHCRRCVNSRQIRPPPDGSDCTSDLAGWNHCTDKWGLRDEVLQAAWDAASTAITFVFHQRSHEEQRGLR

SEQ ID NO: 8046 - protein, 747 aa, Homo sapiens; identical to SEQ ID NO: 8045

SEQ ID NO: 8047 - protein, 567 aa, Homo sapiens
MADEMGLGKTLQCITLMWTLLRQSPECKPEIDKAVVVSPSSLVKNWYNEVGKWLGGRIQPLAIDGGSKDEIDQKLEGFMNQRGARVSSPILIISYETFRLHVGVLQKGSVGLVICDEGHRLKNSENQTYQALDSLNTSRRVLISGTPIQNDLLEYFSLVHFVNSGILGTAHEFKKHFELPILKGRDAAASEADRQLGEERLRELTSIVNRCLIRRTSDILSKYLPVKIEQVVCCRLTPLQTELYKRFLRQAKPAEELLEGKMSVSSLSSITSLKKLCNHPALIYDKCVEEEDGFVGALDLFPPGYSSKALEPQLSGKMLVLDYILAVTRSRSSDKVVLVSNYTQTLDLFEKLCRARRYLYVRLDGTMSIKKRAKVVERFNSPSSPDFVFMLSSKAGGCGLNLIGANRLVMFDPDWNPANDEQAMARVWRDGQKKTCYIYRLLSAGTIEEKIFQRQSHKKALSSCVVDEEQDVERHFSLGELKELFILDEASLSDTHDRLHCRRCVNSRQIRPPPDGSDCTSDLAGWNHCTDKWGLRDEVLQAAWDAASTAITFVFHQRSHEEQRGLR

SEQ ID NO: 8048 - protein, 391 aa, Homo sapiens
MKCLVTGGNVKVLGKAVHSLSRIGDELYLEPLEDGLSLRTVNSSRSAYACFLFAPLFFQQYQAATPGQDLLRCKILMKSFLSVFRSLAMLEKTVEKCCISLNGRSSRLVVQLHCKFGVRKTHNLSFQDCESLQAVFDPASCPHMLRAPARVLGEAVLPFSPALAEVTLGIGRGRRVILRSYHEEEADSTAKAMVTEMCLGEEDFQQLQAQEGVAITFCLKEFRGLLSFAESANLNLSIHFDAPGRPAIFTIKDSLLDGHFVLATLSDTDSHSQDLGSPERHQPVPQLQAHSTPHPDDFANDDIDSYMIAMETTIGNEGSRVLPSISLSPGPQPPKSPGPHSEEEDEAEPSTVPGTPPPKKFRSLFFGSILAPVRSPQGPSPVLAEDSEGEG

SEQ ID NO: 8049 - protein, 583 aa, Homo sapiens
MPKPINVRVTTMDAELEFAIQPNTTGKQLFDQVVKTVGLREVWFFGLQYVDSKGYSTWLKLNKKVTQQDVKKENPLQFKFRAKFFPEDVSEELIQEITQRLFFLQVKEAILNDEIYCPPETAVLLASYAVQAKYGDYNKEIHKPGYLANDRLLPQRVLEQHKLTKEQWEERIQNWHEEHRGMLREDSMMEYLKIAQDLEMYGVNYFEIKNKKGTELWLGVDALGLNIYEHDDKLTPKIGFPWSEIRNISFNDKKFVIKPIDKKAPDFVFYAPRLRINKRILALCMGNHELYMRRRKPDTIEVQQMKAQAREEKHQKQLERAQLENEKKKREIAEKEKERIEREKEELMERLKQIEEQTIKAQKELEEQTRKALELDQERKRAKEEAERLEKERRAAEEAKSAIAKQAADQMKNQEQLAAELAEFTAKIALLEEAKKKKEEEATEWQHKAFAAQEDLEKTKEELKTVMSAPPPPPPPPVIPPTENEHDEHDENNAEASAELSNEGVMNHRSEEERVTETQKNERVKKQLQALSSELAQARDETKKTQNDVLHAENVKAGRDKYKTLRQIRQGNTKQRIDEFEAM

SEQ ID NO: 8050 - protein, 604 aa, Homo sapiens
MPKPINVRVTTMDAELEFAIQPNTTGKQLFDQVVKTVGLREVWFFGLQYVDSKGYSTWLKLNKKVTQQDVKKENPLQFKFRAKFFPEDVSEELIQEITQRLFFLQVKEAILNDEIYCPPETAVLLASYAVQAKYGDYNKEIHKPGYLANDRLLPQRVLEQHKLTKEQWEERIQNWHEEHRGMLREDSMMEYLKIAQDLEMYGVNYFEIKNKKGTELWLGVDALGLNIYEHDDKLTPKIGFPWSEIRNISFNDKKFVIKPIDKKAPDFVFYAPRLRINKRILALCMGNHELYMRRRKPDTIEVQQMKAQAREEKHQKQLERAQLENEKKKREIAEKEKERIEREKEELMERLKQIEEQTIKAQKELEEQTRKALELDQERKRAKEEAERLEKERRAAEEAKSAIAKQAADQMKNQEQLAAELAEFTAKIALLEEAKKKKEEEATEWQHKAFAAQEDLEKTKEELKTVMSAPPPPPPPPVIPPTENEHDEHDENNAEASAELSNEGVMNHRSEEERVTETQKNERVKKQLQALSSELAQARDETKKTQNDVLHAENVKAGRDKYKTLRQIRQGNTKQRIDEFEAMWGPKLYALFQMRSCQSSIKQM

SEQ ID NO: 8051 - protein, 339 aa, Homo sapiens
PHPKINVRVTTMDAELEFAIQPNTTGKQLFDQVVKTVGLREVWFFGLQYVDSKGYSTWLKLNKKVTQQDVKKENPLQFKFRAKFFPEDVSEELIQEITQRLFFLQVKEAILNDEIYCPPETAVLLASYAVQAKYGDYNKEIHKPGYLANDRLLPQRVLEQHKLTKEQWEERIQNWHEEHRGMLREDSMMEYLKIAQDLEMYGVNYFEIKNKKGTELWLGVDALGLNIYEHDDKLTPKIGFPWSEIRNISFNDKKFVIKPIDKKAPDFVFYAPRLRINKRILALCMGNHELYMRRRKPDTIEVQQMKAQAREEKHQKQLERSRLSKIKKKKRKKKKKKKK

SEQ ID NO: 8052 - protein, 604 aa, Homo sapiens; identical to SEQ ID NO: 8050

SEQ ID NO: 8053 - protein, 257 aa, Homo sapiens
MERLKQIEEQTIKAQKELEEQTRKALELDQERKRAKEEAERLEKERRAAEEAKSAIAKQAADQMKNQEQLAAELAEFTAKIALLEEAKKKKEEEATEWQHKAFAAQEDLEKTKEELKTVMSAPPPPPPPPVIPPTENEHDEHDENNAEASAELSNEGVMNHRSEEERVTETQKNERVKKQLQALSSELAQARDETKKTQNDVLHAENVKAGRDKYKTLRQIRQGNTKQRIDEFEAMWGPKLYALFQMRSCQSSIKQM

SEQ ID NO: 8054 - protein, 253 aa, Homo sapiens
GGRIARAHEFEAAVSFCTSAWATERDPVSRKQRELEEQTRKALELDQERKRAKEEAERLEKERRAAEEAKSAIAKQAADQMKNQEQLAAELAEFTAKIALLEEAKKKKEEEATEWQHKAFAAQEDLEKTKEELKTVMSAPPPPPPPPVIPPTENEHDEHDENNAEASAELSNEGVMNHRSEEERVTETQKNERVKKQLQALSSELAQARDETKKTQNDVLHAENVKAGRDKYKTLRQIRQGNTKQRIDEFEAM

SEQ ID NO: 8055 - protein, 200 aa, Homo sapiens
MPKPINVRVTTMDAELEFAIQPNTTGKQLFDQVTQQDVKKENPLQFKFRAKFFPEDVSEELIQEITQRLFFLQVKEAILNDEIYCPPETAVLLASYAVQAKYGDYNKEIHKPGYLANDRLLPQRVLEQHKLTKEQDETKKTQNDVLHAENVKAGRDKYKTLRQIRQGNTKQRIDEFEAMWGPKLYALFQMRSCQSSIKQM

SEQ ID NO: 8056 - protein, 604 aa, Homo sapiens; identical to SEQ ID NO: 8050

SEQ ID NO: 8057 - protein, 447 aa, Homo sapiens
MLSWNLPFSPIQLANNFLTSVLEQHKLTKEQWEERIQNWHEEHRGMLREDSMMEYLKIAQDLEMYGVNYFEIKNKKGTELWLGVDALGLNIYEHDDKLTPKIGFPWSEIRNISFNDKKFVIKPIDKKAPDFVFYAPRLRINKRILALCMGNHELYMRRRKPDTIEVQQMKAQAREEKHQKQLERAQLENEKKKREIAEKEKERIEREKEELMERLKQIEEQTIKAQKELEEQTRKALELDQERKRAKEEAERLEKERRAAEEAKSAIAKQAADQMKNQEQLAAELAEFTAKIALLEEAKKKKEEEATEWQHKAFAAQEDLEKTKEELKTVMSAPPPPPPPPVIPPTENEHDEHDENNAEASAELSNEGVMNHRSEEERVTETQKNERVKKQLQALSSELAQARDETKKTQNDVLHAENVKAGRDKYKTLRQIRQGNTKQRIDEFEAM

SEQ ID NO: 8058 - protein, 1077 aa, Homo sapiens
MDTDSQRSHLSSFTMKLMDKFHSPKIKRTPSKKGKPAEVSVKIPEKPVNKEATDRFLPEGYPLPLDLEQQAVEFMSTSAVASRSQRQKNLSWLEEKEKEVVSALRYFKTIVDKMAIDKKVLEMLPGSASKVLEAILPLVQNDPRIQHSSALSSCYSRVYQSLANLIRWSDQVMLEGVNSEDKEMVTTVKGVIKAVLDGVKELVRLTIEKQGRPSPTSPVKPSSPASKPDGPAELPLTDREVEILNKTTGMSQSTELLPDATDEEVAPPKPPLPGIRVVDNSPPPALPPKKRQSAPSPTRVAVVAPMSRATSGSSLPVGINRQDFDVDCYAQRRLSGGSHSYGGESPRLSPCSSIGKLSKSDEQLSSLDRDSGQCSRNTSCETLDHYDPDYEFLQQDLSNADQIPQQTAWNLSPLPESLGESGSPFLGPPFQLPLGGHPQPDGPLAPGQQTDTPPALPEKKRRSAASQTADGSGCRVSYERHPSQYDNISGEDLQSTAPIPSVPYAPFAAILPFQHGGSSAPVEFVGDFTAPESTGDPEKPPPLPEKKNKHMLAYMQLLEDYSEPQPSMFYQTPQNEHIYQQKNKLLMEVYGFSDSFSGVDSVQELAPPPALPPKQRQLEPPAGKDGHPRDPSAVSGVPGKDSRDGSERAPKSPDALESAQSEEEVDELSLIDHNEIMSRLTLKQEGDDGPDVRGGSGDILLVHATETDRKDLVLYCEAFLTTYRTFISPEELIKKLQYRYEKFSPFADTFKKRVSKNTFFVLVRVVDELCLVELTEEILKLLMELVFRLVCNGELSLARVLRKNILDKVDQKKLLRCATSSQPLAARGVAARPGTLHDFHSHEIAEQLTLLDAELFYKIEIPEVLLWAKEQNEEKSPNLTQFTEHFNNMSYWVRSIIMLQEKAQDRERLLLKFIKIMKHLRKLNNFNSYLAILSALDSAPIRRLEWQKQTSEGLAEYCTLIDSSSSFRAYRAALSEVEPPCIPYLGLILQDLTFVHLGNPDYIDGKVNFSKRWQQFNILDSMRCFQQAHYDMRRNDDIINFFNDFSDHLAEEALWELSLKIKPRNITRRKTDREEKT

SEQ ID NO: 8059 - protein, 1055 aa, Homo sapiens
MSTSAVASRSQRQKNLSWLEEKEKEVVSALRYFKTIVDKMAIDKKVLEMLPGSASKVLEAILPLVQNDPRIQHSSALSSCYSRVYQSLANLIRWSDQVMLEGVNSEDKEMVTTVKGVIKAVLDGVKELVRLTIEKQGRPSPTSPVKPSSPASKPDGPAELPLTDREVEILNKTTGMSQSTELLPDATDEEVAPPKPPLPGIRVVDNSPPPALPPKKRQSAPSPTRVAVVAPMSRATSGSSLPVGINRQDFDVDCYAQRRLSGGSHSYGGESPRLSPCSSIGKLSKSDEQLSSLDRDSGQCSRNTSCETLDHYDPDYEFLQQDLSNADQIPQQTAWNLSPLPESLGESGSPFLGPPFQLPLGGHPQPDGPLAPGQQTDTPPALPEKKRRSAASQTADGSGCRVSYERHPSQYDNISGEDLQSTAPIPSVPYAPFAAILPFQHGGSSAPVEFVGDFTAPESTGDPEKPPPLPEKKNKHMLAYMQLLEDYSEPQPSMFYQTPQNEHIYQQKNKLLMEVYGFSDSFSGVDSVQELAPPPALPPKQRQLASCAASSFSSVSHCVQQTKVAFTPEDGSAAQGLSVSVSNSFLSRHGSLPVPSEPPAGKDGHPRDPSAVSGVPGKDSRDGSERAPKSPDALESAQSEEEVDELSLIDHNEIMSRLTLKQEGDDGPDVRGGSGDILLVHATETDRKDLVLYCEAFLTTYRTFISPEELIKKLQYRYEKFSPFADTFKKRVSKNTFFVLVRVVDELCLVELTEEILKLLMELVFRLVCNGELSLARVLRKNILDKVDQKKLLRCATSSQPLAARGVAARPGTLHDFHSHEIAEQLTLLDAELFYKIEIPEVLLWAKEQNEEKSPNLTQFTEHFNNMSYWVRSIIMLQEKAQDRERLLLKFIKIMKHLRKLNNFNSYLAILSALDSAPIRRLEWQKQTSEGLAEYCTLIDSSSSFRAYRAALSEVEPPCIPYLGLILQDLTFVHLGNPDYIDGKVNFSKRWQQFNILDSMRCFQQAHYDMRRNDDIINFFNDFSDHLAEEALWELSLKIKPRNITRRKTDREEKT

SEQ ID NO: 8060 - protein, 1094 aa, Homo sapiens
MSGGLGLRRSPEMSGKIEKADSQRSHLSSFTMKLMDKFHSPKIKRTPSKKGKPAEVSVKIPEKPVNKEATDRFLPEGYPLPLDLEQQAVEFMSTSAVASRSQRQKNLSWLEEKEKEVVSALRYFKTIVDKMAIDKKVLEMLPGSASKVLEAILPLVQNDPRIQHSSALSSCYSRVYQSLANLIRWSDQVMLEGVNSEDKEMVTTVKGVIKAVLDGVKELVRLTIEKQGRPSPTSPVKPSSPASKPDGPAELPLTDREVEILNKTTGMSQSTELLPDATDEEVAPPKPPLPGIRVVDNSPPPALPPKKRQSAPSPTRVAVVAPMSRATSGSSLPVGINRQDFDVDCYAQRRLSGGSHSYGGESPRLSPCSSIGKLSKSDEQLSSLDRDSGQCSRNTSCETLDHYDPDYEFLQQDLSNADQIPQQTAWNLSPLPESLGESGSPFLGPPFQLPLGGHPQPDGPLAPGQQTDTPPALPEKKRRSAASQTADGSGCRVSYERHPSQYDNISGEDLQSTAPIPSVPYAPFAAILPFQHGGSSAPVEFVGDFTAPESTGDPEKPPPLPEKKNKHMLAYMQLLEDYSEPQPSMFYQTPQNEHIYQQKNKLLMEVYGFSDSFSGVDSVQELAPPPALPPKQRQLEPPAGKDGHPRDPSAVSGVPGKDSRDGSERAPKSPDALESAQSEEEVDELSLIDHNEIMSRLTLKQEGDDGPDVRGGSGDILLVHATETDRKDLVLYCEAFLTTYRTFISPEELIKKLQYRYEKFSPFADTFKKRVSKNTFFVLVRVVDELCLVELTEEILKLLMELVFRLVCNGELSLARVLRKNILDKVDQKKLLRCATSSQPLAARGVAARPGTLHDFHSHEIAEQLTLLDAELFYKIEIPEVLLWAKEQNEEKSPNLTQFTEHFNNMSYWVRSIIMLQEKAQDRERLLLKFIKIMKHLRKLNNFNSYLAILSALDSAPIRRLEWQKQTSEGLAEYCTLIDSSSSFRAYRAALSEVEPPCIPYLGLILQDLTFVHLGNPDYIDGKVNFSKRWQQFNILDSMRCFQQAHYDMRRNDDIINFFNDFSDHLAEEALWELSLKIKPRNITRRKTDREEKT

SEQ ID NO: 8061 - protein, 1077 aa, Homo sapiens; identical to SEQ ID NO: 8058

SEQ ID NO: 8062 - protein, 1095 aa, Homo sapiens
MGNAIEKQKPLKRSHLYPWKQDSQRSHLSSFTMKLMDKFHSPKIKRTPSKKGKPAEVSVKIPEKPVNKEATDRFLPEGYPLPLDLEQQAVEFMSTSAVASRSQRQKNLSWLEEKEKEVVSALRYFKTIVDKMAIDKKVLEMLPGSASKVLEAILPLVQNDPRIQHSSALSSCYSRVYQSLANLIRWSDQVMLEGVNSEDKEMVTTVKGVIKAVLDGVKELVRLTIEKQGRPSPTSPVKPSSPASKPDGPAELPLTDREVEILNKTTGMSQSTELLPDATDEEVAPPKPPLPGIRVVDNSPPPALPPKKRQSAPSPTRVAVVAPMSRATSGSSLPVGINRQDFDVDCYAQRRLSGGSHSYGGESPRLSPCSSIGKLSKSDEQLSSLDRDSGQCSRNTSCETLDHYDPDYEFLQQDLSNADQIPQQTAWNLSPLPESLGESGSPFLGPPFQLPLGGHPQPDGPLAPGQQTDTPPALPEKKRRSAASQTADGSGCRVSYERHPSQYDNISGEDLQSTAPIPSVPYAPFAAILPFQHGGSSAPVEFVGDFTAPESTGDPEKPPPLPEKKNKHMLAYMQLLEDYSEPQPSMFYQTPQNEHIYQQKNKLLMEVYGFSDSFSGVDSVQELAPPPALPPKQRQLEPPAGKDGHPRDPSAVSGVPGKDSRDGSERAPKSPDALESAQSEEEVDELSLIDHNEIMSRLTLKQEGDDGPDVRGGSGDILLVHATETDRKDLVLYCEAFLTTYRTFISPEELIKKLQYRYEKFSPFADTFKKRVSKNTFFVLVRVVDELCLVELTEEILKLLMELVFRLVCNGELSLARVLRKNILDKVDQKKLLRCATSSQPLAARGVAARPGTLHDFHSHEIAEQLTLLDAELFYKIEIPEVLLWAKEQNEEKSPNLTQFTEHFNNMSYWVRSIIMLQEKAQDRERLLLKFIKIMKHLRKLNNFNSYLAILSALDSAPIRRLEWQKQTSEGLAEYCTLIDSSSSFRAYRAALSEVEPPCIPYLGLILQDLTFVHLGNPDYIDGKVNFSKRWQQFNILDSMRCFQQAHYDMRRNDDIINFFNDFSDHLAEEALWELSLKIKPRNITRRKTDREEKT

SEQ ID NO: 8063 - protein, 464 aa, Homo sapiens
MSRATSGSSLPVGINRQDFDVDCYAQRRLSGGSHSYGGESPRLSPCSSIGKLSKSDEQLSSLDRDSGQCSRNTSCETLDHYDPDYEFLQQDLSNADQIPQQTAWNLSPLPESLGESGSPFLGPPFQLPLGGHPQPDGPLAPGQQTDTPPALPEKKRRSAASQTADGSGCRVSYERHPSQYDNISGEDLQSTAPIPSVPYAPFAAILPFQHGGSSAPVEFVGDFTAPESTGDPEKPPPLPEKKNKHMLAYMQLLEDYSEPQPSMFYQTPQNEHIYQQKNKLLMEVYGFSDSFSGVDSVQELAPPPALPPKQRQLQASCAASSFSSVSHCVQQTKVAFTPEDGSAAQGLSVSVSNSFLSRHGSLPVPSYKSVFRSYSQDFVPHHQASVPPFLPPTSSSSPHFPPAHQSQSSDLAVPTMAGPPPSTVDGPLSASQESSFHGNTVCLPSETSFTDSEPPAGKDGHPRD

SEQ ID NO: 8064 - protein, 1094 aa, Homo sapiens; identical to SEQ ID NO: 8060

SEQ ID NO: 8065 - protein, 336 aa, Homo sapiens
MEVYGFSDSFSGVDSVQELAPPPALPPKQRQLSENASEEAGEGEYVNLYSSGQSSEELAPSRGEPPAGKDGHPRDPSAVSGVPGKDSRDGSERAPKSPDALESAQSEEEVDELSLIDHNEIMSRLTLKQEGDDGPDVRGGSGDILLVHATETDRKDLVLYCEAFLTTYRTFISPEELIKKLQYRYEKFSPFADTFKKRVSKNTFFVLVRVVDELCLVELTEEILKLLMELVFRLVCNGELSLARVLRKNILDKVDQKKLLRCATSSQPLAARGVAARPGTLHDFHSHEIAEQLTLLDAELFYKIEIPEVLLWAKEQNEEKSPNLTQFTEHFNNMSY

SEQ ID NO: 8066 - protein, 1057 aa, Homo sapiens
MGNAIEKQKPLKRSHLYPWKQDSQRSHLSSFTMKLMDKFHSPKIKRTPSKKGKPAEVSVKIPEKPVNKNLSWLEEKEKEVVSALRYFKTIVDKMAIDKKVLEMLPGSASKVLEAILPLVQNDPRIQHSSALSSCYSRVYQSLANLIRWSDQVMLEGVNSEDKEMVTTVKGVIKAVLDGVKELVRLTIEKQGRPSPTSPVKPSSPASKPDGPAELPLTDREVEILNKTTGMSQSTELLPDATDEEVAPPKPPLPGIRVVDNSPPPALPPKKRQSAPSPTRVAVVAPMSRATSGSSLPVGINRQDFDVDCYAQRRLSGGSHSYGGESPRLSPCSSIGKLSKSDEQLSSLDRDSGQCSRNTSCETLDHYDPDYEFLQQDLSNADQIPQQTAWNLSPLPESLGESGSPFLGPPFQLPLGGHPQPDGPLAPGQQTDTPPALPEKKRRSAASQTADGSGCRVSYERHPSQYDNISGEDLQSTAPIPSVPYAPFAAILPFQHGGSSAPVEFVGDFTAPESTGDPEKPPPLPEKKNKHMLAYMQLLEDYSEPQPSMFYQTPQNEHIYQQKNKLLMEVYGFSDSFSGVDSVQELAPPPALPPKQRQLEPPAGKDGHPRDPSAVSGVPGKDSRDGSERAPKSPDALESAQSEEEVDELSLIDHNEIMSRLTLKQEGDDGPDVRGGSGDILLVHATETDRKDLVLYCEAFLTTYRTFISPEELIKKLQYRYEKFSPFADTFKKRVSKNTFFVLVRVVDELCLVELTEEILKLLMELVFRLVCNGELSLARVLRKNILDKVDQKKLLRCATSSQPLAARGVAARPGTLHDFHSHEIAEQLTLLDAELFYKIEIPEVLLWAKEQNEEKSPNLTQFTEHFNNMSYWVRSIIMLQEKAQDRERLLLKFIKIMKHLRKLNNFNSYLAILSALDSAPIRRLEWQKQTSEGLAEYCTLIDSSSSFRAYRAALSEVEPPCIPYLGLILQDLTFVHLGNPDYIDGKVNFSKRWQQFNILDSMRCFQQAHYDMRRNDDIINFFNDFSDHLAEEALWELSLKIKPRNITRRKTDREEKT

SEQ ID NO: 8067 - protein, 319 aa, Homo sapiens
  VARIANT 1: note = MOD_RES - Any amino acid
XLAPPPALPPKQRQLSENASEEAGEGEYVNLYSSGQSSEELAPSRGEPPAGKDGHPRDPSAVSGVPGKDSRDGSERAPKSPDALESAQSEEEVDELSLIDHNEIMSRLTLKQEGDDGPDVRGGSGDILLVHATETDRKDLVLYCEAFLTTYRTFISPEELIKKLQYRYEKFSPFADTFKKRVSKNTFFVLVRVVDELCLVELTEEILKLLMELVFRLVCNGELSLARVLRKNILDKVDQKKLLRCATSSQPLAARGVAARPGTLHDFHSHEIAEQLTLLDAELFYKIEIPEVLLWAKEQNEEKSPNLTQFTEHFNNMSY

SEQ ID NO: 8068 - protein, 228 aa, Homo sapiens
  VARIANT 1: note = MOD_RES - Any amino acid
XLPEKKNKHMLAYMQLLEDYSEPQPSMFYQTPQNEHIYQQKNKLLMEVYGFSDSFSGVDSVQELAPPPALPPKQRQLQASCAASSFSSVSHCVQQTKVAFTPEDGSAAQGLSVSVSNSFLSRHGSLPVPSYKSVFRSYSQDFVPHHQASVPPFLPPTSSSSPHFPPAHQSQSSDLAVPTMAGPPPSTVDGPLSASQESSFHGNTVCLPSETSFTDSEPPAGKDGHPRD

SEQ ID NO: 8069 - protein, 193 aa, Homo sapiens
MGNAIEKQKPLKRSHLYPWKQDSQRSHLSSFTMKLMDKFHSPKIKRTPSKKGKPAEVSVKIPEKPVNKEATDRFLPEGYPLPLDLEQQAVEFMSTSAVASRSQRQKNLSWLEEKEKEVVSALRYFKTIVDKMAIDKKVLEMLPGSASKVLEAILPLVQNDPRIQHSSALSSCYSRVYQSLANLIRWSDQVMLE

SEQ ID NO: 8070 - protein, 1023 aa, Homo sapiens
FKTIVDKMAIDKKVLEMLPGSASKVLEAILPLVQNDPRIQHSSALSSCYSRVYQSLANLIRWSDQVMLEGVNSEDKEMVTTVKGVIKAVLDGVKELVRLTIEKQGRPSPTSPVKPSSPASKPDGPAELPLTDREVEILNKTTGMSQSTELLPDATDEEVAPPKPPLPGIRVVDNSPPPALPPKKRQSAPSPTRVAVVAPMSRATSGSSLPVGINRQDFDVDCYAQRRLSGGSHSYGGESPRLSPCSSIGKLSKSDEQLSSLDRDSGQCSRNTSCETLDHYDPDYEFLQQDLSNADQIPQQTAWNLSPLPESLGESGSPFLGPPFQLPLGGHPQPDGPLAPGQQTDTPPALPEKKRRSAASQTADGSGCRVSYERHPSQYDNISGEDLQSTAPIPSVPYAPFAAILPFQHGGSSAPVEFVGDFTAPESTGDPEKPPPLPEKKNKHMLAYMQLLEDYSEPQPSMFYQTPQNEHIYQQKNKLLMEVYGFSDSFSGVDSVQELAPPPALPPKQRQLASCAASSFSSVSHCVQQTKVAFTPEDGSAAQGLSVSVSNSFLSRHGSLPVPSEPPAGKDGHPRDPSAVSGVPGKDSRDGSERAPKSPDALESAQSEEEVDELSLIDHNEIMSRLTLKQEGDDGPDVRGGSGDILLVHATETDRKDLVLYCEAFLTTYRTFISPEELIKKLQYRYEKFSPFADTFKKRVSKNTFFVLVRVVDELCLVELTEEILKLLMELVFRLVCNGELSLARVLRKNILDKVDQKKLLRCATSSQPLAARGVAARPGTLHDFHSHEIAEQLTLLDAELFYKIEIPEVLLWAKEQNEEKSPNLTQFTEHFNNMSYWVRSIIMLQEKAQDRERLLLKFIKIMKHLRKLNNFNSYLAILSALDSAPIRRLEWQKQTSEGLAEYCTLIDSSSSFRAYRAALSEVEPPCIPYLGLILQDLTFVHLGNPDYIDGKVNFSKRWQQFNILDSMRCFQQAHYDMRRNDDIINFFNDFSDHLAEEALWELSLKIKPRNITRRKTDREEKT

SEQ ID NO: 8071 - protein, 159 aa, Homo sapiens
MEVYGFSDSFSGVDSVQELAPPPALPPKQRQLYKSVFRSYSQDFVPHHQASVPPFLPPTSSSSPHFPPAHQSQSSDLAVPTMAGPPPSTVDGPLSASQESSFHGNTVCLPSETSFTDSEPPAGKDGHPRDPSAVSGVPGKDSRDGSERAPKSPDALESA

SEQ ID NO: 8072 - protein, 231 aa, Homo sapiens
MEVYGFSDSFSGVDSVQELAPPPALPPKQRQLQASCAASSFSSVSHCVQQTKVAFTPEDGSAAQGLSVSVSNSFLSRHGSLPVPSYKSVFRSYSQDFVPHHQASVPPFLPPTSSSSPHFPPAHQSQSSDLAVPTMAGPPPSTVDGPLSASQESSFHGNTVCLPSETSFTDSSENASEEAGEGEYVNLYSSGQSSEELAPSRGEPPAGKDGHPRDPSAVSGVPGKDSRDGSE

SEQ ID NO: 8073 - protein, 158 aa, Homo sapiens
MSGGLGLRRSPEMSGKIEKADSQRSHLSSFTMKLMDKFHSPKIKRTPSKKGKPAEVSVKIPEKPVNKNLSWLEEKEKEVVSALRYFKTIVDKMAIDKKVLEMLPGSASKVLEAILPLVQNDPRIQHSSALSSCYSRVYQSLANLIRWSDQVMLEGVNS

SEQ ID NO: 8074 - protein, 86 aa, Homo sapiens
MEVYGFSDSFSGVDSVQELAPPPALPPKQRQLEPPAGKDGHPRDPSAVSGVPGKDSRDGSESGITSVYRWNIQRQQRLSYGHTASQ

SEQ ID NO: 8075 - protein, 2472 aa, Homo sapiens
MTARGQSPLAPLLETLEDPSASHGGQTDAYLTLTSRMTGEEGKEVITEIEKKLPRLYKVLKTHISSQNSELSSAALQALGFCLYNPKITSELSEANALELLSKLNDTIKNSDKNVRTRALWVISKQTFPSEVVGKMVSSIIDSLEILFNKGETHSAVVDFEALNVIVRLIEQAPIQMGEEAVRWAKLVIPLVVHSAQKVHLRGATALEMGMPLLLQKQQEIASITEQLMTTKLISELQKLFMSKNETYVLKLWPLFVKLLGRTLHRSGSFINSLLQLEELGFRSGAPMIKKIAFIAWKSLIDNFALNPDILCSAKRLKLLMQPLSSIHVRTETLALTKLEVWWYLLMRLGPHLPANFEQVCVPLIQSTISIDSNASPQGNSCHVATSPGLNPMTPVHKGASSPYGAPGTPRMNLSSNLGGMATIPSIQLLGLEMLLHFLLGPEALSFAKQNKLVLSLEPLEHPLISSPSFFSKHANTLITAVHDSFVAVGKDAPDVVVSAIWKELISLVKSVTESGNKKEKPGSEVLTLLLKSLESIVKSEVFPVSKTLVLMEITIKGLPQKVLGSPAYQVANMDILNGTPALFLIQLIFNNFLECGVSDERFFLSLESLVGCVLSGPTSPLAFSDSVLNVINQNAKQLENKEHLWKMWSVIVTPLTELINQTNEVNQGDALEHNFSAIYGALTLPVNHIFSEQRFPVATMKTLLRTWSELYRAFARCAALVATAEENLCCEELSSKIMSSLEDEGFSNLLFVDRIIYIITVMVDCIDFSPYNIKYQPKVKSPQRPSDWSKKKNEPLGKLTSLFKLIVKVIYSFHTLSFKEAHSDTLFTIGNSITGIISSVLGHISLPSMIRKIFATLTRPLALFYENSKLDEVPKVYSCLNNKLEKLLGEIIACLQFSYTGTYDSELLEQLSPLLCIIFLHKNKQIRKQSAQFWNATFAKVMMLVYPEELKPVLTQAKQKFLLLLPGLETVEMMEESSGPYSDGTENSQLNVKISGMERKSNGKRDSFLAQTKNKKENMKPAAKLKLESSSLKVKGEILLEEEKSTDFVFIPPEGKDAKERILTDHQKEVLKTKRCDIPAMYNNLDVSQDTLFTQYSQEEPMEIPTLTRKPKEDSKMMITEEQMDSDIVIPQDVTEDCGMAEHLEKSSLSNNECGSLDKTSPEMSNSNNDERKKALISSRKTSTECASSTENSFVVSSSSVSNTTVAGTPPYPTSRRQTFITLEKFDGSENRPFSPSPLNNISSTVTVKNNQETMIKTDFLPKAKQREGTFSKSDSEKIVNGTKRSSRRAGKAEQTGNKRSKPLMRSEPEKNTEESVEGIVVLENNPPGLLNQTECVSDNQVHLSESTMEHDNTKLKAATVENAVLLETNTVEEKNVEINLESKENTPPVVISADQMVNEDSQVQITPNQKTLRRSSRRRSEVVESTTESQDKENSHQKKERRKEEEKPLQKSPLHIKDDVLPKQKLIAEQTLQENLIEKGSNLHEKTLGETSANAETEQNKKKADPENIKSEGDGTQDIVDKSSEKLVRGRTRYQTRRASQGLLSSIENSESDSSEAKEEGSRKKRSGKWKNKSNESVDIQDQEEKVVKQECIKAENQSHDYKATSEEDVSIKSPICEKQDESNTVICQDSTVTSDLLQVPDDLPNVCEEKNETSKYAEYSFTSLPVPESNLRTRNAIKRLHKRDSFDNCSLGESSKIGISDISSLSEKTFQTLECQHKRSRRVRRSKGCDCCGEKSQPQEKSLIGLKNTENNDVEISETKKADVQAPVSPSETSQANPYSEGQFLDEHHSVNFHLGLKEDNDTINDSLIVSETKSKENTMQESLPSGIVNFREEICDMDSSEAMSLESQESPNENFKTVGPCLGDSKNVSQESLETKEEKPEETPKMELSLENVTVEGNACKVTESNLEKAKTMELNVGNEASFHGQERTKTGISEEAAIEENKRNDDSEADTAKLNAKEVATEEFNSDISLSDNTTPVKLNAQTEISEQTAAGELDGGNDVSDLHSSEETNTKMKNNEEMMIGEAMAETGHDGETENEGITTKTSKPDEAETNMLTAEMDNFVCDTVEMSTEEGIIDANKTETNTEYSKSEEKLDNNQMVMESDILQEDHHTSQKVEEPSQCLASGTAISELIIEDNNASPQKLRELDPSLVSANDSPSGMQTRCVWSPLASPSTSILKRGLKRSQEDEISSPVNKVRRVSFADPIYQAGLADDIDRRCSIVRSHSSNSSPIGKSVKTSPTTQSKHNTTSAKGFLSPGSRSPKFKSSKKCLISEMAKESIPCPTESVYPPLVNCVAPVDIILPQITSNMWARGLGQLIRAKNIKTIGDLSTLTASEIKTLPIRSPKVSNVKKALRIYHEQQVKTRGLEEIPVFDISEKTVNGIENKSLSPDEERLVSDIIDPVALEIPLSKNLLAQISALALQLDSEDLHNYSGSQLFEMHEKLSCMANSVIKNLQSRWRSPSHENSI

SEQ ID NO: 8076 - protein, 87 aa, Homo sapiens
MTARGQSPLAPLLETLEDPSASHGGQTDAYLTLTSRMTGEEGKEVITEIEKKLPRLYKVLKTHISSQNSELSSAALQALGFCLYNPK

SEQ ID NO: 8077 - protein, 2446 aa, Homo sapiens
MTARGQSPLAPLLETLEDPSASHGGQTDAYLTLTSRMTGEEGKEVITEIEKKLPRLYKVLKTHISSQNSELSSAALQALGFCLYNPKITSELSEANALELLSKLNDTIKNSDKNVRTRALWVISKQTFPSEVVGKMVSSIIDSLEILFNKGETHSAVVDFEALNVIVRLIEQAPIQMGEEAVRWAKLVIPLVVHSAQKVHLRGATALEMGMPLLLQKQQEIASITEQLMTTKLISELQKLFMSKNETYVLKLWPLFVKLLGRTLHRSGSFINSLLQLEELGFRSGAPMIKKIAFIAWKSLIDNFALNPDILCSAKRLKLLMQPLSSIHVRTETLALTKLEVWWYLLMRLGPHLPANFEQVCVPLIQSTISIDSNASPQGNSCHVATSPGLNPMTPVHKGASSPYGAPGTPRMNLSSNLGGMATIPSIQLLGLEMLLHFLLGPEALSFAKQNKLVLSLEPLEHPLISSPSFFSKHANTLITAVHDSFVAVGKDAPDVVVSAIWKELISLVKSVTESGNKKEKPGSEVLTLLLKSLESIVKSEVFPVSKTLVLMEITIKGLPQKVLGSPAYQVANMDILNGTPALFLIQLIFNNFLECGVSDERFFLSLESLVGCVLSGPTSPLAFSDSVLNVINQNAKQLENKEHLWKMWSVIVTPLTELINQTNEVNQGDALEHNFSAIYGALTLPVNHIFSEQRFPVATMKTLLRTWSELYRAFARCAALVATAEENLCCEELSSKIMSSLEDEGFSNLLFVDRIIYIITVMVDCIDFSPYNIKYQPKVKSPQRPSDWSKKKNEPLGKLTSLFKLIVKVIYSFHTLSFKEAHSDTLFTIGNSITGIISSVLGHISLPSMIRKIFATLTRPLALFYENSKLDEVPKVYSCLNNKLEKLLGEIIACLQFSYTGTYDSELLEQLSPLLCIIFLHKNKQIRKQSAQFWNATFAKVMMLVYPEELKPVLTQAKQKFLLLLPGLETVEMMEESSGPYSDGTENSQLNVKISGMERKSNGKRDSFLAQTKNKKENMKPAAKLKLESSSLKVKGEILLEEEKSTDFVFIPPEGKDAKERILTDHQKEVLKTKRCDIPAMYNNLDVSQDTLFTQYSQEEPMEIPTLTRKPKEDSKMMITEEQMDSDIVIPQDVTEDCGMAEHLEKSSLSNNECGSLDKTSPEMSNSNNDERKKALISSRKTSTECASSTENSFVVSSSSVSNTTVAGTPPYPTSRRQTFITLEKFDGSENRPFSPSPLNNISSTVTVKNNQETMIKTDFLPKAKQREGTFSKSDSEKIVNGTKRSSRRAGKAEQTGNKRSKPLMRSEPEKNTEESVEGIVVLENNPPGLLNQTECVSDNQVHLSESTMEHDNTKLKAATVENAVLLETNTVEEKNVEINLESKENTPPVVISADQMVNEDSQVQITPNQKTLRRSSRRRSEVVESTTESQDKENSHQKKERRKEEEKPLQKSPLHIKDDVLPKQKLIAEQTLQENLIEKGSNLHEKTLGETSANAETEQNKKKADPENIKSEGDGTQDIVDKSSEKLVRGRTRYQTRRASQGLLSSIENSESDSSEAKEEGSRKKRSGKWKNKSNESVDIQDQEEKVVKQECIKAENQSHDYKATSEEDVSIKSPICEKQDESNTVICQDSTVTSDLLQVPDDLPNVCEEKNETSKYAEYSFTSLPVPESNLRTRNAIKRLHKRDSFDNCSLGESSKIGISDISSLSEKTFQTLECQHKRSRRVRRSKGCDCCGEKSQPQEKSLIGLKNTENNDVEISETKKADVQAPVSPSETSQANPYSEGQFLDEHHSVNFHLGLKEDNDTINDSLIVSETKSKENTMQESLPSGIVNFREEICDMDSSEAMSLESQESPNENFKTVGPCLGDSKNVSQESLETKEEKPEETPKMELSLENVTVEGNACKVTESNLEKAKTMELNVGNEASFHGQERTKTGISEEAAIEENKRNDDSEADTAKLNAKEVATEEFNSDISLSDNTTPVKLNAQTEISEQTAAGELDGGNDVSDLHSSEETNTKMKNNEEMMIGEAMAETGHDGETENEGITTKTSKPDEAETNMLTAEMDNFVCDTVEMSTEEGIIDANKTETNTEYSKSEEKLDNNQMVMESDILQEDHHTSQKVEEPSQCLASGTAISELIIEDNNASPQKLRELDPSLVSANDSPSGMQTRCVWSPLASPSTSILKRGLKRSQEDEISSPVNKVRRVSFADPIYQAGLADDIDRRCSIVRSHSSNSSPIGKSVKTSPTTQSKISEMAKESIPCPTESVYPPLVNCVAPVDIILPQITSNMWARGLGQLIRAKNIKTIGDLSTLTASEIKTLPIRSPKVSNVKKALRIYHEQQVKTRGLEEIPVFDISEKTVNGIENKSLSPDEERLVSDIIDPVALEIPLSKNLLAQISALALQLDSEDLHNYSGSQLFEMHEKLSCMANSVIKNLQSRWRSPSHENSI

SEQ ID NO: 8078 - protein, 2446 aa, Homo sapiens; identical to SEQ ID NO: 8077

SEQ ID NO: 8079 - protein, 341 aa, Homo sapiens
MTARGQSPLAPLLETLEDPSASHGGQTDAYLTLTSRMTGEEGKEVITEIEKKLPRLYKVLKTHISSQNSELSSAALQALGFCLYNPKITSELSEANALELLSKLNDTIKNSDKNVRTRALWVISKQTFPSEVVGKMVSSIIDSLEILFNKGETHSAVVDFEALNVIVRLIEQAPIQMGEEAVRWAKLVIPLVVHSAQKVHLRGATALEMGMPLLLQKQQEIASITEQLMTTTLHRSGSFINSLLQLEELGFRSGAPMIKKIAFIAWKSLIDNFALNPDILCSAKRLKLLMQPLSSIHVRTETLALTKLEVWWYLLMRLGPHLPANFEQVLPPRTEPRELPE

SEQ ID NO: 8080 - protein, 2472 aa, Homo sapiens; identical to SEQ ID NO: 8075

SEQ ID NO: 8081 - protein, 2446 aa, Homo sapiens; identical to SEQ ID NO: 8077

SEQ ID NO: 8082 - protein, 184 aa, Homo sapiens
MREYKLVVLGSGGVGKSALTVQFVQGIFVEKYDPTIEDSYRKQVEVDCQQCMLEILDTAGTEQFTAMRDLYMKNGQGFALVYSITAQSTFNDLQDLREQILRVKDTEDVPMILVGNKCDLEDERVVGKEQGQNLARQWCNCAFLESSAKSKINVNEIFYDLVRQINRKTPVEKKKPKKKSCLLL

SEQ ID NO: 8083 - protein, 184 aa, Homo sapiens; identical to SEQ ID NO: 8082

SEQ ID NO: 8084 - protein, 129 aa, Homo sapiens
MREYKLVVLGSGGVGKSALTVQFVQGIFVEKYDPTIEDSYRKQVEVDCQQCMLEILDTAGTEQFTAMRDLYMKNGQGFALVYSITAQSTFNDLQDLREQILRVKDTEDVPMILVGNKCDLEDERVVGKE

SEQ ID NO: 8085 - protein, 184 aa, Homo sapiens; identical to SEQ ID NO: 8082

SEQ ID NO: 8086 - protein, 184 aa, Homo sapiens; identical to SEQ ID NO: 8082

SEQ ID NO: 8087 - protein, 459 aa, Homo sapiens
MRAQIEVIPCKICGDKSSGIHYGVITCEGCKGFFRRSQQNNASYSCPRQRNCLIDRTNRNRCQHCRLQKCLALGMSRDAVKFGRMSKKQRDSLYAEVQKHQQRLQEQRQQQSGEAEALARVYSSSISNGLSNLNNETSGTYANGHVIDLPKSEGYYNVDSGQPSPDQSGLDMTGIKQIKQEPIYDLTSVPNLFTYSSFNNGQLAPGITMTEIDRIAQNIIKSHLETCQYTMEELHQLAWQTHTYEEIKAYQSKSREALWQQCAIQITHAIQYVVEFAKRITGFMELCQNDQILLLKSGCLEVVLVRMCRAFNPLNNTVLFEGKYGGMQMFKALGSDDLVNEAFDFAKNLCSLQLTEEEIALFSSAVLISPDRAWLIEPRKVQKLQEKIYFALQHVIQKNHLDDETLAKLIAKIPTITAVCNLHGEKLQVFKQSHPEIVNTLFPPLYKELFNPDCATGCK

SEQ ID NO: 8088 - protein, 470 aa, Homo sapiens
MCENQLKTKADATAQIEVIPCKICGDKSSGIHYGVITCEGCKGFFRRSQQNNASYSCPRQRNCLIDRTNRNRCQHCRLQKCLALGMSRDAVKFGRMSKKQRDSLYAEVQKHQQRLQEQRQQQSGEAEALARVYSSSISNGLSNLNNETSGTYANGHVIDLPKSEGYYNVDSGQPSPDQSGLDMTGIKQIKQEPIYDLTSVPNLFTYSSFNNGQLAPGITMTEIDRIAQNIIKSHLETCQYTMEELHQLAWQTHTYEEIKAYQSKSREALWQQCAIQITHAIQYVVEFAKRITGFMELCQNDQILLLKSGCLEVVLVRMCRAFNPLNNTVLFEGKYGGMQMFKALGSDDLVNEAFDFAKNLCSLQLTEEEIALFSSAVLISPDRAWLIEPRKVQKLQEKIYFALQHVIQKNHLDDETLAKLIAKIPTITAVCNLHGEKLQVFKQSHPEIVNTLFPPLYKELFNPDCATGCK

SEQ ID NO: 8089 - protein, 270 aa, Homo sapiens
MGEAEAPSFEMTWSSTTSSGYCSQEDSDSELEQYFTARTSLARRPRRDQDEPVEWETPDLSQAEIEQKIKEYNAQINSNLFMSLNKDGSYTGFIKVQLKLVRPVSVPSSKKPPSLQDARRGPGRGTSVRRRTSFYLPKDAVKHLHVLSRTRAREVIEALLRKFLVVDDPRKFALFERAERHGQVYLRKLLDDEQPLRLRLLAGPSDKALSFVLKENDSGEVNWDAFSMPELHNFLRILQREEEEHLRQILQKYSYCRQKIQEALHACPLG

SEQ ID NO: 8090 - protein, 344 aa, Homo sapiens
MSGEPELIELRELAPAGRAGKGRTRLERANALRIARGTACNPTRQLVPGRGHRFQPAGPATHTWCDLCGDFIWGVVRKGLQCARLSADCKFTCHYRCRALVCLDCCGPRDLGWEPAVERDTNVDEPVEWETPDLSQAEIEQKIKEYNAQINSNLFMSLNKDGSYTGFIKVQLKLVRPVSVPSSKKPPSLQDARRGPGRGTSVRRRTSFYLPKDAVKHLHVLSRTRAREVIEALLRKFLVVDDPRKFALFERAERHGQVYLRKLLDDEQPLRLRLLAGPSDKALSFVLKENDSGEVNWDAFSMPELHNFLRILQREEEEHLRQILQKYSYCRQKIQEALHACPLG

SEQ ID NO: 8091 - protein, 340 aa, Homo sapiens
MSGEPELIELRELAPAGRAGKGRTRLERANALRIARGTACNPTRQLVPGRGHRFQPAGPATHTWCDLCGDFIWGVVRKGLQCAHCKFTCHYRCRALVCLDCCGPRDLGWEPAVERDTNVDEPVEWETPDLSQAEIEQKIKEYNAQINSNLFMSLNKDGSYTGFIKVQLKLVRPVSVPSSKKPPSLQDARRGPGRGTSVRRRTSFYLPKDAVKHLHVLSRTRAREVIEALLRKFLVVDDPRKFALFERAERHGQVYLRKLLDDEQPLRLRLLAGPSDKALSFVLKENDSGEVNWDAFSMPELHNFLRILQREEEEHLRQILQKYSYCRQKIQEALHACPLG

SEQ ID NO: 8092 - protein, 189 aa, Homo sapiens
MSLNKDGSYTGFIKVQLKLVRPVSVPSSKKPPSLQDARRGPGRGTSVRRRTSFYLPKDAVKHLHVLSRTRAREVIEALLRKFLVVDDPRKFALFERAERHGQVYLRKLLDDEQPLRLRLLAGPSDKALSFVLKENDSGEVNWDAFSMPELHNFLRILQREEEEHLRQILQKYSYCRQKIQEALHACPLG

SEQ ID NO: 8093 - protein, 326 aa, Homo sapiens
MDYSHQTSLVPCGQDKYISKNELLLHLKTYNLYYEGQNLQLRHREEEDEFIVEGLLNISWGLRRPIRLQMQDDNERIRPPPSSSSWHSGCNLGAQGTTLKPLTVPKVQISEVDAPPEGDQMPSSTDSRGLKPLQEDTPQLMRTRSDVGVRRRGNVRTPSDQRRIRRHRFSINGHFYNHKTSVFTPAYGSVTNVRINSTMTTPQVLKLLLNKFKIENSAEEFALYVVHTSGEKQKLKATDYPLIARILQGPCEQISKVFLMEKDQVEEVTYDVAQYIKFEMPVLKSFIQKLQEEEDREVKKLMRKYTVLRLMIRQRLEEIAETPATI

SEQ ID NO: 8094 - protein, 326 aa, Homo sapiens; identical to SEQ ID NO: 8093

SEQ ID NO: 8095 - protein, 330 aa, Homo sapiens
MKEDCLPSSHVPISDSKSIQKRDVQGLSEEGTLIIEGLLNIAWGLRRPIRLQMQDDREQVHLPSTSWMPRRPSCPLGCWSLLLGLSSLSLPAAISALQLSVFRKEPSPQNGNITAQGPSIQPVHKAESSTDSSGPLEEAEEAPQLMRTKSDASCMSQRRPKCRAPGEAQRIRRHRFSINGHFYNHKTSVFTPAYGSVTNVRVNSTMTTLQVLTLLLNKFRVEDGPSEFALYIVHESGERTKLKDCEYPLISRILHGPCEKIARIFLMEADLGVEVPHEVAQYIKFEMPVLDSFVEKLKEEEEREIIKLTMKFQALRLTMLQRLEQLVEAK

SEQ ID NO: 8096 - protein, 321 aa, Homo sapiens
MKEDCLPSSHVPISDSKSIQKSELLGLLKTYNCYHEGKSFQLRHREEEGTLIIEGLLNIAWGLRRPIRLQMQDDREQVHLPSTSWMPRRPSCPLKEPSPQNGNITAQGPSIQPVHKAESSTDSSGPLEEAEEAPQLMRTKSDASCMSQRRPKCRAPGEAQRIRRHRFSINGHFYNHKTSVFTPAYGSVTNVRVNSTMTTLQVLTLLLNKFRVEDGPSEFALYIVHESGERTKLKDCEYPLISRILHGPCEKIARIFLMEADLGVEVPHEVAQYIKFEMPVLDSFVEKLKEEEEREIIKLTMKFQALRLTMLQRLEQLVEAK

SEQ ID NO: 8097 - protein, 412 aa, Homo sapiens
GSNAGGGQGGCQGLTCDSESVGTLDILDQTQACPVSLASSSARPPCPPPGPCAEPSGCIAMAVWSPLVMPGRREGCCHTPVTNEETEAREAKGQKLRPCHTLGVHVCLSLFRSELLGLLKTYNCYHEGKSFQLRHREEEGTLIIEGLLNIAWGLRRPIRLQMQDDREQVHLPSTSWMPRRPSCPLKEPSPQNGNITAQGPSIQPVHKAESSTDSSGPLEEAEEAPQLMRTKSDASCMSQRRPKCRAPGEAQRIRRHRFSINGHFYNHKTSVFTPAYGSVTNVRVNSTMTTLQVLTLLLNKFRVEDGPSEFALYIVHESGERTKLKDCEYPLISRILHGPCEKIARIFLMEADLGVEVPHEVAQYIKFEMPVLDSFVEKLKEEEEREIIKLTMKFQALRLTMLQRLEQLVEAK

SEQ ID NO: 8098 - protein, 130 aa, Homo sapiens
MKEDCLPSSHVPISDSKSIQKSELLGLLKTYNCYHEGKSFQLRHREEEGTLIIEGLLNIAWGLRRPIRLQMQDDREQVHLPSTSWMPRRPSCPLHLAGKKGRLQPGGLPTPMQAEHVSPSLVLSLKFTRI

SEQ ID NO: 8099 - protein, 126 aa, Homo sapiens
MKEDCLPSSHVPISDSKSIQKSELLGLLKTYNCYHEGKSFQLRHREEEGTLIIEGLLNIAWGLRRPIRLQMQDDREQVHLPSTSWMPRRPSCPLAPGGGRGGPPADADQERRQLHEPEEAQVPRPR

SEQ ID NO: 8100 - protein, 151 aa, Homo sapiens
MKEDCLPSSHVPISDSKSIQKSELLGLLKTYNCYHEGKSFQLRHREEEGTLIIEGLLNIAWGLRRPIRLQMQDDREQVHLPSTSWMPRRPSCPLGCWSLLLGLSSLSLPAAISALQLSVFRKEPSPQNGNITAQGPSIQPVHKAESSTDSS

SEQ ID NO: 8101 - protein, 123 aa, Homo sapiens
SSHVPISDSKSIQKSELLGLLKTYNCYHEGKSFQLRHREEEGTLIIEGLLNIAWGLRRPIRLQMQDDREQVHLPSTSWMPRRPSCPLHLAGKKGRLQPGGLPTPMQAEHVSPSLVLSLKFTRI

SEQ ID NO: 8102 - protein, 265 aa, Homo sapiens
MTVDSSMSSGYCSLDEELEDCFFTAKTTFFRNAQSKHLSKNVCKPVEETQRPPTLQEIKQKIDSYNTREKNCLGMKLSEDGTYTGFIKVHLKLRRPVTVPAGIRPQSIYDAIKEVNLAATTDKRTSFYLPLDAIKQLHISSTTTVSEVIQGLLKKFMVVDNPQKFALFKRIHKDGQVLFQKLSIADRPLYLRLLAGPDTEVLSFVLKENETGEVEWDAFSIPELQNFLTILEKEEQDKIQQVQKKYDKFRQKLEEALRESQGKPG

SEQ ID NO: 8103 - protein, 392 aa, Homo sapiens [sequence omitted]

SEQ ID NO: 8104 - protein, 418 aa, Homo sapiens
MAMASPAIGQRPYPLLLDPEPPRYLQSLSGPELPPPPPDRSSRLCVPAPLSTAPGAREGRSARRAARGNLEPPPRASRPARPLRPGLQQRLRRRPGAPRPRDVRSIFEQPQDPRVPAERGEGHCFAELVLPGGPGWCDLCGREVLRQALRCTNCKFTCHPECRSLIQLDCSQQEGLSRDRPSPESTLTVTFSQNVCKPVEETQRPPTLQEIKQKIDSYNTREKNCLGMKLSEDGTYTGFIKVHLKLRRPVTVPAGIRPQSIYDAIKEVNLAATTDKRTSFYLPLDAIKQLHISSTTTVSEVIQGLLKKFMVVDNPQKFALFKRIHKDGQVLFQKLSIADRPLYLRLLAGPDTEVLSFVLKENETGEVEWDAFSIPELQNFLTILEKEEQDKIQQVQKKYDKFRQKLEEALRESQGKPG

SEQ ID NO: 8105 - protein, 336 aa, Homo sapiens
MAMASPAIGQRPYPLLLDPEPPRYLQSLSGPELPPPPPDRSSRLCVPAPLSTAPGAREGRSARRAARGNLEPPPRASRPARPLRPGLQQRLRRRPGAPRPRDVRSIFEQPQDPRVPAERGEGHCFAELVLPGGPGWCDLCGREVLRQALRCTNCKFTCHPECRSLIQLDCSQQEGLSRDRPSPESTLTVTFSQNVCKPVEETQRPPTLQEIKQKIDSYNTREKNCLGMKLSEDGTYTGFIKVHLKLRRPVTVPAGIRPQSIYDAIKEVNLAATTDKRTSFYLPLDAIKQLHISSTTTVSEVIQGLLKKFMVVDNPQKFALFKRIHKDGQVGCLLHP

SEQ ID NO: 8106 - protein, 393 aa, Homo sapiens
MAMASPAIGQRPYPLLLDPEPPRYLQSLSGPELPPPPPDRSSRLCVPAPLSTAPGAREGRSARRAARGNLEPPPRASRPARPLRPGLQQRLRRRPGAPRPRDVRSIFEQPQDPRVPAERGEGHCFAELVLPGGPGWCDLCGREVLRQALRCTNCKFTCHPECRSLIQLDCSQQEGLSRDRPSPESTLTVTFSQNVCKPVEETQRPPTLQEIKQKIDSYNTREKNCLGMKLSEDGTYTGFIKVHLKLRRPVTVPAGIRPQSIYDAIKEVNLAATTDKRTSFYLPLDAIKQLHISSTTTVSEVIQGLLKKFMVVDNPQKFALFKRIHKDGQVLFQKLSIADRPLYLRLLAGPDTEVLSFVLKENETGEVEWDAFSIPELQNFFLSSWCIQIYLYY

SEQ ID NO: 8107 - protein, 184 aa, Homo sapiens
MPQSKSRKIAILGYRSVGKSSLTIQFVEGQFVDSYDPTIENTFTKLITVNGQEYHLQLVDTAGQDEYSIFPQTYSIDINGYILVYSVTSIKSFEVIKVIHGKLLDMVGKVQIPIMLVGNKKDLHMERVISYEEGKALAESWNAAFLESSAKENQTAVDVFRRIILEAEKMDGAASQGKSSCSVM

SEQ ID NO: 8108 - protein, 193 aa, Homo sapiens
MAAIRKKLVIVGDGACGKTCLLIVFSKDQFPEVYVPTVFENYVADIEVDGKQVELALWDTAGQEDYDRLRPLSYPDTDVILMCFSIDSPDSLENIPEKWTPEVKHFCPNVPIILVGNKKDLRNDEHTRRELAKMKQEPVKPEEGRDMANRIGAFGYMECSAKTKDGVREVFEMATRAALQARRGKKKSGCLVL

SEQ ID NO: 8109 - protein, 196 aa, Homo sapiens
MAAIRKKLVVVGDGACGKTCLLIVFSKDEFPEVYVPTVFENYVADIEVDGKQVELALWDTAGQEDYDRLRPLSYPDTDVILMCFSVDSPDSLENIPEKWVPEVKHFCPNVPIILVANKKDLRSDEHVRTELARMKQEPVRTDDGRAMAVRIQAYDYLECSAKTKEGVREVFETATRAALQKRYGSQNGCINCCKVL

SEQ ID NO: 8110 - protein, 193 aa, Homo sapiens
MAAIRKKLVIVGDGACGKTCLLIVFSKDQFPEVYVPTVFENYIADIEVDGKQVELALWDTAGQEDYDRLRPLSYPDTDVILMCFSIDSPDSLENIPEKWTPEVKHFCPNVPIILVGNKKDLRQDEHTRRELAKMKQEPVRSEEGRDMANRISAFGYLECSAKTKEGVREVFEMATRAGLQVRKNKRRRGCPIL

SEQ ID NO: 8111 - protein, 193 aa, Homo sapiens; identical to SEQ ID NO: 8110

SEQ ID NO: 8112 - protein, 193 aa, Homo sapiens; identical to SEQ ID NO: 8110

SEQ ID NO: 8113 - protein, 193 aa, Homo sapiens; identical to SEQ ID NO: 8110

SEQ ID NO: 8114 - protein, 199 aa, Homo sapiens
MAAIRKKLVIVGDGACGKTCLLIVFSKDQFPEVYVPTVFENYIADIEVDGKQVELALWDTAGQEDYDRLRPLSYPDTDVILMCFSIDSPDSLENIPEKWTPEVKHFCPNVPIILVGNKKDLRKAGTWRTGSVPLATLSAQPRPRRECGRCLRWPLGLASRSARTSVGGAVPFSEIPKAFPTCPLPSQGYRNYPPTTPAS

SEQ ID NO: 8115 - protein, 193 aa, Homo sapiens; identical to SEQ ID NO: 8110

SEQ ID NO: 8116 - protein, 193 aa, Homo sapiens; identical to SEQ ID NO: 8110

SEQ ID NO: 8117 - protein, 193 aa, Homo sapiens; identical to SEQ ID NO: 8110

SEQ ID NO: 8118 - protein, 92 aa, Homo sapiens
MAAIRKKLVIVGDGACGKTCLLIVFSKDQFPEVYVPTVFENYIADIEVDGKQVELALWDTAGQEDYDRLRPLSYPDTDVILMCFSIDSPDSL

SEQ ID NO: 8119 - protein, 189 aa, Homo sapiens
MAAIRKKLVIVGDGACGKTCLLIVFSKDQFPEVYVPTVFENYIADIEVDGKQVELALWDTAGQEDYDRLRPLSYPDTDVILMCFSIDSPDSLENIPEKWTPEVKHFCPNVPIILVGNKKDLRQDEHTRRELAKMKQEPVRSEEGRDMANRISAFGYLECSAKTKEGVREVFEMATRAGLQVRKNKRRRG

SEQ ID NO: 8120 - protein, 127 aa, Homo sapiens
MAAIRKKLVIVGDGACGKTCLLIVFSKDQFPEVYVPTVFENYIADIEVDGKQVELALWDTAGQEDYDRLRPLSYPDTDVILMCFSIDSPDSLENIPEKWTPEVKHFCPNVPIILVGNKKDLRQDEHT

SEQ ID NO: 8121 - protein, 229 aa, Homo sapiens
MVSISGGDLPTGLDFISAPEPALSSCSLGTSAGWSPTMAAIRKKLVIVGDGACGKTCLLIVFSKDQFPEVYVPTVFENYIADIEVDGKQVELALWDTAGQEDYDRLRPLSYPDTDVILMCFSIDSPDSLENIPEKWTPEVKHFCPNVPIILVGNKKDLRQDEHTRRELAKMKQEPVRSEEGRDMANRISAFGYLECSAKTKEGVREVFEMATRAGLQVRKNKRRRGCPI

SEQ ID NO: 8122 - protein, 169 aa, Homo sapiens
MAAIRKKLVIVGDGACGKTCLLIVFSKDQFPEVYVPTVFENYIADIEVDGKQVELALWDTAGQEDYDRLRPLSYPDTDVILMCFSIDSPDSLENIPEKWTPEVKHFCPNVPIILVGNKKDLRQDEHTRRELAKMKQEPVRSEEGRDMANRISAFGYLECSAKTKEGVRE

SEQ ID NO: 8123 - protein, 1047 aa, Homo sapiens
MMAAEAGSEEGGPVTAGAGGGGAAAGSSAYPAVCRVKIPAALPVAAAPYPGLVETGVAGTLGGGAALGSEFLGAGSVAGALGGAGLTGGGTAAGVAGAAAGVAGAAVAGPSGDMALTKLPTSLLAETLGPGGGFPPLPPPPYLPPLGAGLGTVDEGDSLDGPEYEEEEVAIPLTAPPTNQWYHGKLDRTIAEERLRQAGKSGSYLIRESDRRPGSFVLSFLSQMNVVNHFRIIAMCGDYYIGGRRFSSLSDLIGYYSHVSCLLKGEKLLYPVAPPEPVEDRRRVRAILPYTKVPDTDEISFLKGDMFIVHNELEDGWMWVTNLRTDEQGLIVEDLVEEVGREEDPHEGKIWFHGKISKQEAYNLLMTVGQVCSFLVRPSDNTPGDYSLYFRTNENIQRFKICPTPNNQFMMGGRYYNSIGDIIDHYRKEQIVEGYYLKEPVPMQDQEQVLNDTVDGKEIYNTIRRKTKDAFYKNIVKKGYLLKKGKGKRWKNLYFILEGSDAQLIYFESEKRATKPKGLIDLSVCSVYVVHDSLFGRPNCFQIVVQHFSEEHYIFYFAGETPEQAEDWMKGLQAFCNLRKSSPGTSNKRLRQVSSLVLHIEEAHKLPVKHFTNPYCNIYLNSVQVAKTHAREGQNPVWSEEFVFDDLPPDINRFEITLSNKTKKSKDPDILFMRCQLSRLQKGHATDEWFLLSSHIPLKGIEPGSLRVRARYSMEKIMPEEEYSEFKELILQKELHVVYALSHVCGQDRTLLASILLRIFLHEKLESLLLCTLNDREISMEDEATTLFRATTLASTLMEQYMKATATQFVHHALKDSILKIMESKQSCELSPSKLEKNEDVNTNLTHLLNILSELVEKIFMASEILPPTLRYIYGCLQKSVQHKWPTNTTMRTRVVSGFVFLRLICPAILNPRMFNIISDSPSPIAARTLILVAKSVQNLANLVEFGAKEPYMEGVNPFIKSNKHRMIMFLDELGNVPELPDTTEHSRTDLSRDLAALHEICVAHSDELRTLSNERGAQQHVLKKLLAITELLQQKQNQYTKTNDVR

SEQ ID NO: 8124 - protein, 870 aa, Homo sapiens
MKGWYHGKLDRTIAEERLRQAGKSGSYLIRESDRRPGSFVLSFLSQMNVVNHFRIIAMCGDYYIGGRRFSSLSDLIGYYSHVSCLLKGEKLLYPVAPPEPVEDRRRVRAILPYTKVPDTDEISFLKGDMFIVHNELEDGWMWVTNLRTDEQGLIVEDLVEEVGREEDPHEGKIWFHGKISKQEAYNLLMTVGQVCSFLVRPSDNTPGDYSLYFRTNENIQRFKICPTPNNQFMMGGRYYNSIGDIIDHYRKEQIVEGYYLKEPVPMQDQEQVLNDTVDGKEIYNTIRRKTKDAFYKNIVKKGYLLKKGKGKRWKNLYFILEGSDAQLIYFESEKRATKPKGLIDLSVCSVYVVHDSLFGRPNCFQIVVQHFSEEHYIFYFAGETPEQAEDWMKGLQAFCNLRKSSPGTSNKRLRQVSSLVLHIEEAHKLPVKHFTNPYCNIYLNSVQVAKTHAREGQNPVWSEEFVFDDLPPDINRFEITLSNKTKKSKDPDILFMRCQLSRLQKGHATDEWFLLSSHIPLKGIEPGSLRVRARYSMEKIMPEEEYSEFKELILQKELHVVYALSHVCGQDRTLLASILLRIFLHEKLESLLLCTLNDREISMEDEATTLFRATTLASTLMEQYMKATATQFVHHALKDSILKIMESKQSCELSPSKLEKNEDVNTNLTHLLNILSELVEKIFMASEILPPTLRYIYGCLQKSVQHKWPTNTTMRTRVVSGFVFLRLICPAILNPRMFNIISDSPSPIAARTLILVAKSVQNLANLVEFGAKEPYMEGVNPFIKSNKHRMIMFLDELGNVPELPDTTEHSRTDLSRDLAALHEICVAHSDELRTLSNERGAQQHVLKKLLAITELLQQKQNQYTKTNDVR

SEQ ID NO: 8125 - protein, 881 aa, Homo sapiens
MCLVKSWFLSIRSRWYHGKLDRTIAEERLRQAGKSGSYLIRESDRRPGSFVLSFLSQMNVVNHFRIIAMCGDYYIGGRRFSSLSDLIGYYSHVSCLLKGEKLLYPVAPPEPVEDRRRVRAILPYTKVPDTDEISFLKGDMFIVHNELEDGWMWVTNLRTDEQGLIVEDLVEEVGREEDPHEGKIWFHGKISKQEAYNLLMTVGQVCSFLVRPSDNTPGDYSLYFRTNENIQRFKICPTPNNQFMMGGRYYNSIGDIIDHYRKEQIVEGYYLKEPVPMQDQEQVLNDTVDGKEIYNTIRRKTKDAFYKNIVKKGYLLKKGKGKRWKNLYFILEGSDAQLIYFESEKRATKPKGLIDLSVCSVYVVHDSLFGRPNCFQIVVQHFSEEHYIFYFAGETPEQAEDWMKGLQAFCNLRKSSPGTSNKRLRQVSSLVLHIEEAHKLPVKHFTNPYCNIYLNSVQVAKTHAREGQNPVWSEEFVFDDLPPDINRFEITLSNKTKKSKDPDILFMRCQLSRLQKGHATDEWFLLSSHIPLKGIEPGSLRVRARYSMEKIMPEEEYSEFKELILQKELHVVYALSHVCGQDRTLLASILLRIFLHEKLESLLLCTLNDREISMEDEATTLFRATTLASTLMEQYMKATATQFVHHALKDSILKIMESKQSCELSPSKLEKNEDVNTNLTHLLNILSELVEKIFMASEILPPTLRYIYGCLQKSVQHKWPTNTTMRTRVVSGFVFLRLICPAILNPRMFNIISDSPSPIAARTLILVAKSVQNLANLVEFGAKEPYMEGVNPFIKSNKHRMIMFLDELGNVPELPDTTEHSRTDLSRDLAALHEICVAHSDELRTLSNERGAQQHVLKKLLAITELLQQKQNQYTKTNDVR

SEQ ID NO: 8126 - protein, 880 aa, Homo sapiens
MRTGYSSVPSKLRWYHGKLDRTIAEERLRQAGKSGSYLIRESDRRPGSFVLSFLSQMNVVNHFRIIAMCGDYYIGGRRFSSLSDLIGYYSHVSCLLKGEKLLYPVAPPEPVEDRRRVRAILPYTKVPDTDEISFLKGDMFIVHNELEDGWMWVTNLRTDEQGLIVEDLVEEVGREEDPHEGKIWFHGKISKQEAYNLLMTVGQVCSFLVRPSDNTPGDYSLYFRTNENIQRFKICPTPNNQFMMGGRYYNSIGDIIDHYRKEQIVEGYYLKEPVPMQDQEQVLNDTVDGKEIYNTIRRKTKDAFYKNIVKKGYLLKKGKGKRWKNLYFILEGSDAQLIYFESEKRATKPKGLIDLSVCSVYVVHDSLFGRPNCFQIVVQHFSEEHYIFYFAGETPEQAEDWMKGLQAFCNLRKSSPGTSNKRLRQVSSLVLHIEEAHKLPVKHFTNPYCNIYLNSVQVAKTHAREGQNPVWSEEFVFDDLPPDINRFEITLSNKTKKSKDPDILFMRCQLSRLQKGHATDEWFLLSSHIPLKGIEPGSLRVRARYSMEKIMPEEEYSEFKELILQKELHVVYALSHVCGQDRTLLASILLRIFLHEKLESLLLCTLNDREISMEDEATTLFRATTLASTLMEQYMKATATQFVHHALKDSILKIMESKQSCELSPSKLEKNEDVNTNLTHLLNILSELVEKIFMASEILPPTLRYIYGCLQKSVQHKWPTNTTMRTRVVSGFVFLRLICPAILNPRMFNIISDSPSPIAARTLILVAKSVQNLANLVEFGAKEPYMEGVNPFIKSNKHRMIMFLDELGNVPELPDTTEHSRTDLSRDLAALHEICVAHSDELRTLSNERGAQQHVLKKLLAITELLQQKQNQYTKTNDVR

SEQ ID NO: 8127 - protein, 871 aa, Homo sapiens
RGDASGWGCSEPGPGGPWGSRAGRVGQSRAGFNMMAAEAGSEEGGPVTAGAGGGGAAAGSSAYPAVCRVKIPAALPVAAAPYPGLVETGVAGTLGGGAALGSEFLGAGSVAGALGGAGLTGGGTAAGVAGAAAGVAGAAVAGPSGDMALTKLPTSLLAETLGPGGGFPPLPPPPYLPPLGAGLGTVDEGDSLDGPEYEEEEVAIPLTAPPTNQWYHGKLDRTIAEERLRQAGKSGSYLIRESDRRPGSFVLSFLSQMNVVNHFRIIAMCGDYYIGGRRFSSLSDLIGYYSHVSCLLKGEKLLYPVAPPEPVEDRRRVRAILPYTKVPDTDEISFLKGDMFIVHNELEDGWMWVTNLRTDEQGLIVEDLVEEVGREEDPHEGKIWFHGKISKQEAYNLLMTVGQVCSFLVRPSDNTPGDYSLYFRTNENIQRFKICPTPNNQFMMGGRYYNSIGDIIDHYRKEQIVEGYYLKEPVPMQDQEQVLNDTVDGKEIYNTIRRKTKDAFYKNIVKKGYLLKKGKGKRWKNLYFILEGSDAQLIYFESEKRATKPKGLIDLSVCSVYVVHDSLFGRPNCFQIVVQHFSEEHYIFYFAGETPEQAEDWMKGLQAFCNLRKSSPGTSNKRLRQVSSLVLHIEEAHKLPVKHFTNPYCNIYLNSVQVAKTHAREGQNPVWSEEFVFDDLPPDINRFEITLSNKTKKSKDPDILFMRCQLSRLQKGHATDEWFLLSSHIPLKGIEPGSLRVRARYSMEKIMPEEEYSEFKELILQKELHVVYALSHVCGQDRTLLASILLRIFLHEKLESLLLCTLNDREISMEDEATTLFRATTLASTLMEQYMKATATQFVHHALKDSILKIMESKQSCELSSSKLQKA

SEQ ID NO: 8128 - protein, 203 aa, Homo sapiens
MGGSLRVAVLGAPGVGKTAIIRQFLFGDYPERHRPTDGPRLYRPAVLLDGAVYDLSIRDGDVAGPGSSPGGPEEWPDAKDWSLQDTDAFVLVYDICSPDSFDYVKALRQRIAETRPAGAPEAPILVVGNKRDRQRLRFGPRRALAALVRRGWRCGYLECSAKYNWHVLRLFRELLRCALVRARPAHPALRLQGALHPARCSLM

SEQ ID NO: 8129 - protein, 115 aa, Homo sapiens
MGGSLRVAVLGAPGVGKTAIIRQFLFGDYPERHRPTDGPRLYRPAVLLDGAVYDLSIRDGDVAGPGSSPGGPEEWPDAKDWSLQDTDAFVLVYDICSPDSFDYVKALRQRIAETR

SEQ ID NO: 8130 - protein, 192 aa, Homo sapiens
MQAIKCVVVGDGAVGKTCLLISYTTNAFPGEYIPTVFDNYSANVMVDGKPVNLGLWDTAGQEDYDRLRPLSYPQTDVFLICFSLVSPASFENVRAKWYPEVRHHCPNTPIILVGTKLDLRDDKDTIEKLKEKKLTPITYPQGLAMAKEIGAVKYLECSALTQRGLKTVFDEAIRAVLCPPPVKKRKRKCLLL

SEQ ID NO: 8131 - protein, 211 aa, Homo sapiens
MQAIKCVVVGDGAVGKTCLLISYTTNAFPGEYIPTVFDNYSANVMVDGKPVNLGLWDTAGQEDYDRLRPLSYPQTVGETYGKDITSRGKDKPIADVFLICFSLVSPASFENVRAKWYPEVRHHCPNTPIILVGTKLDLRDDKDTIEKLKEKKLTPITYPQGLAMAKEIGAVKYLECSALTQRGLKTVFDEAIRAVLCPPPVKKRKRKCLLL

SEQ ID NO: 8132 - protein, 192 aa, Homo sapiens
MQAIKCVVVGDGAVGKTCLLISYTTNAFPGEYIPTVFDNYSANVMVDSKPVNLGLWDTAGQEDYDRLRPLSYPQTDVFLICFSLVSPASYENVRAKWFPEVRHHCPSTPIILVGTKLDLRDDKDTIEKLKEKKLAPITYPQGLALAKEIDSVKYLECSALTQRGLKTVFDEAIRAVLCPQPTRQQKRACSLL

SEQ ID NO: 8133 - protein, 86 aa, Homo sapiens
MQAIKCVVVGDGAVGKTCLLISYTTNAFPGEYIPTVPGRPCALLQDAEAGLSSDVEGACWCQTQEGRMTGEAPAPPWPALRGPHHS

SEQ ID NO: 8134 - protein, 185 aa, Homo sapiens
MQAIKAVGKTCLLISYTTNAFPGEYIPTVFDNYSANVMVDSKPVNLGLWDTAGQEDYDRLRPLSYPQTDVFLICFSLVSPASYENVRAKWFPEVRHHCPSTPIILVGTKLDLRDDKDTIEKLKEKKLAPITYPQGLALAKEIDSVKYLECSALTQRGLKTVFDEAIRAVLCPQPTRQQKRACSLL

SEQ ID NO: 8135 - protein, 148 aa, Homo sapiens
MVDSKPVNLGLWDTAGQEDYDRLRPLSYPQTDVFLICFSLVSPASYENVRAKWFPEVRHHCPSTPIILVGTKLDLRDDKDTIEKLKEKKLAPITYPQGLALAKEIDSVKYLECSALTQRGLKTVFDEAIRAVLCPQPTRQQKRACSLL

SEQ ID NO: 8136 - protein, 166 aa, Homo sapiens
MQAIKCVVVGDGAVGKTCLLISYTTNAFPGEYIPTVFDNYSANVMVDSKPVNLGLWDTAGQEDYDRLRPLSYPQTDVFLICFSLVSPASYENVRAKWFPEVRHHCPSTPIILVGTKLDLRDDKDTIEKLKEKKLAPITYPQGLALAKEIDSVKYLECSALTQRGLK

SEQ ID NO: 8137 - protein, 1594 aa, Homo sapiens
MKLYVFLVNTGTTLTFDTELTVQTVADLKHAIQSKYKIAIQHQVLVVNGGECMAADRRVCTYSAGTDTNPIFLFNKEMILCDRPPAIPKTTFSTENDMEIKVEESLMMPAVFHTVASRTQLALEMYEVAKKLCSFCEGLVHDEHLQHQGWAAIMANLEDCSNSYQKLLFKFESIYSNYLQSIEDIKLKLTHLGTAVSVMAKIPLLECLTRHSYRECLGRLDSLPEHEDSEKAEMKRSTELVLSPDMPRTTNESLLTSFPKSVEHVSPDTADAESGKEIRESCQSTVHQQDETTIDTKDGDLPFFNVSLLDWINVQDRPNDVESLVRKCFDSMSRLDPRIIRPFIAECRQTIAKLDNQNMKAIKGLEDRLYALDQMIASCGRLVNEQKELAQGFLANQKRAENLKDASVLPDLCLSHANQLMIMLQNHRKLLDIKQKCTTAKQELANNLHVRLKWCCFVMLHADQDGEKLQALLRLVIELLERVKIVEALSTVPQMYCLAVVEVVRRKMFIKHYREWAGALVKDGKRLYEAEKSKRESFGKLFRKSFLRNRLFRGLDSWPPSFCTQKPRKFDCELPDISLKDLQFLQSFCPSEVQPFLRVPLLCDFEPLHQHVLALHNLVKAAQSLDEMSQTITDLLSEQKASVSQTSPQSASSPRMESTAGITTTTSPRTPPPLTVQDPLCPAVCPLEELSPDSIDAHTFDFETIPHPNIEQTIHQVSLDLDSLAESPESDFMSAVNEFVIEENLSSPNPISDPQSPEMMVESLYSSVINAIDSRRMQDTNVCGKEDFGDHTSLNVQLERCRVVAQDSHFSIQTIKEDLCHFRTFVQKEQCDFSNSLKCTAVEIRNIIEKVKCSLEITLKEKHQKELLSLKNEYEGKLDGLIKETEENENKIKKLKGELVCLEEVLQNKDNEFALVKHEKEAVICLQNEKDQKLLEMENIMHSQNCEIKELKQSREIVLEDLKKLHVENDEKLQLLRAELQSLEQSHLKELEDTLQVRHIQEFEKVMTDHRVSLEELKKENQQIINQIQESHAEIIQEKEKQLQELKLKVSDLSDTRCKLEVELALKEAETDEIKILLEESRAQQKETLKSLLEQETENLRTEISKLNQKIQDNNENYQVGLAELRTLMTIEKDQCISELISRHEEESNILKAELNKVTSLHNQAFEIEKNLKEQIIELQSKLDSELSALERQKDEKITQQEEKYEAIIQNLEKDRQKLVSSQEQDREQLIQKLNCEKDEAIQTALKEFKLEREVVEKELLEKVKHLENQIAKSPAIDSTRGDSSSLVAELQEKLQEEKAKFLEQLEEQEKRKNEEMQNVRTSLIAEQQTNFNTVLTREKMRKENIINDLSDKLKSTMQQQERDKDLIESLSEDRARLLEEKKKLEEEVSKLRSSSFVPSPYVATAPELYGACAPELPGESDRSAVETADEGRVDSAMETSMMSVQENIHMLSEEKQRIMLLERTLQLKEEENKRLNQRLMSQSMSSVSSRHSEKIAIRDFQVGDLVLIILDERHDNYVLFTVSPTLYFLHSESLPALDLKPGEGASGASRRPWVLGKVMEKEYCQAKKAQNRFKVPLGTKFYRVKAVSWNKKV

SEQ ID NO: 8138 - protein, 1591 aa, Homo sapiens
MKLYVFLVNTGTTLTFDTELTVQTVADLKHAIQSKYKIAIQHQVLVVNGGECMAADRRVCTYSAGTDTNPIFLFNKEMILCDRPPAIPKTTFSTENDMEIKVEESLMMPAVFHTVASRTQLALEMYEVAKKLCSFCEGLVHDEHLQHQGWAAIMANLEDCSNSYQKLLFKFESIYSNYLQSIEDIKLKLTHLGTAVSVMAKIPLLECLTRHSYRECLGRLDSLPEHEDSEKAEMKRSTELVLSPDMPRTTNESLLTSFPKSVEHVSPDTADAESGKEIRESCQSTVHQQDETTIDTKDGDLPFFNVSLLDWINVQDRPNDVESLVRKCFDSMSRLDPRIIRPFIAECRQTIAKLDNQNMKAIKGLEDRLYALDQMIASCGRLVNEQKELAQGFLANQKRAENLKDASVLPDLCLSHANQLMIMLQNHRKLLDIKQKCTTAKQELANNLHVRLKWCCFVMLHADQDGEKLQALLRLVIELLERVKIVEALSTVPQMYCLAVVEVVRRKMFIKHYREWAGALVKDGKRLYEAEKSKRESFGKLFRKSFLRNRLFRGLDSWPPSFCTQKPRKFDCELPDISLKDLQFLQSFCPSEVQPFLRVPLLCDFEPLHQHVLALHNLVKAAQSLDEMSQTITDLLSEQKASVSQTSPQSASSPRMESTAGITTTTSPRTPPPLTVQDPLCPAVCPLEELSPDSIDAHTFDFETIPHPNIEQTIHQVSLDLDSLAESPESDFMSAVNEFVIEENLSSPNPISDPQSPEMMVESLYSSVINAIDSRRMQDTNVCGKEDFGDHTSLNVQLERCRVVAQDSHFSIQTIKEDLCHFRTFVQKEQCDFSNSLKCTAVEIRNIIEKVKCSLEITLKEKHQKELLSLKNEYEGKLDGLIKETEENENKIKKLKGELVCLEEVLQNKDNEFALVKHEKEAVICLQNEKDQKLLEMENIMHSQNCEIKELKQSREIVLEDLKKLHVENDEKLQLLRAELQSLEQSHLKELEDTLQVRHIQEFEKVMTDHRVSLEELKKENQQIINQIQESHAEIIQEKEKQLQELKLKVSDLSDTRCKLEVELALKEAETDEIKILLEESRAQQKETLKSLLEQETENLRTEISKLNQKIQDNNENYQVGLAELRTLMTIEKDQCISELISRHEEESNILKAELNKVTSLHNQAFEIEKNLKEQIIELQSKLDSELSALERQKDEKITQQEEKYEAIIQNLEKDRQKLVSSQEQDREQLIQKLNCEKDEAIQTALKEFKLEREVVEKELLEKVKHLENQIAKSPAIDSTRGDSSSLVAELQEKLQEEKAKFLEQLEEQEKRKNEEMQNVRTSLIAEQQTNFNTVLTREKMRKENIINDLSDKLKSTMQQQERDKDLIESLSEDRARLLEEKKKLEEEVSKLRSSSFVPSPYVATAPELYGACAPELPGESDRSAVETADEGRVDSAMETSMMSVQENIHMLSEEKQRIMLLERTLQLKEEENKRLNQRLMSQSMSSVSSRHSEKIAIRDFQVGDLVLIILDERHDNYVLFTVSPTLYFLHSESLPALDLKPASGASRRPWVLGKVMEKEYCQAKKAQNRFKVPLGTKFYRVKAVSWNKKV

SEQ ID NO: 8139 - protein, 72 aa, Homo sapiens
MVPGVAGSAAAAGEGGGVAGVADLKHAIQSKYKIAIQHQVLVVNGGECMAADRRVCTYSAGTDTNPIFLFNK

SEQ ID NO: 8140 - protein, 15 aa, Homo sapiens
MKLYVFLVNTGTTLT

SEQ ID NO: 8141 - protein, 53 aa, Homo sapiens
MAADRRVCTYSAGTDTNPIFLFNKEMILCDRPPAIPKTTFSTENDMEIKVEES

SEQ ID NO: 8142 - protein, 127 aa, Homo sapiens
  VARIANT 1: note = MOD_RES - Any amino acid
XIMLLERTLQLKEEENKRLNQRLMSQSMSSVSSRHSEKIAIRDFQVGDLVLIILDERHDNYVLFTVSPTLYFLHSESLPALDLKPASGASRRPWVLGKVMEKEYCQAKKCSFITPKTAGHLFMQKSA

SEQ ID NO: 8143 - protein, 1591 aa, Homo sapiens; identical to SEQ ID NO: 8138

SEQ ID NO: 8144 - protein, 540 aa, Homo sapiens
MNGEAICSALPTIPYHKLADLRYLSRGASGTVSSARHADWRVQVAVKHLHIHTPLLDSERKDVLREAEILHKARFSYILPILGICNEPEFLGIVTEYMPNGSLNELLHRKTEYPDVAWPLRFRILHEIALGVNYLHNMTPPLLHHDLKTQNILLDNEFHVKIADFGLSKWRMMSLSQSRSSKSAPEGGTIIYMPPENYEPGQKSRASIKHDIYSYAVITWEVLSRKQPFEDVTNPLQIMYSVSQGHRPVINEESLPYDIPHRARMISLIESGWAQNPDERPSFLKCLIELEPVLRTFEEITFLEAVIQLKKTKLQSVSSAIHLCDKKKMELSLNIPVNHGPQEESCGSSQLHENSGSPETSRSLPAPQDNDFLSRKAQDCYFMKLHHCPGNHSWDSTISGSQRAAFCDHKTTPCSSAIINPLSTAGNSERLQPGIAQQWIQSKREDIVNQMTEACLNQSLDALLSRDLIMKEDYELVSTKPTRTSKVRQLLDTTDIQGEEFAKVIVQKLKDNKQMGLQPYPEILVVSRSPSLNLLQNKSM

SEQ ID NO: 8145 - protein, 403 aa, Homo sapiens
MTPPLLHHDLKTQNILLDNEFHVKIADFGLSKWRMMSLSQSRSSKSAPEGGTIIYMPPENYEPGQKSRASIKHDIYSYAVITWEVLSRKQPFEDVTNPLQIMYSVSQGHRPVINEESLPYDIPHRARMISLIESGWAQNPDERPSFLKCLIELEPVLRTFEEITFLEAVIQLKKTKLQSVSSAIHLCDKKKMELSLNIPVNHGPQEESCGSSQLHENSGSPETSRSLPAPQDNDFLSRKAQDCYFMKLHHCPGNHSWDSTISGSQRAAFCDHKTTPCSSAIINPLSTAGNSERLQPGIAQQWIQSKREDIVNQMTEACLNQSLDALLSRDLIMKEDYELVSTKPTRTSKVRQLLDTTDIQGEEFAKVIVQKLKDNKQMGLQPYPEILVVSRSPSLNLLQNKSM

SEQ ID NO: 8146 - protein, 3458 aa, Homo sapiens
MERSGWARQTFLLALLLGATLRARAAAGYYPRFSPFFFLCTHHGELEGDGEQGEVLISLHIAGNPTYYVPGQEYHVTISTSTFFDGLLVTGLYTSTSVQASQSIGGSSAFGFGIMSDHQFGNQFMCSVVASHVSHLPTTNLSFIWIAPPAGTGCVNFMATATHRGQVIFKDALAQQLCEQGAPTDVTVHPHLAEIHSDSIILRDDFDSYHQLQLNPNIWVECNNCETGEQCGAIMHGNAVTFCEPYGPRELITTGLNTTTASVLQFSIGSGSCRFSYSDPSIIVLYAKNNSADWIQLEKIRAPSNVSTIIHILYLPEDAKGENVQFQWKQENLRVGEVYEACWALDNILIINSAHRQVVLEDSLDPVDTGNWLFFPGATVKHSCQSDGNSIYFHGNEGSEFNFATTRDVDLSTEDIQEQWSEEFESQPTGWDVLGAVIGTECGTIESGLSMVFLKDGERKLCTPSMDTTGYGNLRFYFVMGGICDPGNSHENDIILYAKIEGRKEHITLDTLSYSSYKVPSLVSVVINPELQTPATKFCLRQKNHQGHNRNVWAVDFFHVLPVLPSTMSHMIQFSINLGCGTHQPGNSVSLEFSTNHGRSWSLLHTECLPEICAGPHLPHSTVYSSENYSGWNRITIPLPNAALTRNTRIRWRQTGPILGNMWAIDNVYIGPSCLKFCSGRGQCTRHGCKCDPGFSGPACEMASQTFPMFISESFGSSRLSSYHNFYSIRGAEVSFGCGVLASGKALVFNKDGRRQLITSFLDSSQSRFLQFTLRLGSKSVLSTCRAPDQPGEGVLLHYSYDNGITWKLLEHYSYLSYHEPRIISVELPGDAKQFGIQFRWWQPYHSSQREDVWAIDEIIMTSVLFNSISLDFTNLVEVTQSLGFYLGNVQPYCGHDWTLCFTGDSKLASSMRYVETQSMQIGASYMIQFSLVMGCGQKYTPHMDNQVKLEYSTNHGLTWHLVQEECLPSMPSCQEFTSASIYHASEFTQWRRVIVLLPQKTWSSATRFRWSQSYYTAQDEWALDSIYIGQQCPNMCSGHGSCDHGICRCDQGYQGTECHPEAALPSTIMSDFENQNGWESDWQEVIGGEIVKPEQGCGVISSGSSLYFSKAGKRQLVSWDLDTSWVDFVQFYIQIGGESASCNKPDSREEGVLLQYSNNGGIQWHLLAEMYFSDFSKPRFVYLELPAAAKTPCTRFRWWQPVFSGEDYDQWAVDDIIILSEKQKQIIPVINPTLPQNFYEKPAFDYPMNQMSVWLMLANEGMVKNETFCAATPSAMIFGKSDGDRFAVTRDLTLKPGYVLQFKLNIGCANQFSSTAPVLLQYSHDAGMSWFLVKEGCYPASAGKGCEGNSRELSEPTMYHTGDFEEWTRITIVIPRSLASSKTRFRWIQESSSQKNVPPFGLDGVYISEPCPSYCSGHGDCISGVCFCDLGYTAAQGTCVSNVPNHNEMFDRFEGKLSPLWYKITGAQVGTGCGTLNDGKSLYFNGPGKREARTVPLDTRNIRLVQFYIQIGSKTSGITCIKPRTRNEGLIVQYSNDNGILWHLLRELDFMSFLEPQIISIDLPQDAKTPATAFRWWQPQHGKHSAQWALDDVLIGMNDSSQTGFQDKFDGSIDLQANWYRIQGGQVDIDCLSMDTALIFTENIGKPRYAETWDFHVSASTFLQFEMSMGCSKPFSNSHSVQLQYSLNNGKDWHLVTEECVPPTIGCLHYTESSIYTSERFQNWKRITVYLPLSTISPRTRFRWIQANYTVGADSWAIDNVVLASGCPWMCSGRGICDAGRCVCDRGFGGPYCVPVVPLPSILKDDFNGNLHPDLWPEVYGAERGNLNGETIKSGTSLIFKGEGLRMLISRDLDCTNTMYVQFSLRFIAKSTPERSHSILLQFSISGGITWHLMDEFYFPQTTNILFINVPLPYTAQTNATRFRLWQPYNNGKKEEIWIVDDFIIDGNNVNNPVMLLDTFDFGPREDNWFFYPGGNIGLYCPYSSKGAPEEDSAMVFVSNEVGEHSITTRDLNVNENTIIQFEINVGCSTDSSSADPVRLEFSRDFGATWHLLLPLCYHSSSHVSSLCSTEHHPSSTYYAGTMQGWRREVVHFGKLHLCGSVRFRWYQGFYPAGSQPVTWAIDNVYIGPQCEEMCNGQGSCINGTKCICDPGYSGPTCKISTKNPDFLKDDFEGQLESDRFLLMSGGKPSRKCGILSSGNNLFFNEDGLRMLMTRDLDLSHARFVQFFMRLGCGKGVPDPRSQPVLLQYSLNGGLSWSLLQEFLFSNSSNVGRYIALEIPLKARSGSTRLRWWQPSENGHFYSPWVIDQILIGGNISGNTVLEDDFTTLDSRKWLLHPGGTKMPVCGSTGDALVFIEKASTRYVVSTDVAVNEDSFLQIDFAASCSVTDSCYAIELEYSVDLGLSWHPLVRDCLPTNVECSRYHLQRILVSDTFNKWTRITLPLPPYTRSQATRFRWHQPAPFDKQQTWAIDNVYIGDGCIDMCSGHGRCIQGNCVCDEQWGGLYCDDPETSLPTQLKDNFNRAPSSQNWLTVNGGKLSTVCGAVASGMALHFSGGCSRLLVTVDLNLTNAEFIQFYFMYGCLITPNNRNQGVLLEYSVNGGITWNLLMEIFYDQYSKPGFVNILLPPDAKEIATRFRWWQPRHDGLDQNDWAIDNVLISGSADQRTVMLDTFSSAPVPQHERSPADAGPVGRIAFDMFMEDKTSVNEHWLFHDDCTVERFCDSPDGVMLCGSHDGREVYAVTHDLTPTEGWIMQFKISVGCKVSEKIAQNQIHVQYSTDFGVSWNYLVPQCLPADPKCSGSVSQPSVFFPTKGWKRITYPLPESLVGNPVRFRFYQKYSDMQWAIDNFYLGPGCLDNCRGHGDCLREQCICDPGYSGPNCYLTHTLKTFLKERFDSEEIKPDLWMSLEGGSTCTECGILAEDTALYFGGSTVRQAVTQDLDLRGAKFLQYWGRIGSENNMTSCHRPICRKEGVLLDYSTDGGITWTLLHEMDYQKYISVRHDYILLPEDALTNTTRLRWWQPFVISNGIVVSGVERAQWALDNILIGGAEINPSQLVDTFDDEGTSHEENWSFYPNAVRTAGFCGNPSFHLYWPNKKKDKTHNALSSRELIIQPGYMMQFKIVVGCEATSCGDLHSVMLEYTKDARSDSWQLVQTQCLPSSSNSIGCSPFQFHEATIYNSVNSSSWKRITIQLPDHVSSSATQFRWIQKGEETEKQSWAIDHVYIGEACPKLCSGHGYCTTGAICICDESFQGDDCSVFSHDLPSYIKDNFESARVTEANWETIQGGVIGSGCGQLAPYAHGDSLYFNGCQIRQAATKPLDLTRASKIMFVLQIGSMSQTDSCNSDLSGPHAVDKAVLLQYSVNNGITWHVIAQHQPKDFTQAQRVSYNVPLEARMKGVLLRWWQPRHNGTGHDQWALDHVEVVLTRKQNYMMNFSRQHGLRHFYNRRRRSLRRYP

SEQ ID NO: 8147 - protein, 3460 aa, Homo sapiens [sequence omitted]

SEQ ID NO: 8148 - protein, 977 aa, Homo sapiens
MCSGHGRCIQGNCVCDEQWGGLYCDDPETSLPTQLKDNFNRAPSSQNWLTVNGGKLSTVCGAVASGMALHFSGGCSRLLVTVDLNLTNAEFIQFYFMYGCLITPNNRNQGVLLEYSVNGGITWNLLMEIFYDQYSKPGFVNILLPPDAKEIATRFRWWQPRHDGLDQNDWAIDNVLISGSADQRTVMLDTFSSAPVPQHERSPADAGPVGRIAFDMFMEDKTSVNEHWLFHDDCTVERFCDSPDGVMLCGSHDGREVYAVTHDLTPTEGWIMQFKISVGCKVSEKIAQNQIHVQYSTDFGVSWNYLVPQCLPADPKCSGSVSQPSVFFPTKGWKRITYPLPESLVGNPVRFRFYQKYSDMQWAIDNFYLGPGCLDNCRGHGDCLREQCICDPGYSGPNCYLTHTLKTFLKERFDSEEIKPDLWMSLEGGSTCTECGILAEDTALYFGGSTVRQAVTQDLDLRGAKFLQYWGRIGSENNMTSCHRPICRKEGVLLDYSTDGGITWTLLHEMDYQKYISVRHDYILLPEDALTNTTRLRWWQPFVISNGIVVSGVERAQWALDNILIGGAEINPSQLVDTFDDEGTSHEENWSFYPNAVRTAGFCGNPSFHLYWPNKKKDKTHNALSSRELIIQPGYMMQFKIVVGCEATSCGDLHSVMLEYTKDARSDSWQLVQTQCLPSSSNSIGCSPFQFHEATIYNSVNSSSWKRITIQLPDHVSSSATQFRWIQKGEETEKQSWAIDHVYIGEACPKLCSGHGYCTTGAICICDESFQGDDCSVFSHDLPSYIKDNFESARVTEANWETIQGGVIGSGCGQLAPYAHGDSLYFNGCQIRQAATKPLDLTRASKIMFVLQIGSMSQTDSCNSDLSGPHAVDKAVLLQYSVNNGITWHVIAQHQPKDFTQAQRVSYNVPLEARMKGVLLRWWQPRHNGTGHDQWALDHVEVVLVTTRKQNYMMNFSRQHGLRHFYNRRRRSLRRYP

SEQ ID NO: 8149 - protein, 3460 aa, Homo sapiens
MERSGWARQTFLLALLLGATLRARAAAGYYPRFSPFFFLCTHHGELEGDGEQGEVLISLHIAGNPTYYVPGQEYHVTISTSTFFDGLLVTGLYTSTSVQASQSIGGSSAFGFGIMSDHQFGNQFMCSVVASHVSHLPTTNLSFIWIAPPAGTGCVNFMATATHRGQVIFKDALAQQLCEQGAPTDVTVHPHLAEIHSDSIILRDDFDSYHQLQLNPNIWVECNNCETGEQCGAIMHGNAVTFCEPYGPRELITTGLNTTTASVLQFSIGSGSCRFSYSDPSIIVLYAKNNSADWIQLEKIRAPSNVSTIIHILYLPEDAKGENVQFQWKQENLRVGEVYEACWALDNILIINSAHRQVVLEDSLDPVDTGNWLFFPGATVKHSCQSDGNSIYFHGNEGSEFNFATTRDVDLSTEDIQEQWSEEFESQPTGWDVLGAVIGTECGTIESGLSMVFLKDGERKLCTPSMDTTGYGNLRFYFVMGGICDPGNSHENDIILYAKIEGRKEHITLDTLSYSSYKVPSLVSVVINPELQTPATKFCLRQKNHQGHNRNVWAVDFFHVLPVLPSTMSHMIQFSINLGCGTHQPGNSVSLEFSTNHGRSWSLLHTECLPEICAGPHLPHSTVYSSENYSGWNRITIPLPNAALTRNTRIRWRQTGPILGNMWAIDNVYIGPSCLKFCSGRGQCTRHGCKCDPGFSGPACEMASQTFPMFISESFGSSRLSSYHNFYSIRGAEVSFGCGVLASGKALVFNKDGRRQLITSFLDSSQSRFLQFTLRLGSKSVLSTCRAPDQPGEGVLLHYSYDNGITWKLLEHYSYLSYHEPRIISVELPGDAKQFGIQFRWWQPYHSSQREDVWAIDEIIMTSVLFNSISLDFTNLVEVTQSLGFYLGNVQPYCGHDWTLCFTGDSKLASSMRYVETQSMQIGASYMIQFSLVMGCGQKYTPHMDNQVKLEYSTNHGLTWHLVQEECLPSMPSCQEFTSASIYHASEFTQWRRVIVLLPQKTWSSATRFRWSQSYYTAQDEWALDSIYIGQQCPNMCSGHGSCDHGICRCDQGYQGTECHPEAALPSTIMSDFENQNGWESDWQEVIGGEIVKPEQGCGVISSGSSLYFSKAGKRQLVSWDLDTSWVDFVQFYIQIGGESASCNKPDSREEGVLLQYSNNGGIQWHLLAEMYFSDFSKPRFVYLELPAAAKTPCTRFRWWQPVFSGEDYDQWAVDDIIILSEKQKQIIPVINPTLPQNFYEKPAFDYPMNQMSVWLMLANEGMVKNETFCAATPSAMIFGKSDGDRFAVTRDLTLKPGYVLQFKLNIGCANQFSSTAPVLLQYSHDAGMSWFLVKEGCYPASAGKGCEGNSRELSEPTMYHTGDFEEWTRITIVIPRSLASSKTRFRWIQESSSQKNVPPFGLDGVYISEPCPSYCSGHGDCISGVCFCDLGYTAAQGTCVSNVPNHNEMFDRFEGKLSPLWYKITGAQVGTGCGTLNDGKSLYFNGPGKREARTVPLDTRNIRLVQFYIQIGSKTSGITCIKPRTRNEGLIVQYSNDNGILWHLLRELDFMSFLEPQIISIDLPQDAKTPATAFRWWQPQHGKHSAQWALDDVLIGMNDSSQTGFQDKFDGSIDLQANWYRIQGGQVDIDCLSMDTALIFTENIGKPRYAETWDFHVSASTFLQFEMSMGCSKPFSNSHSVQLQYSLNNGKDWHLVTEECVPPTIGCLHYTESSIYTSERFQNWKRITVYLPLSTISPRTRFRWIQANYTVGADSWAIDNVVLASGCPWMCSGRGICDAGRCVCDRGFGGPYCVPVVPLPSILKDDFNGNLHPDLWPEVYGAERGNLNGETIKSGTSLIFKGEGLRMLISRDLDCTNTMYVQFSLRFIAKSTPERSHSILLQFSISGGITWHLMDEFYFPQTTNILFINVPLPYTAQTNATRFRLWQPYNNGKKEEIWIVDDFIIDGNNVNNPVMLLDTFDFGPREDNWFFYPGGNIGLYCPYSSKGAPEEDSAMVFVSNEVGEHSITTRDLNVNENTIIQFEINVGCSTDSSSADPVRLEFSRDFGATWHLLLPLCYHSSSHVSSLCSTEHHPSSTYYAGTMQGWRREVVHFGKLHLCGSVRFRWYQGFYPAGSQPVTWAIDNVYIGPQCEEMCNGQGSCINGTKCICDPGYSGPTCKISTKNPDFLKDDFEGQLESDRFLLMSGGKPSRKCGILSSGNNLFFNEDGLRMLMTRDLDLSHARFVQFFMRLGCGKGVPDPRSQPVLLQYSLNGGLSWSLLQEFLFSNSSNVGRYIALEIPLKARSGSTRLRWWQPSENGHFYSPWVIDQILIGGNISGNTVLEDDFTTLDSRKWLLHPGGTKMPVCGSTGDALVFIEKASTRYVVSTDVAVNEDSFLQIDFAASCSVTDSCYAIELEYSVDLGLSWHPLVRDCLPTNVECSRYHLQRILVSDTFNKWTRITLPLPPYTRSQATRFRWHQPAPFDKQQTWAIDNVYIGDGCIDMCSGHGRCIQGNCVCDEQWGGLYCDDPETSLPTQLKDNFNRAPSSQNWLTVNGGKLSTVCGAVASGMALHFSGGCSRLLVTVDLNLTNAEFIQFYFMYGCLITPNNRNQGVLLEYSVNGGITWNLLMEIFYDQYSKPGFVNILLPPDAKEIATRFRWWQPRHDGLDQNDWAIDNVLISGSADQRTVMLDTFSSAPVPQHERSPADAGPVGRIAFDMFMEDKTSVNEHWLFHDDCTVERFCDSPDGVMLCGSHDGREVYAVTHDLTPTEGWIMQFKISVGCKVSEKIAQNQIHVQYSTDFGVSWNYLVPQCLPADPKCSGSVSQPSVFFPTKGWKRITYPLPESLVGNPVRFRFYQKYSDMQWAIDNFYLGPGCLDNCRGHGDCLREQCICDPGYSGPNCYLTHTLKTFLKERFDSEEIKPDLWMSLEGGSTCTECGILAEDTALYFGGSTVRQAVTQDLDLRGAKFLQYWGRIGSENNMTSCHRPICRKEGVLLDYSTDGGITWTLLHEMDYQKYISVRHDYILLPEDALTNTTRLRWWQPFVISNGIVVSGVERAQWALDNILIGGAEINPSQLVDTFDDEGTSHEENWSFYPNAVRTAGFCGNPSFHLYWPNKKKDKTHNALSSRELIIQPGYMMQFKIVVGCEATSCGDLHSVMLEYTKDARSDSWQLVQTQCLPSSSNSIGCSPFQFHEATIYNSVNSSSWKRITIQLPDHVSSSATQFRWIQKGEETEKQSWAIDHVYIGEACPKLCSGHGYCTTGAICICDESFQGDDCSVFSHDLPSYIKDNFESARVTEANWETIQGGVIGSGCGQLAPYAHGDSLYFNGCQIRQAATKPLDLTRASKIMFVLQIGSMSQTDSCNSDLSGPHAVDKAVLLQYSVNNGITWHVIAQHQPKDFTQAQRVSYNVPLEARMKGVLLRWWQPRHNGTGHDQWALDHVEVVLVSTRKQNYMMNFSRQHGLRHFYNRRRRSLRRYP

SEQ ID NO: 8150 - protein, 3427 aa, Homo sapiens
MERSGWARQTFLLALLLGATLRARAAAGYYPRFSPFFFLCTHHGELEGDGEQGEVLISLHIAGNPTYYVPGQEYHVTISTSTFFDGLLVTGLYTSTSVQASQSIGGSSAFGFGIMSDHQFGNQFMCSVVASHVSHLPTTNLSFIWIAPPAGTGCVNFMATATHRGQVIFKDALAQQLCEQGAPTDVTVHPHLAEIHSDSIILRDDFDSYHQLQLNPNIWVECNNCETGEQCGAIMHGNAVTFCEPYGPRELITTGLNTTTASVLQFSIGSGSCRFSYSDPSIIVLYAKNNSADWIQLEKIRAPSNVSTIIHILYLPEDAKGENVQFQWKQENLRVGEVYEACWALDNILIINSAHRQVVLEDSLDPVDTGNWLFFPGATVKHSCQSDGNSIYFHGNEGSEFNFATTRDVDLSTEDIQEQWSEEFESQPTGWDVLGAVIGTECGTIESGLSMVFLKDGERKLCTPSMDTTGYGNLRFYFVMGGICDPGNSHENDIILYAKIEGRKEHITLDTLSYSSYKVPSLVSVVINPELQTPATKFCLRQKNHQGHNRNVWAVDFFHVLPVLPSTMSHMIQFSINLGCGTHQPGNSVSLEFSTNHGRSWSLLHTECLPEICAGPHLPHSTVYSSENYSGWNRITIPLPNAALTRNTRIRWRQTGPILGNMWAIDNVYIGPSCLKFCSGRGQCTRHGCKCDPGFSGPACEMASQTFPMFISESFGSSRLSSYHNFYSIRGAEVSFGCGVLASGKALVFNKDGRRQLITSFLDSSQSRFLQFTLRLGSKSVLSTCRAPDQPGEGVLLHYSYDNGITWKLLEHYSYLSYHEPRIISVELPGDAKQFGIQFRWWQPYHSSQREDVWAIDEIIMTSVLFNSISLDFTNLVEVTQSLGFYLGNVQPYCGHDWTLCFTGDSKLASSMRYVETQSMQIGASYMIQFSLVMGCGQKYTPHMDNQVKLEYSTNHGLTWHLVQEECLPSMPSCQEFTSASIYHASEFTQWRRVIVLLPQKTWSSATRFRWSQSYYTAQDEWALDSIYIGQQCPNMCSGHGSCDHGICRCDQGYQGTECHPEAALPSTIMSDFENQNGWESDWQEVIGGEIVKPEQGCGVISSGSSLYFSKAGKRQLVSWDLDTSWVDFVQFYIQIGGESASCNKPDSREEGVLLQYSNNGGIQWHLLAEMYFSDFSKPRFVYLELPAAAKTPCTRFRWWQPVFSGEDYDQWAVDDIIILSEKQKQIIPVINPTLPQNFYEKPAFDYPMNQMSVWLMLANEGMVKNETFCAATPSAMIFGKSDGDRFAVTRDLTLKPGYVLQFKLNIGCANQFSSTAPVLLQYSHDAGMSWFLVKEGCYPASAGKGCEGNSRELSEPTMYHTGDFEEWTRITIVIPRSLASSKTRFRWIQESSSQKNVPPFGLDGVYISEPCPSYCSGHGDCISGVCFCDLGYTAAQGTCVSNVPNHNEMFDRFEGKLSPLWYKITGAQVGTGCGTLNDGKSLYFNGPGKREARTVPLDTRNIRLVQFYIQIGSKTSGITCIKPRTRNEGLIVQYSNDNGILWHLLRELDFMSFLEPQIISIDLPQDAKTPATAFRWWQPQHGKHSAQWALDDVLIGMNDSSQTGFQDKFDGSIDLQANWYRIQGGQVDIDCLSMDTALIFTENIGKPRYAETWDFHVSASTFLQFEMSMGCSKPFSNSHSVQLQYSLNNGKDWHLVTEECVPPTIGCLHYTESSIYTSERFQNWKRITVYLPLSTISPRTRFRWIQANYTVGADSWAIDNVVLASGCPWMCSGRGICDAGRCVCDRGFGGPYCVPVVPLPSILKDDFNGNLHPDLWPEVYGAERGNLNGETIKSGTSLIFKGEGLRMLISRDLDCTNTMYVQFSLRFIAKSTPERSHSILLQFSISGGITWHLMDEFYFPQTTNILFINVPLPYTAQTNATRFRLWQPYNNGKKEEIWIVDDFIIDGNNVNNPVMLLDTFDFGPREDNWFFYPGGNIGLYCPYSSKGAPEEDSAMVFVSNEVGEHSITTRDLNVNENTIIQFEINVGCSTDSSSADPVRLEFSRDFGATWHLLLPLCYHSSSHVSSLCSTEHHPSSTYYAGTMQGWRREVVHFGKLHLCGSVRFRWYQGFYPAGSQPVTWAIDNVYIGPQCEEMCNGQGSCINGTKCICDPGYSGPTCKISTKNPDFLKDDFEGQLESDRFLLMSGGKPSRKCGILSSGNNLFFNEDGLRMLMTRDLDLSHARFVQFFMRLGCGKGVPDPRSQPVLLQYSLNGGLSWSLLQEFLFSNSSNVGRYIALEIPLKARSGSTRLRWWQPSENGHFYSPWVIDQILIGGNISGNTVLEDDFTTLDSRKWLLHPGGTKMPVCGSTGDALVFIEKASTRYVVSTDVAVNEDSFLQIDFAASCSVTDSCYAIELEYSVDLGLSWHPLVRDCLPTNVECSRYHLQRILVSDTFNKWTRITLPLPPYTRSQATRFRWHQPAPFDKQQTWAIDNVYIGDGCIDMCSGHGRCIQGNCVCDEQWGGLYCDDPETSLPTQLKDNFNRAPSSQNWLTVNGGKLSTVCGAVASGMALHFSGGCSRLLVTVDLNLTNAEFIQFYFMYGCLITPNNRNQGVLLEYSVNGGITWNLLMEIFYDQYSKPGFVNILLPPDAKEIATRFRWWQPRHDGLDQNDWAIDNVLISGSADQRTVMLDTFSSAPVPQHERSPADAGPVGRIAFDMFMEDKTSVNEHWLFHDDCTVERFCDSPDGVMLCGSHDGREVYAVTHDLTPTEGWIMQFKISVGCKVSEKIAQNQIHVQYSTDFGVSWNYLVPQCLPADPKCSGSVSQPSVFFPTKGWKRITYPLPESLVGNPVRFRFYQKYSDMQWAIDNFYLGPGCLDNCRGHGDCLREQCICDPGYSGPNCYLTHTLKTFLKERFDSEEIKPDLWMSLEGGSTCTECGILAEDTALYFGGSTVRQAVTQDLDLRGAKFLQYWGRIGSENNMTSCHRPICRKEGVLLDYSTDGGITWTLLHEMDYQKYISVRHDYILLPEDALTNTTRLRWWQPFVISNGIVVSGVERAQWALDNILIGGAEINPSQLVDTFDDEGTSHEENWSFYPNAVRTAGFCGNPSFHLYWPNKKKDKTHNALSSRELIIQPGYMMQFKIVVGCEATSCGDLHSVMLEYTKDARSDSWQLVQTQCLPSSSNSIGCSPFQFHEATIYNSVNSSSWKRITIQLPDHVSSSATQFRWIQKGEETEKQSWAIDHVYIGEACPKLCSGHGYCTTGAICICDESFQGDDCSVFSHDLPSYIKDNFESARVTEANWETIQGGVIGSGCGQLAPYAHGDSLYFNGCQIRQAATKPLDLTRASKIMFVLQIGSMSQTDSCNSDLSGPHAVDKAVLLQYSVNNGITWHVIAQHQPKDFTQAQRVSYNVPLEARMKGVLLRWWQPRHNGTGHDQWALDHVEVVL

SEQ ID NO: 8151 - protein, 555 aa, Homo sapiens
MKKHDFAENLPSSLLIIILVIFTLSGSKFGRGTGLTQPSQRTSARRSFGRSKRFSITRSLDDLESATVSDGELTGADLKDCVSNNSLSSNASLPSVQSCRRLRERRVASWAVSFERLLQDPVGVRYFSDFLRKEFSEENILFWQACEYFNHVPAHDKKELSYRAREIFSKFLCSKATTPVNIDSQAQLADDVLRAPHPDMFKEQQLQIFNLMKFDSYTRFLKSPLYQECILAEVEGRALPDSQQVPSSPASKHSLGSDHSSVSTPKKLSGKSKSGRSLNEELGDEDSEKKRKGAFFSWSRTRSTGRSQKKREHGDHADDALHANGGLCRRESQGSVSSAGSLDLSEACRTLAPEKDKATKHCCIHLPDGTSCVVAVKAGFSIKDILSGLCERHGINGAAADLFLVGGDKPLVLHQDSSILESRDLRLEKRTLFRLDLVPINRSVGLKAKPTKPVTEVLRPVVARYGLDLSGLLVRLSGEKEPLDLGAPISSLDGQRVVLEEKDPSRGKASADKQKGVPVKQNTAVNSSSRNHSATSFLSLFPKLRATEQMTNVGC

SEQ ID NO: 8152 - protein, 1376 aa, Homo sapiens
MFRAGEASKRPLPGPSPPRVRSVEVARGRAGYGFTLSGQAPCVLSCVMRGSPADFVGLRAGDQILAVNEINVKKASHEDVVKLIGKCSGVLHMVIAEGVGRFESCSSDEEGGLYEGKGWLKPKLDSKALGINRAERVVEEMQSGGIFNMIFENPSLCASNSEPLKLKQRSLSESAATRFDVGHESINNPNPNMLSKEEISKVIHDDSVFSIGLESHDDFALDASILNVAMIVGYLGSIELPSTSSNLESDSLQAIRGCMRRLRAEQKIHSLVTMKIMHDCVQLSTDKAGVVAEYPAEKLAFSAVCPDDRRFFGLVTMQTNDDGSLAQEEEGALRTSCHVFMVDPDLFNHKIHQGIARRFGFECTADPDTNGCLEFPASSLPVLQFISVLYRDMGELIEGMRARAFLDGDADAHQNNSTSSNSDSGIGNFHQEEKSNRVLVVDLGGSSSRHGPGGSAWDGVGGRGAQPWGAPWTGPFCPDPEGSPPFEAAHQTDRFWDLNKHLGPASPVEVPPASLRSSVPPSKRGTVGAGCGFNQRWLPVHVLREWQCGHTSDQDSYTDSTDGWSSINCGTLPPPMSKIPADRYRVEGSFAQPPLNAPKREWSRKAFGMQSIFGPHRNVRKTKEDKKGSKFGRGTGLTQPSQRTSARRSFGRSKRFSITRSLDDLESATVSDGELTGADLKDCVSNNSLSSNASLPSVQSCRRLRERRVASWAVSFERLLQDPVGVRYFSDFLRKEFSEENILFWQACEYFNHVPAHDKKELSYRAREIFSKFLCSKATTPVNIDSQAQLADDVLRAPHPDMFKEQQLQIFNLMKFDSYTRFLKSPLYQECILAEVEGRALPDSQQVPSSPASKHSLGSDHSSVSTPKKLSGKSKSGRSLNEELGDEDSEKKRKGAFFSWSRTRSTGRSQKKREHGDHADDALHANGGLCRRESQGSVSSAGSLDLSEACRTLAPEKDKATKHCCIHLPDGTSCVVAVKAGFSIKDILSGLCERHGINGAAADLFLVGGDKPLVLHQDSSILESRDLRLEKRTLFRLDLVPINRSVGLKAKPTKPVTEVLRPVVARYGLDLSGLLVRLSGEKEPLDLGAPISSLDGQRVVLEEKDPSRGKASADKQKGVPVKQNTAVNSSSRNHSATGEERTLGKSNSIKIKGENGKNARDPRLSKREESIAKIGKKKYQKINLDEAEEFFELISKAQSNRADDQRGLLRKEDLVLPEFLRLPPGSTELTLPTPAAVAKGFSKRSATGNGRESASQPGEQWEPVQESSDSPSTSPGSASSPPGPPGTTPPGQKSPSGPFCTPQSPVSLAQEGTAQIWKRQSQEVEAGGIQTVEDEHVAELTLMGEGDISSPNSTLLPPPSTPQEVPGPSRPGTSRF

SEQ ID NO: 8153 - protein, 799 aa, Homo sapiens
MNLGKELSNETHVSNDQQSATVSDGELTGADLKDCVSNNSLSSNASLPSVQSCRRLRERRVASWAVSFERLLQDPVGVRYFSDFLRKEFSEENILFWQACEYFNHVPAHDKKELSYRAREIFSKFLCSKATTPVNIDSQAQLADDVLRAPHPDMFKEQQLQIFNLMKFDSYTRFLKSPLYQECILAEVEGRALPDSQQVPSSPASKHSLGSDHSSVSTPKKLSGKSKSGRSLNEELGDEDSEKKRKGAFFSWSRTRSTGRSQKKREHGDHADDALHANGGLCRRESQGSVSSAGSLDLSEACRTLAPEKDKATKHCCIHLPDGTSCVVAVKAGFSIKDILSGLCERHGINGAAADLFLVGGDKPLVLHQDSSILESRDLRLEKRTLFRLDLVPINRSVGLKAKPTKPVTEVLRPVVARYGLDLSGLLVRLSGEKEPLDLGAPISSLDGQRVVLEEKDPSRGKASADKQKGVPVKQNTAVNSSSRNHSATGEERTLGKSNSIKIKGENGKNARDPRLSKREESIAKIGKKKYQKINLDEAEEFFELISKAQSNRADDQRGLLRKEDLVLPEFLRLPPGSTELTLPTPAAVAKGFSKRSATGNGRESASQPGEQWEPVQESSDSPSTSPGSASSPPGPPGTTPPGQKSPSGPFCTPQSPVSLAQEGTAQIWKRQSQEVEAGGIQTVEDEHVAELTLMGEGDISSPNSTLLPPPSTPQEVPGPSRPGSGTHGSRDLPVNRIIDVDLVTGSAPGRDGGIAGAQAGPGRSQASGGPPTSDLPGLGPVPGEPAKPKTSAHHATFV

SEQ ID NO: 8154 - protein, 1447 aa, Homo sapiens
MFRAGEASKRPLPGPSPPRVRSVEVARGRAGYGFTLSGQAPCVLSCVMRGSPADFVGLRAGDQILAVNEINVKKASHEDVVKLIGKCSGVLHMVIAEGVGRFESCSSDEEGGLYEGKGWLKPKLDSKALGINRAERVVEEMQSGGIFNMIFENPSLCASNSEPLKLKQRSLSESAATRFDVGHESINNPNPNMLSKEEISKVIHDDSVFSIGLESHDDFALDASILNVAMIVGYLGSIELPSTSSNLESDSLQAIRGCMRRLRAEQKIHSLVTMKIMHDCVQLSTDKAGVVAEYPAEKLAFSAVCPDDRRFFGLVTMQTNDDGSLAQEEEGALRTSCHVFMVDPDLFNHKIHQGIARRFGFECTADPDTNGCLEFPASSLPVLQFISVLYRDMGELIEGMRARAFLDGDADAHQNNSTSSNSDSGIGNFHQEEKSNRVLVVDLGGSSSRHGPGGSAWDGVGGRGAQPWGAPWTGPFCPDPEGSPPFEAAHQTDRFWDLNKHLGPASPVEVPPASLRSSVPPSKRGTVGAGCGFNQRWLPVHVLREWQCGHTSDQDSYTDSTDGWSSINCGTLPPPMSKIPADRYRVEGSFAQPPLNAPKREWSRKAFGMQSIFGPHRNVRKTKEDKKGSKFGRGTGLTQPSQRTSARRSFGRSKRFSITRSLDDLESATVSDGELTGADLKDCVSNNSLSSNASLPSVQSCRRLRERRVASWAVSFERLLQDPVGVRYFSDFLRKEFSEENILFWQACEYFNHVPAHDKKELSYRAREIFSKFLCSKATTPVNIDSQAQLADDVLRAPHPDMFKEQQLQIFNLMKFDSYTRFLKSPLYQECILAEVEGRALPDSQQVPSSPASKHSLGSDHSSVSTPKKLSGKSKSGRSLNEELGDEDSEKKRKGAFFSWSRTRSTGRSQKKREHGDHADDALHANGGLCRRESQGSVSSAGSLDLSEACRTLAPEKDKATKHCCIHLPDGTSCVVAVKAGFSIKDILSGLCERHGINGAAADLFLVGGDKPLVLHQDSSILESRDLRLEKRTLFRLDLVPINRSVGLKAKPTKPVTEVLRPVVARYGLDLSGLLVRLSGEKEPLDLGAPISSLDGQRVVLEEKDPSRGKASADKQKGVPVKQNTAVNSSSRNHSATGEERTLGKSNSIKIKGENGKNARDPRLSKREESIAKIGKKKYQKINLDEAEEFFELISKAQSNRADDQRGLLRKEDLVLPEFLRLPPGSTELTLPTPAAVAKGFSKRSATGNGRESASQPGEQWEPVQESSDSPSTSPGSASSPPGPPGTTPPGQKSPSGPFCTPQSPVSLAQEGTAQIWKRQSQEVEAGGIQTVEDEHVAELTLMGEGDISSPNSTLLPPPSTPQEVPGPSRPGSGTHGSRDLPVNRIIDVDLVTGSAPGRDGGIAGAQAGPGRSQASGGPPTSDLPGLGPVPGEPAKPKTSAHHATFV

SEQ ID NO: 8155 - protein, 1376 aa, Homo sapiens; identical to SEQ ID NO: 8152

SEQ ID NO: 8156 - protein, 499 aa, Homo sapiens
MSLSLFFQSATVSDGELTGADLKDCVSNNSLSSNASLPSVQSCRRLRERRVASWAVSFERLLQDPVGVRYFSDFLRKEFSEENILFWQACEYFNHVPAHDKKELSYRAREIFSKFLCSKATTPVNIDSQAQLADDVLRAPHPDMFKEQQLQIFNLMKFDSYTRFLKSPLYQECILAEVEGRALPDSQQVPSSPASKHSLGSDHSSVSTPKKLSGKSKSGRSLNEELGDEDSEKKRKGAFFSWSRTRSTGRSQKKREHGDHADDALHANGGLCRRESQGSVSSAGSLDLSEACRTLAPEKDKATKHCCIHLPDGTSCVVAVKAGFSIKDILSGLCERHGINGAAADLFLVGGDKPLVLHQDSSILESRDLRLEKRTLFRLDLVPINRSVGLKAKPTKPVTEVLRPVVARYGLDLSGLLVRLSGEKEPLDLGAPISSLDGQRVVLEEKDPSRGKASADKQKGVPVKQNTAVNSSSRNHSATSFLSLFPKLRATEQMTNVGC

SEQ ID NO: 8157 - protein, 667 aa, Homo sapiens
MFRAGEASKRPLPGPSPPRVRSVEVARGRAGYGFTLSGQAPCVLSCVMRGSPADFVGLRAGDQILAVNEINVKKASHEDVVKLIGKCSGVLHMVIAEGVGRFESCSSDEEGGLYEGKGWLKPKLDSKALGINRAERVVEEMQSGGIFNMIFENPSLCASNSEPLKLKQRSLSESAATRFDVGHESINNPNPNMLSKEEISKVIHDDSVFSIGLESHDDFALDASILNVAMIVGYLGSIELPSTSSNLESDSLQAIRGCMRRLRAEQKIHSLVTMKIMHDCVQLSTDKAGVVAEYPAEKLAFSAVCPDDRRFFGLVTMQTNDDGSLAQEEEGALRTSCHVFMVDPDLFNHKIHQGIARRFGFECTADPDTNGCLEFPASSLPVLQFISVLYRDMGELIEGMRARAFLDGDADAHQNNSTSSNSDSGIGNFHQEEKSNRVLVVDLGGSSSRHGPGGSAWDGVGGRGAQPWGAPWTGPFCPDPEGSPPFEAAHQTDRFWDLNKHLGPASPVEVPPASLRSSVPPSKRGTVGAGCGFNQRWLPVHVLREWQCGHTSDQDSYTDSTDGWSSINCGTLPPPMSKIPADRYRVEGSFAQPPLNAPKREWSRKAFGMQSIFGPHRNVRKTKEDKKGSKFGRGTGLTQPSQRTSARRSFGRSKRFSITRSLDDLES

SEQ ID NO: 8158 - protein, 211 aa, Homo sapiens
MQSAMFLAVQHDCRPMDKSAGSGHKSEEKREKMKRTLLKDWKTRLSYFLQNSSTPGKPKTGKKSKQQAFIKPSPEEAQLWSEAFDELLASKYGLAAFRAFLKSEFCEENIEFWLACEDFKKTKSPQKLSSKARKIYTDFIEKEAPKEINIDFQTKTLIAQNIQEATSGCFTTAQKRVYSLMENNSYPRFLESEFYQDLCKKPQITTEPHAT

SEQ ID NO: 8159 - protein, 1400 aa, Homo sapiens
MPKIVLNGVTVDFPFQPYKCQQEYMTKVLECLQQKVNGILESPTGTGKTLCLLCTTLAWREHLRDGISARKIAERAQGELFPDRALSSWGNAAAAAGDPIACYTDIPKIIYASRTHSQLTQVINELRNTSYRPKVCVLGSREQLCIHPEVKKQESNHLQIHLCRKKVASRSCHFYNNVEEKSLEQELASPILDIEDLVKSGSKHRVCPYYLSRNLKQQADIIFMPYNYLLDAKSRRAHNIDLKGTVVIFDEAHNVEKMCEESASFDLTPHDLASGLDVIDQVLEEQTKAAQQGEPHPEFSADSPSPGLNMELEDIAKLKMILLRLEGAIDAVELPGDDSGVTKPGSYIFELFAEAQITFQTKGCILDSLDQIIQHLAGRAGVFTNTAGLQKLADIIQIVFSVDPSEGSPGSPAGLGALQSYKVHIHPDAGHRRTAQRSDAWSTTAARKRGKVLSYWCFSPGHSMHELVRQGVRSLILTSGTLAPVSSFALEMQIPFPVCLENPHIIDKHQIWVGVVPRGPDGAQLSSAFDRRFSEECLSSLGKALGNIARVVPYGLLIFFPSYPVMEKSLEFWRARDLARKMEALKPLFVEPRSKGSFSETISAYYARVAAPGSTGATFLAVCRGKASEGLDFSDTNGRGVIVTGLPYPPRMDPRVVLKMQFLDEMKGQGGAGGQFLSGQEWYRQQASRAVNQAIGRVIRHRQDYGAVFLCDHRFAFADARAQLPSWVRPHVRVYDNFGHVIRDVAQFFRVAERTMPAPAPRATAPSVRGEDAVSEAKSPGPFFSTRKAKSLDLHVPSLKQRSSGSPAAGDPESSLCVEYEQEPVPARQRPRGLLAALEHSEQRAGSPGEEQAHSCSTLSLLSEKRPAEEPRGGRKKIRLVSHPEEPVAGAQTDRAKLFMVAVKQELSQANFATFTQALQDYKGSDDFAALAACLGPLFAEDPKKHNLLQGFYQFVRPHHKQQFEEVCIQLTGRGCGYRPEHSIPRRQRAQPVLDPTGRTAPDPKLTVSTAAAQQLDPQEHLNQGRPHLSPRPPPTGDPGSQPQWGSGVPRAGKQGQHAVSAYLADARRALGSAGCSQLLAALTAYKQDDDLDKVLAVLAALTTAKPEDFPLLHRFSMFVRPHHKQRFSQTCTDLTGRPYPGMEPPGPQEERLAVPPVLTHRAPQPGPSRSEKTGKTQSKISSFLRQRPAGTVGAGGEDAGPSQSSGPPHGPAASEWGEPHGRDIAGQQATGAPGGPLSAGCVCQGCGAEDVVPFQCPACDFQRCQACWQRHLQASRMCPACHTASRKQSVMQVFWPEPHKDHEGAGGARPVAAVPGVGAACPAAGAGCTRSGRNTHLPLAGRRDRGAAGVRPVPPRHLCAAAVPPRQPHDVWPVSTAPLHAVLELPRALPLLQRPLRGA

SEQ ID NO: 8160 - protein, 545 aa, Homo sapiens
MPAPAPRATAPSVRGEDAVSEAKSPGPFFSTRKAKSLDLHVPSLKQRSSGSPAAGDPESSLCVEYEQEPVPARQRPRGLLAALEHSEQRAGSPGEEQAHSCSTLSLLSEKRPAEEPRGGRKKIRLVSHPEEPVAGAQTDRAKLFMVAVKQELSQANFATFTQALQDYKGSDDFAALAACLGPLFAEDPKKHNLLQGFYQFVRPHHKQQFEEVCIQLTGRGCGYRPEHSIPRRQRAQPVLDPTGRTAPDPKLTVSTAAAQQLDPQEHLNQGRPHLSPRPPPTGDPGSQPQWGSGVPRAGKQGQHAVSAYLADARRALGSAGCSQLLAALTAYKQDDDLDKVLAVLAALTTAKPEDFPLLHRFSMFVRPHHKQRFSQTCTDLTGRPYPGMEPPGPQEERLAVPPVLTHRAPQPGPSRSEKTGKTQSKISSFLRQRPAGTVGAGGEDAGPSQSSGPPHGPAASEWGEPHGRDIAGQQATGAPGGPLSAGCVCQGCGAEDVVPFQCPACDFQRCQACWQRHLQASRMCPACHTASRKQSVMQVFWPEPQ

SEQ ID NO: 8161 - protein, 1219 aa, Homo sapiens
MPKIVLNGVTVDFPFQPYKCQQEYMTKVLECLQQKVNGILESPTGTGKTLCLLCTTLAWREHLRDGISARKIAERAQGELFPDRALSSWGNAAAAAGDPIACYTDIPKIIYASRTHSQLTQVINELRNTSYRPKVCVLGSREQLCIHPEVKKQESNHLQIHLCRKKVASRSCHFYNNVEEKSLEQELASPILDIEDLVKSGSKHRVCPYYLSRNLKQQADIIFMPYNYLLDAKSRRAHNIDLKGTVVIFDEAHNVEKMCEESASFDLTPHDLASGLDVIDQVLEEQTKAAQQGEPHPEFSADSPSPGLNMELEDIAKLKMILLRLEGAIDAVELPGDDSGVTKPGSYIFELFAEAQITFQTKGCILDSLDQIIQHLAGRAGVFTNTAGLQKLADIIQIVFSVDPSEGSPGSPAGLGALQSYKVHIHPDAGHRRTAQRSDAWSTTAARKRGKVLSYWCFSPGHSMHELVRQGVRSLILTSGTLAPVSSFALEMQIPFPVCLENPHIIDKHQIWVGVVPRGPDGAQLSSAFDRRFSEECLSSLGKALGNIARVVPYGLLIFFPSYPVMEKSLEFWRARDLARKMEALKPLFVEPRSKGSFSETISAYYARVAAPGSTGATFLAVCRGKASEGLDFSDTNGRGVIVTGLPYPPRMDPRVVLKMQFLDEMKGQGGAGGQFLSGQEWYRQQASRAVNQAIGRVIRHRQDYGAVFLCDHRFAFADARAQLPSWVRPHVRVYDNFGHVIRDVAQFFRVAERTMPAPAPRATAPSVRGEDAVSEAKSPGPFFSTRKAKSLDLHVPSLKQRSSGSPAAGDPESSLCVEYEQEPVPARQRPRGLLAALEHSEQRAGSPGEEQAHSCSTLSLLSEKRPAEEPRGGRKKIRLVSHPEEPVAGAQTDRAKLFMVAVKQELSQANFATFTQALQDYKGSDDFAALAACLGPLFAEDPKKHNLLQGFYQFVRPHHKQQFEEVCIQLTGRGCGYRPEHSIPRRQRAQPVLDPTGRTAPDPKLTVSTAAAQQLDPQEHLNQGRPHLSPRPPPTGDPGSQPQWGSGVPRAGKQGQHAVSAYLADARRALGSAGCSQLLAALTAYKQDDDLDKVLAVLAALTTAKPEDFPLLHRFSMFVRPHHKQRFSQTCTDLTGRPYPGMEPPGPQEERLAVPPVLTHRAPQPGPSRSEKTGKTQSKISSFLRQRPAGTVGAGGEDAGPSQSSGPPHGPAASEWGL

SEQ ID NO: 8162 - protein, 1243 aa, Homo sapiens
MPKIVLNGVTVDFPFQPYKCQQEYMTKVLECLQQKVNGILESPTGTGKTLCLLCTTLAWREHLRDGISARKIAERAQGELFPDRALSSWGNAAAAAGDPIACYTDIPKIIYASRTHSQLTQVINELRNTSYRSRCRATLWVLETAPPRPTVLSPTRPKVCVLGSREQLCIHPEVKKQESNHLQIHLCRKKVASRSCHFYNNVEEKSLEQELASPILDIEDLVKSGSKHRVCPYYLSRNLKQQADIIFMPYNYLLDAKSRRAHNIDLKGTVVIFDEAHNVEKMCEESASFDLTPHDLASGLDVIDQVLEEQTKAAQQGEPHPEFSADSPSPGLNMELEDIAKLKMILLRLEGAIDAVELPGDDSGVTKPGSYIFELFAEAQITFQTKGCILDSLDQIIQHLAGRAGVFTNTAGLQKLADIIQIVFSVDPSEGSPGSPAGLGALQSYKVHIHPDAGHRRTAQRSDAWSTTAARKRGKVLSYWCFSPGHSMHELVRQGVRSLILTSGTLAPVSSFALEMQIPFPVCLENPHIIDKHQIWVGVVPRGPDGAQLSSAFDRRFSEECLSSLGKALGNIARVVPYGLLIFFPSYPVMEKSLEFWRARDLARKMEALKPLFVEPRSKGSFSETISAYYARVAAPGSTGATFLAVCRGKASEGLDFSDTNGRGVIVTGLPYPPRMDPRVVLKMQFLDEMKGQGGAGGQFLSGQEWYRQQASRAVNQAIGRVIRHRQDYGAVFLCDHRFAFADARAQLPSWVRPHVRVYDNFGHVIRDVAQFFRVAERTMPAPAPRATAPSVRGEDAVSEAKSPGPFFSTRKAKSLDLHVPSLKQRSSGSPAAGDPESSLCVEYEQEPVPARQRPRGLLAALEHSEQRAGSPGEEQAHSCSTLSLLSEKRPAEEPRGGRKKIRLVSHPEEPVAGAQTDRAKLFMVAVKQELSQANFATFTQALQDYKGSDDFAALAACLGPLFAEDPKKHNLLQGFYQFVRPHHKQQFEEVCIQLTGRGCGYRPEHSIPRRQRAQPVLDPTGRTAPDPKLTVSTAAAQQLDPQEHLNQGRPHLSPRPPPTGDPGSQPQWGSGVPRAGKQGQHAVSAYLADARRALGSAGCSQLLAALTAYKQDDDLDKVLAVLAALTTAKPEDFPLLHSNSMFVRPHHKQRFSQTCTDLTGRPYPGMEPPGPQEERLAVPPVLTHRAPQPGPSRSEKTGKTQSKISSFLRQRPAGTVGAGGEDAGPSQSSGPPHGPAASEWGL

SEQ ID NO: 8163 - protein, 1147 aa, Homo sapiens
MDIRKFFGVIPSGKKLVSETVKKNEKTKSDEETLKAKKGIKEIKVNSSRKEDDFKQKQPSKKKRIIYDSDSESEETLQVKNAKKPPEKLPVSSKPGKISRQDPVTYISETDEEDDFMCKKAASKSKENGRSTNSHLGTSNMKKNEENTKTKNKPLSPIKLTPTSVLDYFGTGSVQRSNKKMVASKRKELSQNTDESGLNDEAIAKQLQLDEDAELERQLHEDEEFARTLAMLDEEPKTKKARKDTEAGETFSSVQANLSKAEKHKYPHKVKTAQVSDERKSYSPRKQSKYESSKESQQHSKSSADKIGEVSSPKASSKLAIMKRKEESSYKEIEPVASKRKENAIKLKGETKTPKKTKSSPAKKESVSPEDSEKKRTNYQAYRSYLNREGPKALGSKEIPKGAENCLEGLIFVITGVLESIERDEAKSLIERYGGKVTGNVSKKTNYLVMGRDSGQSKSDKAAALGTKIIDEDGLLNLIRTMPGKKSKYEIAVETEMKKESKLERTPQKNVQGKRKISPSKKESESKKSRPTSKRDSLAKTIKKETDVFWKSLDFKEQVAEETSGDSKARNLADDSSENKVENLLWVDKYKPTSLKTIIGQQGDQSCANKLLRWLRNWQKSSSEDKKHAKFGKFSGKDDGSSFKAALLSGPPGVGKTTTASLVCQELGYSYVELNASDTRSKSSLKAIVAESLNNTSIKGFYSNGAASSVSTKHALIMDEVDGMAGNEDRGGIQELIGLIKHTKIPIICMCNDRNHPKIRSLVHYCFDLRFQRPRVEQIKGAMMSIAFKEGLKIPPPAMNEIILGANQDIRQVLHNLSMWCARSKALTYDQAKADSHRAKKDIKMGPFDVARKVFAAGEETAHMSLVDKSDLFFHDYSIAPLFVQENYIHVKPVAAGGDMKKHLMLLSRAADSICDGDLVDSQIRSKQNWSLLPAQAIYASVLPGELMRGYMTQFPTFPSWLGKHSSTGKHDRIVQDLALHMSLRTYSSKRTVNMDYLSLLRDALVQPLTSQGVDGVQDVVALMDTYYLMKEDFENIMEISSWGGKPSPFSKLDPKVKAAFTRAYNKEAHLTPYSLQAIKASRHSTSPSLDSEYNEELNEDDSQSDEKDQDAIETDAMIKKKTKSSKPSKPEKDKEPRKGKGKSSKK

SEQ ID NO: 8164 - protein, 1148 aa, Homo sapiens
MDIRKFFGVIPSGKKLVSETVKKNEKTKSDEETLKAKKGIKEIKVNSSRKEDDFKQKQPSKKKRIIYDSDSESEETLQVKNAKKPPEKLPVSSKPGKISRQDPVTYISETDEEDDFMCKKAASKSKENGRSTNSHLGTSNMKKNEENTKTKNKPLSPIKLTPTSVLDYFGTGSVQRSNKKMVASKRKELSQNTDESGLNDEAIAKQLQLDEDAELERQLHEDEEFARTLAMLDEEPKTKKARKDTEAGETFSSVQANLSKAEKHKYPHKVKTAQVSDERKSYSPRKQSKYESSKESQQHSKSSADKIGEVSSPKASSKLAIMKRKEESSYKEIEPVASKRKENAIKLKGETKTPKKTKSSPAKKESVSPEDSEKKRTNYQAYRSYLNREGPKALGSKEIPKGAENCLEGLIFVITGVLESIERDEAKSLIERYGGKVTGNVSKKTNYLVMGRDSGQSKSDKAAALGTKIIDEDGLLNLIRTMPGKKSKYEIAVETEMKKESKLERTPQKNVQGKRKISPSKKESESKKSRPTSKRDSLAKTIKKETDVFWKSLDFKEQVAEETSGDSKARNLADDSSENKVENLLWVDKYKPTSLKTIIGQQGDQSCANKLLRWLRNWQKSSSEDKKHAAKFGKFSGKDDGSSFKAALLSGPPGVGKTTTASLVCQELGYSYVELNASDTRSKSSLKAIVAESLNNTSIKGFYSNGAASSVSTKHALIMDEVDGMAGNEDRGGIQELIGLIKHTKIPIICMCNDRNHPKIRSLVHYCFDLRFQRPRVEQIKGAMMSIAFKEGLKIPPPAMNEIILGANQDIRQVLHNLSMWCARSKALTYDQAKADSHRAKKDIKMGPFDVARKVFAAGEETAHMSLVDKSDLFFHDYSIAPLFVQENYIHVKPVAAGGDMKKHLMLLSRAADSICDGDLVDSQIRSKQNWSLLPAQAIYASVLPGELMRGYMTQFPTFPSWLGKHSSTGKHDRIVQDLALHMSLRTYSSKRTVNMDYLSLLRDALVQPLTSQGVDGVQDVVALMDTYYLMKEDFENIMEISSWGGKPSPFSKLDPKVKAAFTRAYNKEAHLTPYSLQAIKASRHSTSPSLDSEYNEELNEDDSQSDEKDQDAIETDAMIKKKTKSSKPSKPEKDKEPRKGKGKSSKK

SEQ ID NO: 8165 - protein, 187 aa, Homo sapiens
PEDSEKKRTNYQAYRSYLNREGPKALGSKEIPKGAENCLEGLIFVITGVLESIERDEAKSLIERYGGKVTGNVSKKTNYLVMGRDSGQSKSDKAAALGTKIIDEDGLLNLIRTMPGKKSKYEIAVETEELGYSYVELNASDTRSKSSLKAIVAESLNNTSIKGFYSNGAASSVSTKHALIMDEVDGM

SEQ ID NO: 8166 - protein, 616 aa, Homo sapiens
MVGQLSEGAIAAIMQKGDTNIKPILQVINIRPITTGNSPPRYRLLMSDGLNTLSSFMLATQLNPLVEEEQLSSNCVCQIHRFIVNTLKDGRRVVILMELEVLKSAEAVGVKIGNPVPYNEGLGQPQVAPPAPAASPAASSRPQPQNGSSGMGSTVSKAYGASKTFGKAAGPSLSHTSGGTQSKVVPIASLTPYQSKWTICARVTNKSQIRTWSNSRGEGKLFSLELVDESGEIRATAFNEQVDKFFPLIEVNKVYYFSKGTLKIANKQFTAVKNDYEMTFNNETSVMPCEDDHHLPTVQFDFTGIDDLENKSKDSLVDIIGICKSYEDATKITVRSNNREVAKRNIYLMDTSGKVVTATLWGEDADKFDGSRQPVLAIKGARVSDFGGRSLSVLSSSTIIANPDIPEAYKLRGWFDAEGQALDGVSISDLKSGGVGGSNTNWKTLYEVKSENLGQGDKPDYFSSVATVVYLRKENCMYQACPTQDCNKKVIDQQNGLYRCEKCDTEFPNFKYRMILSVNIADFQENQWVTCFQESAEAILGQNAAYLGELKDKNEQAFEEVFQNANFRSFIFRVRVKVETYNDESRIKATVMDVKPVDYREYGRRLVMSIRRSALM

SEQ ID NO: 8167 - protein, 121 aa, Homo sapiens
MVDMMDLPRSRINAGMLAQFIDKPVCFVGRLEKIHPTGKMFILSDGEGKNGTIELMEPLDEEISGIVEVVGRVTAKATILCTSYVQFKEDSHPFDLGLYNEAVKIIHDFPQFYPLGIVQHD

SEQ ID NO: 8168 - protein, 121 aa, Homo sapiens; identical to SEQ ID NO: 8167

SEQ ID NO: 8169 - protein, 928 aa, Homo sapiens
MPPKTPRKTAATAAAAAAEPPAPPPPPPPEEDPEQDSGPEDLPLVRLEFEETEEPDFTALCQKLKIPDHVRERAWLTWEKVSSVDGVLGGYIQKKKELWGICIFIAAVDLDEMSFTFTELQKNIEISVHKFFNLLKEIDTSTKVDNAMSRLLKKYDVLFALFSKLERTCELIYLTQPSSSISTEINSALVLKVSWITFLLAKGEVLQMEDDLVISFQLMLCVLDYFIKLSPPMLLKEPYKTAVIPINGSPRTPRRGQNRSARIAKQLENDTRIIEVLCKEHECNIDEVKNVYFKNFIPFMNSLGLVTSNGLPEVENLSKRYEEIYLKNKDLDARLFLDHDKTLQTDSIDSFETQRTPRKSNLDEEVNVIPPHTPVRTVMNTIQQLMMILNSASDQPSENLISYFNNCTVNPKESILKRVKDIGYIFKEKFAKAVGQGCVEIGSQRYKLGVRLYYRVMESMLKSEEERLSIQNFSKLLNDNIFHMSLLACALEVVMATYSRSTSQNLDSGTDLSFPWILNVLNLKAFDFYKVIESFIKAEGNLTREMIKHLERCEHRIMESLAWLSDSPLFDLIKQSKDREGPTDHLESACPLNLPLQNNHTAADMYLSPVRSPKKKGSTTRVNSTANAETQATSAFQTQKPLKSTSLSLFYKKVYRLAYLRLNTLCERLLSEHPELEHIIWTLFQHTLQNEYELMRDRHLDQIMMCSMYGICKVKNIDLKFKIIVTAYKDLPHAVQETFKRVLIKEEEYDSIIVFYNSVFMQRLKTNILQYASTRPPTLSPIPHIPRSPYKFPSSPLRIPGGNIYISPLKSPYKISEGLPTPTKMTPRSRILVSIGESFGTSEKFQKINQMVCNSDRVLKRSAEGSNPPKPLKKLRFDIEGSDEADGSKHLPGESKFQQKLAEMTSTRTRMQKQKMNDSMDTSNKEEK

SEQ ID NO: 8170 - protein, 53 aa, Homo sapiens
MPPKTPRKTAATAAAAAAEPPAPPPPPPPEEDPEQDSGPEDLPLVRGSITNGR

SEQ ID NO: 8171 - protein, 907 aa, Homo sapiens
MPPKTPPPEEDPEQDSGPEDLPLVRLEFEETEEPDFTALCQKLKIPDHVRERAWLTWEKVSSVDGVLGGYIQKKKELWGICIFIAAVDLDEMSFTFTELQKNIEISVHKFFNLLKEIDTSTKVDNAMSRLLKKYDVLFALFSKLERTCELIYLTQPSSSISTEINSALVLKVSWITFLLAKGEVLQMEDDLVISFQLMLCVLDYFIKLSPPMLLKEPYKTAVIPINGSPRTPRRGQNRSARIAKQLENDTRIIEVLCKEHECNIDEVKNVYFKNFIPFMNSLGLVTSNGLPEVENLSKRYEEIYLKNKDLDARLFLDHDKTLQTDSIDSFETQRTPRKSNLDEEVNVIPPHTPVRTVMNTIQQLMMILNSASDQPSENLISYFNNCTVNPKESILKRVKDIGYIFKEKFAKAVGQGCVEIGSQRYKLGVRLYYRVMESMLKSEEERLSIQNFSKLLNDNIFHMSLLACALEVVMATYSRSTSQNLDSGTDLSFPWILNVLNLKAFDFYKVIESFIKAEGNLTREMIKHLERCEHRIMESLAWLSDSPLFDLIKQSKDREGPTDHLESACPLNLPLQNNHTAADMYLSPVRSPKKKGSTTRVNSTANAETQATSAFQTQKPLKSTSLSLFYKKVYRLAYLRLNTLCERLLSEHPELEHIIWTLFQHTLQNEYELMRDRHLDQIMMCSMYGICKVKNIDLKFKIIVTAYKDLPHAVQETFKRVLIKEEEYDSIIVFYNSVFMQRLKTNILQYASTRPPTLSPIPHIPRSPYKFPSSPLRIPGGNIYISPLKSPYKISEGLPTPTKMTPRSRILVSIGESFGTSEKFQKINQMVCNSDRVLKRSAEGSNPPKPLKKLRFDIEGSDEADGSKHLPGESKFQQKLAEMTSTRTRMQKQKMNDSMDTSNKEEK

SEQ ID NO: 8172 - protein, 897 aa, Homo sapiens
MNISGSSCGSPNSADTSSDFKDLWTKLKECHDREVQGLQVKVTKLKQERILDAQRLEEFFTKNQQLREQQKVLHETIKVLEDRLRAGLCDRCAVTEEHMRKKQQEFENIRQQNLKLITELMNERNTLQEENKKLSEQLQQKIENDQQHQAAELECEEDVIPDSPITAFSFSGVNRLRRKENPHVRYIEQTHTKLEHSVCANEMRKVSKSSTHPQHNPNENEILVADTYDQSQSPMAKAHGTSSYTPDKSSFNLATVVAETLGLGVQEESETQGPMSPLGDELYHCLEGNHKKQPFEESTRNTEDSLRFSDSTSKTPPQEELPTRVSSPVFGATSSIKSGLDLNTSLSPSLLQPGKKKHLKTLPFSNTCISRLEKTRSKSEDSALFTHHSLGSEVNKIIIQSSNKQILINKNISESLGEQNRTEYGKDSNTDKHLEPLKSLGGRTSKRKKTEEESEHEVSCPQASFDKENAFPFPMDNQFSMNGDCVMDKPLDLSDRFSAIQRQEKSQGSETSKNKFRQVTLYEALKTIPKGFSSSRKASDGNCTLPKDSPGEPCSQECIILQPLNKCSPDNKPSLQIKEENAVFKIPLRPRESLETENVLDDIKSAGSHEPIKIQTRSDHGGCELASVLQLNPCRTGKIKSLQNNQDVSFENIQWSIDPGADLSQYKMDVTVIDTKDGSQSKLGGETVDMDCTLVSETVLLKMKKQEQKGEKSSNEERKMNDSLEDMFDRTTHEEYESCLADSFSQAADEEEELSTATKKLHTHGDKQDKVKQKAFVEPYFKGDERETSLQNFPHIEVVRKKEERRKLLGHTCKECEIYYADMPAEEREKKLASCSRHRFRYIPPNTPENFWEVGFPSTQTCMERGYIKEDLDPCPRPKRRQPYNAIFSPKGKEQKT

SEQ ID NO: 8173 - protein, 902 aa, Homo sapiens
MNISGSSCGSPNSADTSSDFKDLWTKLKECHDREVQGLQVKVTKLKQERILDAQRLEEFFTKNQQLREQQKVLHETIKVLEDRLRAGLCDRCAVTEEHMRKKQQEFENIRQQNLKLITELMNERNTLQEENKKLSEQLQQKIENDQQHQAAELECEEDVIPDSPITAFSFSGVNRLRRKENPHVRYIEQTHTKLEHSVCANEMRKVSKSSTHPQHNPNENEILVADTYDQSQSPMAKAHGTSSYTPDKSSFNLATVVAETLGLGVQEESETQGPMSPLGDELYHCLEGNHKKQPFEESTRNTEDSLRFSDSTSKTPPQEELPTRVSSPVFGATSSIKSGLDLNTSLSPSLLQPGKKKHLKTLPFSNTCISRLEKTRSKSEDSALFTHHSLGSEVNKIIIQSSNKQILINKNISESLGEQNRTEYGKDSNTDKHLEPLKSLGGRTSKRKKTEEESEHEVSCPQASFDKENAFPFPMDNQFSMNGDCVMDKPLDLSDRFSAIQRQEKSQGSETSKNKFRQVTLYEALKTIPKGFSSSRKASDGNCTLPKDSPGEPCSQECIILQPLNKCSPDNKPSLQIKEENAVFKIPLRPRESLETENVLDDIKSAGSHEPIKIQTRSDHGGCELASVLQLNPCRTGKIKSLQNNQDVSFENIQWSIDPGADLSQYKMDVTVIDTKDGSQSKLGGETVDMDCTLVSETVLLKMKKQEQKGEKSSMLFYIDEERKMNDSLEDMFDRTTHEEYESCLADSFSQAADEEEELSTATKKLHTHGDKQDKVKQKAFVEPYFKGDERETSLQNFPHIEVVRKKEERRKLLGHTCKECEIYYADMPAEEREKKLASCSRHRFRYIPPNTPENFWEVGFPSTQTCMERGYIKEDLDPCPRPKRRQPYNAIFSPKGKEQKT

SEQ ID NO: 8174 - protein, 865 aa, Homo sapiens
MNISGSSCGSPNSADTSSDFKDLWTKLKECHDREVQGLQVKVTKLKQERILDAQRLEEFFTKNQQLREQQKVLHETIKVLEDRLRAGLCDRCAVTEEHMRKKQQEFENIRQQNLKLITELMNERNTLQEENKKLSEQLQQKIENDQQHQAAELECEEDVIPDSPITAFSFSGVNRLRRKENPHVRYIEQTHTKLEHSVCANEMRKVSKSSTHPQHNPNENEILVADTYDQSQSPMAKAHGTSSYTPDKSSFNLATVVAETLGLGVQEESETQGPMSPLGDELYHCLEGNHKKQPFEESTRNTEDSLRFSDSTSKTPPQEELPTRVSSPVFGATSSIKSGLDLNTSLSPSLLQPGKKKHLKTLPFSNTCISRLEKTRSKSEDSALFTHHSLGSEVNKIIIQSSNKQILINKNISESLGEQNRTEYGKDSNTDKHLEPLKSLGGRTSKRKKTEEESEHEVSCPQASFDKENAFPFPMDNQFSMNGDCVMDKPLDLSDRFSAIQRQEKSQGSETSKNKFRQVTLYEALKTIPKGFSSSRKASDGNCTLPKDSPGEPCSQECIILQPLNKCSPDNKPSLQIKEENAVFKIPLRPRESLETENVLDDIKSAGSHEPIKIQTRSDHGGCELASVLQLNPCRTGKIKSLQNNQDVSFENIQWSIDPGADLSQYKMDVTVIDTKDGSQSKLGGETVDMDCTLVSETVLLKMKKQEQKGEKSSNEERKMNDSLEDMFDRTTHEEYESCLADSFSQAADEEEELSTATKKLHTHGDKQDKVKQKAFVEPYFKGDESIMQICQQKKEKRNWLPAQDTDSATFHPTHQRIFGKLVFLPLRLVWKEVILRKILILVLVQKDVSLTTQYFLQKARSRRH

SEQ ID NO: 8175 - protein, 897 aa, Homo sapiens; identical to SEQ ID NO: 8172

SEQ ID NO: 8176 - protein, 867 aa, Homo sapiens
MNISGSSCGSPNSADTSSDFKDLWTKLKECHDREVQGLQVKVTKLKQERILDAQRLEEFFTKNQQLREQQKVLHETIKVLEDRLRAGLCDRCAVTEEHMRKKQQEFENIRQQNLKLITELMNERNTLQEENKKLSEQLQQKIENDQQHQAAELECEEDVIPDSPITAFSFSGVNRLRRKENPHVRYIEQTHTKLEHSVCANEMRKVSKSSTHPQHNPNENEILVADTYDQSQSPMAKAHGTSSYTPDKSSFNLATVVAETLGLGVQEESETQGPMSPLGDELYHCLEGNHKKQPFEESTRNTEDSLRFSDSTSKTPPQEELPTRVSSPVFGATSSIKSGLDLNTSLSPSLLQPGKKKHLKTLPFSNTCISRLEKTRSKSEDSALFTHHSLGSEVNKIIIQSSNKQILINKNISESLGEQNRTEYGKDSNTDKHLEPLKSLGGRTSKRKKTEEESEHEVSCPQASFDKENAFPFPMDNQFSMNGDCVMDKPLDLSDRFSAIQRQEKSQGSETSKNKFRQVTLYEALKTIPKGFSSSRKASDGNCTLPKDSPGEPCSQECIILQPLNKCSPDNKPSLQIKEENAVFKIPLRPRESLETENVLDDIKSAGSHEPIKIQTRSDHGGCELASVLQLNPCRTGKIKSLQNNQDVSFENIQWSIDPGADLSQYKMDVTVIDTKDGSQSKLGGETVDMDCTLVSETVLLKMKKQEQKGEKSSNEERKMNDSLEDMFDRTTHEEYESCLADSFSQAADEEEELSTATKKLHTHGDKQDKVKQKAFVEPYFKGDESIMQICQQKKEKRNWLPAQDTDSATFHPTHQRIFGKLVFLPLRLVWKEVILRKILILVLVQKDVSLTTQYFLQKARSRRHRR

SEQ ID NO: 8177 - protein, 1014 aa, Homo sapiens
MFEDKPHAEGAAVVAAAGEALQALCQELNLDEGSAAEALDDFTAIRGNYSLEGEVTHWLACSLYVACRKSIIPTVGKGIMEGNCVSLTRILRSAKLSLIQFFSKMKKWMDMSNLPQEFRERIERLERNFEVSTVIFKKYEPIFLDIFQNPYEEPPKLPRSRKQRRIPCSVKDLFNFCWTLFVYTKGNFRMIGDDLVNSYHLLLCCLDLIFANAIMCPNRQDLLNPSFKGLPSDFHTADFTASEEPPCIIAVLCELHDGLLVEAKGIKEHYFKPYISKLFDRKILKGECLLDLSSFTDNSKAVNKEYEEYVLTVGDFDERIFLGADAEEEIGTPRKFTRDTPLGKLTAQANVEYNLQQHFEKKRSFAPSTPLTGRRYLREKEAVITPVASATQSVSRLQSIVAGLKNAPSDQLINIFESCVRNPVENIMKILKGIGETFCQHYTQSTDEQPGSHIDFAVNRLKLAEILYYKILETVMVQETRRLHGMDMSVLLEQDIFHRSLMACCLEIVLFAYSSPRTFPWIIEVLNLQPFYFYKVIEVVIRSEEGLSRDMVKHLNSIEEQILESLAWSHDSALWEALQVSANKVPTCEEVIFPNNFETGNGGNVQGHLPLMPMSPLMHPRVKEVRTDSGSLRRDMQPLSPISVHERYSSPTAGSAKRRLFGEDPPKEMLMDKIITEGTKLKIAPSSSITAENVSILPGQTLLTMATAPVTGTTGHKVTIPLHGVANDAGEITLIPLSMNTNQESKVKSPVSLTAHSLIGASPKQTNLTKAQEVHSTGINRPKRTGSLALFYRKVYHLASVRLRDLCLKLDVSNELRRKIWTCFEFTLVHCPDLMKDRHLDQLLLCAFYIMAKVTKEERTFQEIMKSYRNQPQANSHVYRSVLLKSIPREVVAYNKNINDDFEMIDCDLEDATKTPDCSSGPVKEERGDLIKFYNTIYVGRVKSFALKYDLANQDHMMDAPPLSPFPHIKQQPGSPRRISQQHSIYISPHKNGSGLTPRSALLYKFNGSPSKVR

SEQ ID NO: 8178 - protein, 1068 aa, Homo sapiens
MFEDKPHAEGAAVVAAAGEALQALCQELNLDEGSAAEALDDFTAIRGNYSLEGEVTHWLACSLYVACRKSIIPTVGKGIMEGNCVSLTRILRSAKLSLIQFFSKMKKWMDMSNLPQEFRERIERLERNFEVSTVIFKKYEPIFLDIFQNPYEEPPKLPRSRKQRRIPCSVKDLFNFCWTLFVYTKGNFRMIGDDLVNSYHLLLCCLDLIFANAIMCPNRQDLLNPSFKGLPSDFHTADFTASEEPPCIIAVLCELHDGLLVEAKGIKEHYFKPYISKLFDRKILKGECLLDLSSFTDNSKAVNKEYEEYVLTVGDFDERIFLGADAEEEIGTPRKFTRDTPLGKLTAQANVEYNLQQHFEKKRSFAPSTPLTGRRYLREKEAVITPVASATQSVSRLQSIVAGLKNAPSDQLINIFESCVRNPVENIMKILKGIGETFCQHYTQSTDEQPGSHIDFAVNRLKLAEILYYKILETVMVQETRRLHGMDMSVLLEQDIFHRSLMACCLEIVLFAYSSPRTFPWIIEVLNLQPFYFYKVIEVVIRSEEGLSRDMVKHLNSIEEQILESLAWSHDSALWEALQVSANKVPTCEEVIFPNNFETGNGGNVQGHLPLMPMSPLMHPRVKEVRTDSGSLRRDMQPLSPISVHERYSSPTAGSAKRRLFGEDPPKEMLMDKIITEGTKLKIAPSSSITAENVSILPGQTLLTMATAPVTGTTGHKVTIPLHGVANDAGEITLIPLSMNTNQESKVKSPVSLTAHSLIGASPKQTNLTKAQEVHSTGINRPKRTGSLALFYRKVYHLASVRLRDLCLKLDVSNELRRKIWTCFEFTLVHCPDLMKDRHLDQLLLCAFYIMAKVTKEERTFQEIMKSYRNQPQANSHVYRSVLLKSIPREVVAYNKNINDDFEMIDCDLEDATKTPDCSSGPVKEERGDLIKFYNTIYVGRVKSFALKYDLANQDHMMDAPPLSPFPHIKQQPGSPRRISQQHSIYISPHKNGSGLTPRSALLYKFNGSPSKSLKDINNMIRQGEQRTKKRVIAIDSDAESPAKRVCQENDDVLLKRLQDVVSERANH

SEQ ID NO: 8179 - protein, 1139 aa, Homo sapiens
MPSGGDQSPPPPPPPPAAAASDEEEEDDGEAEDAAPPAESPTPQIQQRFDELCSRLNMDEAARAEAWDSYRSMSESYTLEGNDLHWLACALYVACRKSVPTVSKGTVEGNYVSLTRILKCSEQSLIEFFNKMKKWEDMANLPPHFRERTERLERNFTVSAVIFKKYEPIFQDIFKYPQEEQPRQQRGRKQRRQPCTVSEIFHFCWVLFIYAKGNFPMISDDLVNSYHLLLCALDLVYGNALQCSNRKELVNPNFKGLSEDFHAKDSKPSSDPPCIIEKLCSLHDGLVLEAKGIKEHFWKPYIRKLYEKKLLKGKEENLTGFLEPGNFGESFKAINKAYEEYVLSVGNLDERIFLGEDAEEEIGTLSRCLNAGSGTETAERVQMKNILQQHFDKSKALRISTPLTGVRYIKENSPCVTPVSTATHSLSRLHTMLTGLRNAPSEKLEQILRTCSRDPTQAIANRLKEMFEIYSQHFQPDEDFSNCAKEIASKHFRFAEMLYYKVLESVIEQEQKRLGDMDLSGILEQDAFHRSLLACCLEVVTFSYKPPGNFPFITEIFDVPLYHFYKVIEVFIRAEDGLCREVVKHLNQIEEQILDHLAWKPESPLWEKIRDNENRVPTCEEVMPPQNLERADEICIAGSPLTPRRVTEVRADTGGLGRSITSPTTLYDRYSSPPASTTRRRLFVENDSPSDGGTPGRMPPQPLVNAVPVQNVSGETVSVTPVPGQTLVTMATATVTANNGQTVTIPVQGIANENGGITFFPVQVNVGGQAQAVTGSIQPLSAQALAGSLSSQQVTGTTLQVPGQVAIQQISPGGQQQKQGQSVTSSSNRPRKTSSLSLFFRKVYHLAAVRLRDLCAKLDISDELRKKIWTCFEFSIIQCPELMMDRHLDQLLMCAIYVMAKVTKEDKSFQNIMRCYRTQPQARSQVYRSVLIKGKRKRRNSGSSDSRSHQNSPTELNKDRTSRDSSPVMRSSSTLPVPQPSSAPPTPTRLTGANSDMEEEERGDLIQFYNNIYIKQIKTFAMKYSQANMDAPPLSPYPFVRTGSPRRIQLSQNHPVYISPHKNETMLSPREKIFYYFSNSPSKRLREINSMIRTGETPTKKRGILLEDGSESPAKRICPENHSALLRRLQDVANDRGSH

SEQ ID NO: 8180 - protein, 849 aa, Homo sapiens
MESRCVAQAGMQWHDLGSLQPLPPRFKRFFCLSLLSSCEYSKAINKAYEEYVLSVGNLDERIFLGEDAEEEIGTLSRCLNAGSGTETAERVQMKNILQQHFDKSKALRISTPLTGVRYIKENSPCVTPVSTATHSLSRLHTMLTGLRNAPSEKLEQILRTCSRDPTQAIANRLKEMFEIYSQHFQPDEDFSNCAKEIASKHFRFAEMLYYKVLESVIEQEQKRLGDMDLSGILEQDAFHRSLLACCLEVVTFSYKPPGNFPFITEIFDVPLYHFYKVIEVFIRAEDGLCREVVKHLNQIEEQILDHLAWKPESPLWEKIRDNENRVPTCEEVMPPQNLERADEICIAGSPLTPRRVTEVRADTGGLGRSITSPTTLYDRYSSPPASTTRRRLFVENDSPSDGGTPGRMPPQPLVNAVPVQNVSGETVSVTPVPGQTLVTMATATVTANNGQTVTIPVQGIANENGGITFFPVQVNVGGQAQAVTGSIQPLSAQALAGSLSSQQVTGTTLQVPGQVAIQQISPGGQQQKQGQSVTSSSNRPRKTSSLSLFFRKVYHLAAVRLRDLCAKLDISDELRKKIWTCFEFSIIQCPELMMDRHLDQLLMCAIYVMAKVTKEDKSFQNIMRCYRTQPQARSQVYRSVLIKGKRKRRNSGSSDSRSHQNSPTELNKDRTSRDSSPVMRSSSTLPVPQPSSAPPTPTRLTGANSDMEEEERGDLIQFYNNIYIKQIKTFAMKYSQANMDAPPLSPYPFVRTGSPRRIQLSQNHPVYISPHKNETMLSPREKIFYYFSNSPSKRLREINSMIRTGETPTKKRGILLEDGSESPAKRICPENHSALLRRLQDVANDRGSH

SEQ ID NO: 8181 - protein, 555 aa, Homo sapiens
MQSLTKGNDLHWLACALYVACRKSVPTVSKGTVEGNYVSLTRILKCSEQSLIEFFNKMKKWEDMANLPPHFRERTERLERNFTVSAVIFKKYEPIFQDIFKYPQEEQPRQQRGRKQRRQPCTVSEIFHFCWVLFIYAKGNFPMISDDLVNSYHLLLCALDLVYGNALQCSNRKELVNPNFKGLSEDFHAKDSKPSSDPPCIIEKLCSLHDGLVLEAKGIKEHFWKPYIRKLYEKKLLKGKEENLTGFLEPGNFGESFKAINKAYEEYVLSVGNLDERIFLGEDAEEEIGTLSRCLNAGSGTETAERVQMKNILQQHFDKSKALRISTPLTGVRYIKENSPCVTPVSTATHSLSRLHTMLTGLRNAPSEKLEQILRTCSRDPTQAIANRLKEMFEIYSQHFQPDEDFSNCAKEIASKHFRFAEMLYYKVLESVIEQEQKRLGDMDLSGILEQDAFHRSLLACCLEVVTFSYKPPGNFPFITEIFDVPLYHFYKVIEVFIRAEDGLCREVVKHLNQIEEQILDHLAWKPESPLWEKIRDNENRVPTCEEVMPPQNLE

SEQ ID NO: 8182 - protein, 518 aa, Homo sapiens
MISDDLVNSYHLLLCALDLVYGNALQCSNRKELVNPNFKGLSEDFHAKDSKPSSDPPCIIEKLCSLHDGLVLEAKGIKEHFWKPYIRKLYEKKLLKGKEENLTGFLEPGNFGESFKAINKAYEEYVLSVGNLDERIFLGEDAEEEIGTLSRCLNAGSGTETAERVQMKNILQQHFDKSKALRISTPLTGVRYIKENSPCVTPVSTATHSLSRLHTMLTGLRNAPSEKLEQILRTCSRDPTQAIANRLKEMFEIYSQHFQPDEDFSNCAKEIASKHFRFAEMLYYKVLESVIEQEQKRLGDMDLSGILEQDAFHRSLLACCLEVVTFSYKPPGNFPFITEIFDVPLYHFYKVIEVFIRAEDGLCREVVKHLNQIEEQILDHLAWKPESPLWEKIRDNENRVPTCEEVMPPQNLERADEICIAGSPRRIQLSQNHPVYISPHKNETMLSPREKIFYYFSNSPSKRLREINSMIRTGETPTKKRGILLEDGSESPAKRICPENHSALLRRLQDVANDRGSH

SEQ ID NO: 8183 - protein, 448 aa, Homo sapiens
MFDCMDVLSVSPGQILDFYTASPSSCMLQEKALKACFSGLTQTEWQHRHTAQSIETQSTSSEELVPSPPSPLPPPRVYKPCFVCQDKSSGYHYGVSACEGCKGFFRRSIQKNMIYTCHRDKNCVINKVTRNRCQYCRLQKCFEVGMSKESVRNDRNKKKKETSKQECTESYEMTAELDDLTEKIRKAHQETFPSLCQLGKYTTNSSADHRVRLDLGLWDKFSELATKCIIKIVEFAKRLPGFTGLTIADQITLLKAACLDILILRICTRYTPEQDTMTFSDGLTLNRTQMHNAGFGPLTDLVFTFANQLLPLEMDDTETGLLSAICLICGDRQDLEEPTKVDKLQEPLLEALKIYIRKRRPSKPHMFPKILMKITDLRSISAKGAERVITLKMEIPGSMPPLIQEMLENSEGHEPLTPSSSGNTAEHSPSISPSSVENSGVSQSPLVQ

SEQ ID NO: 8184 - protein, 455 aa, Homo sapiens
MTTSGHACPVPAVNGHMTHYPATPYPLLFPPVIGGLSLPPLHGLHGHPPPSGCSTPSPATIETQSTSSEELVPSPPSPLPPPRVYKPCFVCQDKSSGYHYGVSACEGCKGFFRRSIQKNMIYTCHRDKNCVINKVTRNRCQYCRLQKCFEVGMSKESVRNDRNKKKKETSKQECTESYEMTAELDDLTEKIRKAHQETFPSLCQLGKYTTNSSADHRVRLDLGLWDKFSELATKCIIKIVEFAKRLPGFTGLTIADQITLLKAACLDILILRICTRYTPEQDTMTFSDGLTLNRTQMHNAGFGPLTDLVFTFANQLLPLEMDDTETGLLSAICLICGDRQDLEEPTKVDKLQEPLLEALKIYIRKRRPSKPHMFPKILMKITDLRSISAKGAERVITLKMEIPGSMPPLIQEMLENSEGHEPLTPSSSGNTAEHSPSISPSSVENSGVSQSPLVQ

SEQ ID NO: 8185 - protein, 336 aa, Homo sapiens
MIYTCHRDKNCVINKVTRNRCQYCRLQKCFEVGMSKESVRNDRNKKKKETSKQECTESYEMTAELDDLTEKIRKAHQETFPSLCQLGKYTTNSSADHRVRLDLGLWDKFSELATKCIIKIVEFAKRLPGFTGLTIADQITLLKAACLDILILRICTRYTPEQDTMTFSDGLTLNRTQMHNAGFGPLTDLVFTFANQLLPLEMDDTETGLLSAICLICGDRQDLEEPTKVDKLQEPLLEALKIYIRKRRPSKPHMFPKILMKITDLRSISAKGAERVITLKMEIPGSMPPLIQEMLENSEGHEPLTPSSSGNTAEHSPSISPSSVENSGVSQSPLVQ

SEQ ID NO: 8186 - protein, 336 aa, Homo sapiens; identical to SEQ ID NO: 8185

SEQ ID NO: 8187 - protein, 441 aa, Homo sapiens
MTTSGHACPVPAVNGHMTHYPATPYPLLFPPVIGGLSLPPLHGLHGHPPPSGCSTPSPATIETQSTSSEELVPSPPSPLPPPRVYKPCFVCQDKSSGYHYGVSACEGCKGFFRRSIQKNMIYTCHRDKNCVINKVTRNRCQYCRLQKCFEVGMSKESVRNDRNKKKKETSKQECTESYEMTAELDDLTEKIRKAHQETFPSLCQLGKYTTNSSADHRVRLDLGLWDKFSELATKCIIKIVEFAKRLPGFTGLTIADQITLLKAACLDILILRICTRYTPEQDTMTFSDGLTLNRTQMHNAGFGPLTDLVFTFANQLLPLEMDDTETGLLSAICLICGDRQDLEEPTKVDKLQEPLLEALKIYIRKRRPSKPHMFPKILMKITDLRSISAKGAERVITLKMEIPEGHEPLTPSSSGNTAEHSPSISPSSVENSGVSQSPLVQ

SEQ ID NO: 8188 - protein, 153 aa, Homo sapiens
MDPPAGFVRAGNPAVAAPQSPLSPEGAHFRAAHHPRSTGSRCPGSLQPSRPLVANWLQSLPEMPVDFTGYWKMLVNENFEEYLRALDVNVALRKIANLLKPDKEIVQDGDHMIIRTLSTFRNYIMDFQVGKEFEEDLTGIDDRKCMSETGFSS

SEQ ID NO: 8189 - protein, 197 aa, Homo sapiens
MDPPAGFVRAGNPAVAAPQSPLSPEGAHFRAAHHPRSTGSRCPGSLQPSRPLVANWLQSLPEMPVDFTGYWKMLVNENFEEYLRALDVNVALRKIANLLKPDKEIVQDGDHMIIRTLSTFRNYIMDFQVGKEFEEDLTGIDDRKCMTTVSWDGDKLQCVQKGEKEGRGWTQWIEGDELHLEMRVEGVVCKQVFKKVQ

SEQ ID NO: 8190 - protein, 157 aa, Homo sapiens
MDPPAGFVRAGNPAVAAPQSPLSPEGAHFRAAHHPRSTGSRCPGSLQPSRPLVANWLQSLPEMPVDFTGYWKMLVNENFEEYLRALDVNVALRKIANLLKPDKEIVQDGDHMIIRTLSTFRNYIMDFQVGKEFEEDLTGIDDRKCMAGVQSRDLSSL

SEQ ID NO: 8191 - protein, 1251 aa, Homo sapiens
MRRGGWRKRAENDGWETWGGYMAAKVQKLEEQFRSDAAMQKDGTSSTIFSGVAIYVNGYTDPSAEELRKLMMLHGGQYHVYYSRSKTTHIIATNLPNAKIKELKGEKVIRPEWIVESIKAGRLLSYIPYQLYTKQSSVQKGLSFNPVCRPEDPLPGPSNIAKQLNNRVNHIVKKIETENEVKVNGMNSWNEEDENNDFSFVDLEQTSPGRKQNGIPHPRGSTAIFNGHTPSSNGALKTQDCLVPMVNSVASRLSPAFSQEEDKAEKSSTDFRDCTLQQLQQSTRNTDALRNPHRTNSFSLSPLHSNTKINGAHHSTVQGPSSTKSTSSVSTFSKAAPSVPSKPSDCNFISNFYSHSRLHHISMWKCELTEFVNTLQRQSNGIFPGREKLKKMKTGRSALVVTDTGDMSVLNSPRHQSCIMHVDMDCFFVSVGIRNRPDLKGKPVAVTSNRGTGRAPLRPGANPQLEWQYYQNKILKGKAADIPDSSLWENPDSAQANGIDSVLSRAEIASCSYEARQLGIKNGMFFGHAKQLCPNLQAVPYDFHAYKEVAQTLYETLASYTHNIEAVSCDEALVDITEILAETKLTPDEFANAVRMEIKDQTKCAASVGIGSNILLARMATRKAKPDGQYHLKPEEVDDFIRGQLVTNLPGVGHSMESKLASLGIKTCGDLQYMTMAKLQKEFGPKTGQMLYRFCRGLDDRPVRTEKERKSVSAEINYGIRFTQPKEAEAFLLSLSEEIQRRLEATGMKGKRLTLKIMVRKPGAPVETAKFGGHGICDNIARTVTLDQATDNAKIIGKAMLNMFHTMKLNISDMRGVGIHVNQLVPTNLNPSTCPSRPSVQSSHFPSGSYSVRDVFQVQKAKKSTEEEHKEVFRAAVDLEISSASRTCTFLPPFPAHLPTSPDTNKAESSGKWNGLHTPVSVQSRLNLSIEVPSPSQLDQSVLEALPPDLREQVEQVCAVQQAESHGDKKKEPVNGCNTGILPQPVGTVLLQIPEPQESNSDAGINLIALPAFSQVDPEVFAALPAELQRELKAAYDQRQRQGENSTHQQSASASVPKNPLLHLKAAVKEKKRNKKKKTIGSPKRIQSPLNNKLLNSPAKTLPGACGSPQKLIDGFLKHEGPPAEKPLEELSASTSGVPGLSSLQSDPAGCVRPPAPNLAGAVEFNDVKTLLREWITTISDPMEEDILQVVKYCTDLIEEKDLEKLDLVIKYMKRLMQQSVESVWNMAFDFILDNVQVVLQQTYGSTLKVT

SEQ ID NO: 8192 - protein, 1250 aa, Homo sapiens
MRRGGWRKRAENDGWETWGGYMAAKVQKLEEQFRSDAAMQKDGTSSTIFSGVAIYVNGYTDPSAEELRKLMMLHGGQYHVYYSRSKTTHIIATNLPNAKIKELKGEKVIRPEWIVESIKAGRLLSYIPYQLYTKQSSVQKGLSFNPVCRPEDPLPGPSNIAKQLNNRVNHIVKKIETENEVKVNGMNSWNEEDENNDFSFVDLEQTSPGRKQNGIPHPRGSTAIFNGHTPSSNGALKTQDCLVPMVNSVASRLSPAFSQEEDKAEKSSTDFRDCTLQQLQQSTRNTDALRNPHRTNSFSLSPLHSNTKINGAHHSTVQGPSSTKSTSSVSTFSKAAPSVPSKPSDCNFISNFYSHSRLHHISMWKCELTEFVNTLQRQSNGIFPGREKLKKMKTGRSALVVTDTGDMSVLNSPRHQSCIMHVDMDCFFVSVGIRNRPDLKGKPVAVTSNRGTGRAPLRPGANPQLEWQYYQNKILKGKADIPDSSLWENPDSAQANGIDSVLSRAEIASCSYEARQLGIKNGMFFGHAKQLCPNLQAVPYDFHAYKEVAQTLYETLASYTHNIEAVSCDEALVDITEILAETKLTPDEFANAVRMEIKDQTKCAASVGIGSNILLARMATRKAKPDGQYHLKPEEVDDFIRGQLVTNLPGVGHSMESKLASLGIKTCGDLQYMTMAKLQKEFGPKTGQMLYRFCRGLDDRPVRTEKERKSVSAEINYGIRFTQPKEAEAFLLSLSEEIQRRLEATGMKGKRLTLKIMVRKPGAPVETAKFGGHGICDNIARTVTLDQATDNAKIIGKAMLNMFHTMKLNISDMRGVGIHVNQLVPTNLNPSTCPSRPSVQSSHFPSGSYSVRDVFQVQKAKKSTEEEHKEVFRAAVDLEISSASRTCTFLPPFPAHLPTSPDTNKAESSGKWNGLHTPVSVQSRLNLSIEVPSPSQLDQSVLEALPPDLREQVEQVCAVQQAESHGDKKKEPVNGCNTGILPQPVGTVLLQIPEPQESNSDAGINLIALPAFSQVDPEVFAALPAELQRELKAAYDQRQRQGENSTHQQSASASVPKNPLLHLKAAVKEKKRNKKKKTIGSPKRIQSPLNNKLLNSPAKTLPGACGSPQKLIDGFLKHEGPPAEKPLEELSASTSGVPGLSSLQSDPAGCVRPPAPNLAGAVEFNDVKTLLREWITTISDPMEEDILQVVKYCTDLIEEKDLEKLDLVIKYMKRLMQQSVESVWNMAFDFILDNVQVVLQQTYGSTLKVT

SEQ ID NO: 8193 - protein, 971 aa, Homo sapiens
MATVRASLRGALLLLLAVAGVAEVAGGLAPGSAGALCCNHSKDNQMCRDVCEQIFSSKSESRLKHLLQRAPDYCPETMVEIWNCMNSSLPGVFKKSDGWVGLGCCELAIALECRQACKQASSKNDISKVCRKEYENALFSCISRNEMGSVCCSYAGHHTNCREYCQAIFRTDSSPGPSQIKAVENYCASISPQLIHCVNNYTQSYPMRNPTDSLYCCDRAEDHACQNACKRILMSKKTEMEIVDGLIEGCKTQPLPQDPLWQCFLESSQSVHPGVTVHPPPSTGLDGAKLHCCSKANTSTCRELCTKLYSMSWGNTQSWQEFDRFCEYNPVEVSMLTCLADVREPCQLGCRNLTYCTNFNNRPTELFRSCNAQSDQGAMNDMKLWEKGSIKMPFINIPVLDIKKCQPEMWKAIACSLQIKPCHSKSRGSIICKSDCVEILKKCGDQNKFPEDHTAESICELLSPTDDLKNCIPLDTYLRPSTLGNIVEEVTHPCNPNPCPANELCEVNRKGCPSGDPCLPYFCVQGCKLGEASDFIVRQGTLIQVPSSAGEVGCYKICSCGQSGLLENCMEMHCIDLQKSCIVGGKRKSHGTSFSIDCNVCSCFAGNLVCSTRLCLSEHSSEDDRRTFTGLPCNCADQFVPVCGQNGRTYPSACIARCVGLQDHQFEFGSCMSKDPCNPNPCQKNQRCIPKPQVCLTTFDKFGCSQYECVPRQLACDQVQDPVCDTDHMEHNNLCTLYQRGKSLSYKGPCQPFCRATEPVCGHNGETYSSVCAAYSDRVAVDYYGDCQAVGVLSEHSSVAECASVKCPSLLAAGCKPIIPPGACCPLCAGMLRVLFDKEKLDTIAKVTNKKPITVLEILQKIRMHVSVPQCDVFGYFSIESEIVILIIPVDHYPKALQIEACNKEAEKIESLINSDSPTLASHVPLSALIISQVQVSSSVPSAGVRARPSCHSLLLPLSLGLALHLLWTYN

SEQ ID NO: 8194 - protein, 244 aa, Homo sapiens
MKERRASQKLSSKSIMDPNQNVKCKIVVVGDSQCGKTALLHVFAKDCFPENYVPTVFENYTASFEIDTQRIELSLWDTSGSPYYDNVRPLSYPDSDAVLICFDISRPETLDSVLKKWKGEIQEFCPNTKMLLVGCKSDLRTDVSTLVELSNHRQTPVSYDQGANMAKQIGAATYIECSALQSENSVRDIFHVATLACVNKTNKNVKRNKSQRATKRISHMPSRPELSAVATDLRKDKAKSCTVM

SEQ ID NO: 8195 - protein, 244 aa, Homo sapiens; identical to SEQ ID NO: 8194

SEQ ID NO: 8196 - protein, 115 aa, Homo sapiens
MLLVGCKSDLRTDVSTLVELSNHRQTPVSYDQGANMAKQIGAATYIECSALQSENSVRDIFHVATLACVNKTNKNVKRNKSQRATKRISHMPSRPELSAVATDLRKDKAKSCTVM

SEQ ID NO: 8197 - protein, 116 aa, Homo sapiens
MKERRASQKLSSKSIMDPNQNVKCKIVVVGDSQCGKTALLHVFAKDCFPENYVPTVFENYTASFEIDTQRIELSLWDTSGSPYYDNVRPLSYPDSDAVLICFDISRPETLDSVLKK

SEQ ID NO: 8198 - protein, 116 aa, Homo sapiens; identical to SEQ ID NO: 8197

SEQ ID NO: 8199 - protein, 204 aa, Homo sapiens
MAEQEPTAEQLAQIAAENEEDEHSVNYKPPAQKSIQEIQELDKDDESLRKYKEALLGRVAVSADPNVPNVVVTGLTLVCSSAPGPLELDLTGDLESFKKQSFVLKEGVEYRIKISFRVNREIVSGMKYIQHTYRKGVKIDKTDYMVGSYGPRAEEYEFLTPVEEAPKGMLARGSYSIKSRFTDDDKTDHLSWEWNLTIKKDWKD

SEQ ID NO: 8200 - protein, 178 aa, Homo sapiens
MAEQEPTAEQLAQIAAENEEDEHSVNYKPPAQKSIQEIQELDKDDESLRKYKEALLGRVAVSADPNVPNVVVTGLTLVCSSAPGPLELDLTGDLESFKKQSFVLKEGVEYRIKISFRVNREIVSGMKYIQHTYRKGVKIDKTDYMVGSYSIKSRFTDDDKTDHLSWEWNLTIKKDWKD

SEQ ID NO: 8201 - protein, 204 aa, Homo sapiens; identical to SEQ ID NO: 8199

SEQ ID NO: 8202 - protein, 1191 aa, Homo sapiens
MEAMSPQQETLGGQPGRSSSLTGVSRLAGGSCTKKKMKTLAERRRSAPSLILDKALQKRPTTRDSPSASVDTCTFLSSLVCSNRTLLIDGRAELKRGLQRQERHLFLFNDLFVVAKIKYNNNFKIKNKIKLTDMWTASCVDEVGEGNTNAMKSFVLGWPTVNFVATFSSPEQKDKWLSLLQRYINLEKEKDYPKSIPLKIFAKDIGNCAYSKTITVMNSDTANEVINMSLPMLGITGSERDYQLWVNSGKEEAPYPLIGHEYPYGIKMSHLRDSALLTPGSKDSTTPFNLQEPFLMEQLPREMQCQFILKPSRLAAAQQLSDSGHKTFKRRRSIINWAFWRGSSTHLDNLPSSPTSPMPGQLFGISLPNICENDNLPKPVLDMLFFLNQKGPLTKGIFRQSANVKSCRELKEKLNSGVEVHLDCESIFVIASVLKDFLRNIPGSIFSSDLYDHWVSVMDQGNDEEKINTVQRLLDQLPRANVVLLRYLFGVLHNIEQHSSSNQMTAFNLAVCVAPSILWPPASSSPELENEFTKKVSLLIQFLIENCLRIFGEEITSLFREVSVRCDTRENASDISCFQLNDSSYDSLENELNEDVDAPCSDLVKKLGQGSRSMDSVLTLSDYDLDQPEVEGLLTLSDFDLAHSKDEDVQMKRPLESKPVNILVYTKIPLRDHARAPSAMCTPSYLSTAAANAAKSLRRHRRCSEPSIDYLDSKLSYLREFYQKKLRKSSCDAILSQKDEDYLKQNQPLQEEGKTCFKQSLVTGTDVSKKNATTQNTKKKSLSGSEGNHVKLFPKSKPVAISVASYSPMSSQDHSKNQPFDVNTSGYSPPHTADALKGPRTHRRCSEPNIEDQNRKLTYLRGIYSKKQHKTSCEAGLLHGEEDYLKRHKSLQMEGQKLINQSLVMGIEVGKSSATNQNTEKVLPPRLNLCPRTSYSSLSSPGTSPSGSSVSSQDSAFSQISEHSVFTPTETSSPIDCTFQAQRKREDLSPDFSNASHVSGMPGPSSGQACSRPAYTKKDTMEWHSQMHSVTLHPSTWLRNGVASLKNWSLKKKAKAARPEEEKIASPKGPLEPPPHASGVPEANSLQEEQKDLPLRAAEGLSPVQSAQRCSSSPFQDSERHCSSPFSLVESRLKLCMKSHEEIEPGSQSSSGSLPWERASASSWTLEDATSPDSGPTVVCDIEDRYLTKDI

SEQ ID NO: 8203 - protein, 1165 aa, Homo sapiens
MTFWIIINKKMKTLAERRRSAPSLILDKALQKRPTTRDSPSASVDTCTFLSSLVCSNRTLLIDGRAELKRGLQRQERHLFLFNDLFVVAKIKYNNNFKIKNKIKLTDMWTASCVDEVGEGNTNAMKSFVLGWPTVNFVATFSSPEQKDKWLSLLQRYINLEKEKDYPKSIPLKIFAKDIGNCAYSKTITVMNSDTANEVINMSLPMLGITGSERDYQLWVNSGKEEAPYPLIGHEYPYGIKMSHLRDSALLTPGSKDSTTPFNLQEPFLMEQLPREMQCQFILKPSRLAAAQQLSDSGHKTFKRRRSIINWAFWRGSSTHLDNLPSSPTSPMPGQLFGISLPNICENDNLPKPVLDMLFFLNQKGPLTKGIFRQSANVKSCRELKEKLNSGVEVHLDCESIFVIASVLKDFLRNIPGSIFSSDLYDHWVSVMDQGNDEEKINTVQRLLDQLPRANVVLLRYLFGVLHNIEQHSSSNQMTAFNLAVCVAPSILWPPASSSPELENEFTKKVSLLIQFLIENCLRIFGEEITSLFREVSVRCDTRENASDISCFQLNDSSYDSLENELNEDVDAPCSDLVKKLGQGSRSMDSVLTLSDYDLDQPEVEGLLTLSDFDLAHSKDEDVQMKRPLESKPVNILVYTKIPLRDHARAPSAMCTPSYLSTAAANAAKSLRRHRRCSEPSIDYLDSKLSYLREFYQKKLRKSSCDAILSQKDEDYLKQNQPLQEEGKTCFKQSLVTGTDVSKKNATTQNTKKKSLSGSEGNHVKLFPKSKPVAISVASYSPMSSQDHSKNQPFDVNTSGYSPPHTADALKGPRTHRRCSEPNIEDQNRKLTYLRGIYSKKQHKTSCEAGLLHGEEDYLKRHKSLQMEGQKLINQSLVMGIEVGKSSATNQNTEKVLPPRLNLCPRTSYSSLSSPGTSPSGSSVSSQDSAFSQISEHSVFTPTETSSPIDCTFQAQRKREDLSPDFSNASHVSGMPGPSSGQACSRPAYTKKDTMEWHSQMHSVTLHPSTWLRNGVASLKNWSLKKKAKAARPEEEKIASPKGPLEPPPHASGVPEANSLQEEQKDLPLRAAEGLSPVQSAQRCSSSPFQDSERHCSSPFSLVESRLKLCMKSHEEIEPGSQSSSGSLPWERASASSWTLEDATSPDSGPTVVCDIEDRYLTKDI

SEQ ID NO: 8204 - protein, 1168 aa, Homo sapiens
MSARERQPALKKKMKTLAERRRSAPSLILDKALQKRPTTRDSPSASVDTCTFLSSLVCSNRTLLIDGRAELKRGLQRQERHLFLFNDLFVVAKIKYNNNFKIKNKIKLTDMWTASCVDEVGEGNTNAMKSFVLGWPTVNFVATFSSPEQKDKWLSLLQRYINLEKEKDYPKSIPLKIFAKDIGNCAYSKTITVMNSDTANEVINMSLPMLGITGSERDYQLWVNSGKEEAPYPLIGHEYPYGIKMSHLRDSALLTPGSKDSTTPFNLQEPFLMEQLPREMQCQFILKPSRLAAAQQLSDSGHKTFKRRRSIINWAFWRGSSTHLDNLPSSPTSPMPGQLFGISLPNICENDNLPKPVLDMLFFLNQKGPLTKGIFRQSANVKSCRELKEKLNSGVEVHLDCESIFVIASVLKDFLRNIPGSIFSSDLYDHWVSVMDQGNDEEKINTVQRLLDQLPRANVVLLRYLFGVLHNIEQHSSSNQMTAFNLAVCVAPSILWPPASSSPELENEFTKKVSLLIQFLIENCLRIFGEEITSLFREVSVRCDTRENASDISCFQLNDSSYDSLENELNEDVDAPCSDLVKKLGQGSRSMDSVLTLSDYDLDQPEVEGLLTLSDFDLAHSKDEDVQMKRPLESKPVNILVYTKIPLRDHARAPSAMCTPSYLSTAAANAAKSLRRHRRCSEPSIDYLDSKLSYLREFYQKKLRKSSCDAILSQKDEDYLKQNQPLQEEGKTCFKQSLVTGTDVSKKNATTQNTKKKSLSGSEGNHVKLFPKSKPVAISVASYSPMSSQDHSKNQPFDVNTSGYSPPHTADALKGPRTHRRCSEPNIEDQNRKLTYLRGIYSKKQHKTSCEAGLLHGEEDYLKRHKSLQMEGQKLINQSLVMGIEVGKSSATNQNTEKVLPPRLNLCPRTSYSSLSSPGTSPSGSSVSSQDSAFSQISEHSVFTPTETSSPIDCTFQAQRKREDLSPDFSNASHVSGMPGPSSGQACSRPAYTKKDTMEWHSQMHSVTLHPSTWLRNGVASLKNWSLKKKAKAARPEEEKIASPKGPLEPPPHASGVPEANSLQEEQKDLPLRAAEGLSPVQSAQRCSSSPFQDSERHCSSPFSLVESRLKLCMKSHEEIEPGSQSSSGSLPWERASASSWTLEDATSPDSGPTVVCDIEDRYLTKDI

SEQ ID NO: 8205 - protein, 1155 aa, Homo sapiens
MKTLAERRRSAPSLILDKALQKRPTTRDSPSASVDTCTFLSSLVCSNRTLLIDGRAELKRGLQRQERHLFLFNDLFVVAKIKYNNNFKIKNKIKLTDMWTASCVDEVGEGNTNAMKSFVLGWPTVNFVATFSSPEQKDKWLSLLQRYINLEKEKDYPKSIPLKIFAKDIGNCAYSKTITVMNSDTANEVINMSLPMLGITGSERDYQLWVNSGKEEAPYPLIGHEYPYGIKMSHLRDSALLTPGSKDSTTPFNLQEPFLMEQLPREMQCQFILKPSRLAAAQQLSDSGHKTFKRRRSIINWAFWRGSSTHLDNLPSSPTSPMPGQLFGISLPNICENDNLPKPVLDMLFFLNQKGPLTKGIFRQSANVKSCRELKEKLNSGVEVHLDCESIFVIASVLKDFLRNIPGSIFSSDLYDHWVSVMDQGNDEEKINTVQRLLDQLPRANVVLLRYLFGVLHNIEQHSSSNQMTAFNLAVCVAPSILWPPASSSPELENEFTKKVSLLIQFLIENCLRIFGEEITSLFREVSVRCDTRENASDISCFQLNDSSYDSLENELNEDVDAPCSDLVKKLGQGSRSMDSVLTLSDYDLDQPEVEGLLTLSDFDLAHSKDEDVQMKRPLESKPVNILVYTKIPLRDHARAPSAMCTPSYLSTAAANAAKSLRRHRRCSEPSIDYLDSKLSYLREFYQKKLRKSSCDAILSQKDEDYLKQNQPLQEEGKTCFKQSLVTGTDVSKKNATTQNTKKKSLSGSEGNHVKLFPKSKPVAISVASYSPMSSQDHSKNQPFDVNTSGYSPPHTADALKGPRTHRRCSEPNIEDQNRKLTYLRGIYSKKQHKTSCEAGLLHGEEDYLKRHKSLQMEGQKLINQSLVMGIEVGKSSATNQNTEKVLPPRLNLCPRTSYSSLSSPGTSPSGSSVSSQDSAFSQISEHSVFTPTETSSPIDCTFQAQRKREDLSPDFSNASHVSGMPGPSSGQACSRPAYTKKDTMEWHSQMHSVTLHPSTWLRNGVASLKNWSLKKKAKAARPEEEKIASPKGPLEPPPHASGVPEANSLQEEQKDLPLRAAEGLSPVQSAQRCSSSPFQDSERHCSSPFSLVESRLKLCMKSHEEIEPGSQSSSGSLPWERASASSWTLEDATSPDSGPTVVCDIEDRYLTKDI

SEQ ID NO: 8206 - protein, 1155 aa, Homo sapiens; identical to SEQ ID NO: 8205

SEQ ID NO: 8207 - protein, 731 aa, Homo sapiens
MDQGNDEEKINTVQRLLDQLPRANVVLLRYLFGVLHNIEQHSSSNQMTAFNLAVCVAPSILWPPASSSPELENEFTKKVSLLIQFLIENCLRIFGEEITSLFREVSVRCDTRENASDISCFQLNDSSYDSLENELNEDVDAPCSDLVKKLGQGSRSMDSVLTLSDYDLDQPEVEGLLTLSDFDLAHSKDEDVQMKRPLESKPVNILVYTKIPLRDHARAPSAMCTPSYLSTAAANAAKSLRRHRRCSEPSIDYLDSKLSYLREFYQKKLRKSSCDAILSQKDEDYLKQNQPLQEEGKTCFKQSLVTGTDVSKKNATTQNTKKKSLSGSEGNHVKLFPKSKPVAISVASYSPMSSQDHSKNQPFDVNTSGYSPPHTADALKGPRTHRRCSEPNIEDQNRKLTYLRGIYSKKQHKTSCEAGLLHGEEDYLKRHKSLQMEGQKLINQSLVMGIEVGKSSATNQNTEKVLPPRLNLCPRTSYSSLSSPGTSPSGSSVSSQDSAFSQISEHSVFTPTETSSPIDCTFQAQRKREDLSPDFSNASHVSGMPGPSSGQACSRPAYTKKDTMEWHSQMHSVTLHPSTWLRNGVASLKNWSLKKKAKAARPEEEKIASPKGPLEPPPHASGVPEANSLQEEQKDLPLRAAEGLSPVQSAQRCSSSPFQDSERHCSSPFSLVESRLKLCMKSHEEIEPGSQSSSGSLPWERASASSWTLEDATSPDSGPTVVCDIEDRNCC

SEQ ID NO: 8208 - protein, 1165 aa, Homo sapiens; identical to SEQ ID NO: 8203

SEQ ID NO: 8209 - protein, 1513 aa, Homo sapiens
MMMARKQDVRIPTYNISVVGLSGTEKEKGQCGIGKSCLCNRFVRPSADEFHLDHTSVLSTSDFGGRVVNNDHFLYWGEVSRSLEDCVECKMHIVEQTEFIDDQTFQPHRSTALQPYIKRAAATKLASAEKLMYFCTDQLGLEQDFEQKQMPDGKLLVDGFLLGIDVSRGMNRNFDDQLKFVSNLYNQLAKTKKPIVVVLTKCDEGVERYIRDAHTFALSKKNLQVVETSARSNVNVDLAFSTLVQLIDKSRGKTKIIPYFEALKQQSQQIATAKDKYEWLVSRIVKNHNENWLSVSRKMQASPEYQDYVYLEGTQKAKKLFLQHIHRLKHEHIERRRKLYLAALPLAFEALIPNLDEIDHLSCIKAKKLLETKPEFLKWFVVLEETPWDATSHIDNMENERIPFDLMDTVPAEQLYEAHLEKLRNERKRVEMRRAFKENLETSPFITPGKPWEEARSFIMNEDFYQWLEESVYMDIYGKHQKQIIDKAKEEFQELLLEYSELFYELELDAKPSKEKMGVIQDVLGEEQRFKALQKLQAERDALILKHIHFVYHPTKETCPSCPACVDAKIEHLISSRFIRPSDRNQKNSLSDPNIDRINLVILGKDGLARELANEIRALCTNDDKYVIDGKMYELSLRPIEGNVRLPVNSFQTPTFQPHGCLCLYNSKESLSYVVESIEKSRESTLGRRDNHLVHLPLTLILVNKRGDTSGETLHSLIQQGQQIASKLQCVFLDPASAGIGYGRNINEKQISQVLKGLLDSKRNLNLVSSTASIKDLADVDLRIVMCLMCGDPFSADDILFPVLQSQTCKSSHCGSNNSVLLELPIGLHKKRIELSVLSYHSSFSIRKSRLVHGYIVFYSAKRKASLAMLRAFLCEVQDIIPIQLVALTDGAVDVLDNDLSREQLTEGEEIAQEIDGRFTSIPCSQPQHKLEIFHPFFKDVVEKKNIIEATHMYDNAAEACSTTEEVFNSPRAGSPLCNSNLQDSEEDIEPSYSLFREDTSLPSLSKDHSKLSMELEGNDGLSFIMSNFESKLNNKVPPPVKPKPPVHFEITKGDLSYLDQGHRDGQRKSVSSSPWLPQDGFDPSDYAEPMDAVVKPRNEEENIYSVPHDSTQGKIITIRNINKAQSNGSGNGSDSEMDTSSLERGRKVSIVSKPVLYRTRCTRLGRFASYRTSFSVGSDDELGPIRKKEEDQASQGYKGDNAVIPYETDEDPRRRNILRSLRRNTKKPKPKPRPSITKATWESNYFGVPLTTVVTPEKPIPIFIERCIEYIEATGLSTEGIYRVSGNKSEMESLQRQFDQDHNLDLAEKDFTVNTVAGAMKSFFSELPDPLVPYNMQIDLVEAHKINDREQKLHALKEVLKKFPKENHEVFKYVISHLNKVSHNNKVNLMTSENLSICFWPTLMRPDFSTMDALTATRTYQTIIELFIQQCPFFFYNRPITEPPGARPSSPSAVASTVPFLTSTPVTSQPSPPQSPPPTPQSPMQPLLPSPLHPHRPTPQPSRNIPWQTKEH

SEQ ID NO: 8210 - protein, 1499 aa, Homo sapiens
MMMARKQDVRIPTYNISVVGLSGTEKEKGQCGIGKSCLCNRFVRPSADEFHLDHTSVLSTSDFGGRVVNNDHFLYWGEVSRSLEDCVECKMHIVEQTEFIDDQTFQPHRSTALQPYIKRAAATKLASAEKLMYFCTDQLGLEQDFEQKQMPDGKLLVDGFLLGIDVSRGMNRNFDDQLKFVSNLYNQLAKTKKPIVVVLTKCDEGVERYIRDAHTFALSKKNLQVVETSARSNVNVDLAFSTLVQLIDKSRGKTKIIPYFEALKQQSQQIATAKDKYEWLVSRIVKNHNENWLSVSRKMQASPEYQDYVYLEGTQKAKKLFLQHIHRLKHEHIERRRKLYLAALPLAFEALIPNLDEIDHLSCIKAKKLLETKPEFLKWFVVLEETPWDATSHIDNMENERIPFDLMDTVPAEQLYEAHLEKLRNERKRVEMRRAFKENLETSPFITPGKPWEEARSFIMNEDFYQWLEESVYMDIYGKHQKQIIDKAKEEFQELLLEYSELFYELELDAKPSKEKMGVIQDVLGEEQRFKALQKLQAERDALILKHIHFVYHPTKETCPSCPACVDAKIEHLISSRFIRPSDRNQKNSLSDPNIDRINLVILGKDGLARELANEIRALCTNDDKYVIDGKMYELSLRPIEGNVRLPVNSFQTPTFQPHGCLCLYNSKESLSYVVESIEKSRESTLGRRDNHLVHLPLTLILVNKRGDTSGETLHSLIQQGQQIASKLQCVFLDPASAGIGYGRNINEKQISQVLKGLLDSKRNLNLVSSTASIKDLADVDLRIVMCLMCGDPFSADDILFPVLQSQTCKSSHCGSNNSVLLELPIGLHKKRIELSVLSYHSSFSIRKSRLVHGYIVFYSAKRKASLAMLRAFLCEVQDIIPIQLVALTDGAVDVLDNDLSREQLTEGEEIAQEIDGRFTSIPCSQPQHKLEIFHPFFKDVVEKKNIIEATHMYDNAAEACSTTEEVFNSPRAGSPLCNSNLQDSEEDIEPSYSLFREDTSLPSLSKDHSKLSMELEGNDGLSFIMSNFESKLNNKVPPPVKPKPPVHFEITKGDLSYLDQGHRDGQRKSVSSSPWLPQDGFDPSDYAEPMDAVVKPRNEEENIYSVPHDSTQGKIITIRNINKAQSNGSGNGSDSEMDTSSLERGRKVSIVSKPVLYRTRCTRLGRFASYRTSFSVGSDDELGPIRKKEEDQASQGYKGDNAVIPYETDEDPRRRNILRSLRRNTKKPKPKPRPSITKATWESNYFGVPLTTVVTPEKPIPIFIERCIEYIEATGLSTEGIYRVSGNKSEMESLQRQFDQDHNLDLAEKDFTVNTVAGAMKSFFSELPDPLVPYNMQIDLVEAHKINDREQKLHALKEVLKKFPKENHEVFKYVISHLNKVSHNNKVNLMTSENLSICFWPTLMRPDFSTMDALTATRTYQTIIELFIQQCPFFFYNRPITEPPGARPSSPSAVASTVPFLTSTPVTSQPSPPQSPPPTPQSPMQPLLPSQLQAEHTL

SEQ ID NO: 8211 - protein, 749 aa, Homo sapiens
MMMARKQDVRIPTYNISVVGLSGTEKEKGQCGIGKSCLCNRFVRPSADEFHLDHTSVLSTSDFGGRVVNNDHFLYWGEVSRSLEDCVECKMHIVEQTEFIDDQTFQPHRSTALQPYIKRAAATKLASAEKLMYFCTDQLGLEQDFEQKQMPDGKLLVDGFLLGIDVSRGMNRNFDDQLKFVSNLYNQLAKTKKPIVVVLTKCDEGVERYIRDAHTFALSKKNLQVVETSARSNVNVDLAFSTLVQLIDKSRGKTKIIPYFEALKQQSQQIATAKDKYEWLVSRIVKNHNENWLSVSRKMQASPEYQDYVYLEGTQKAKKLFLQHIHRLKHEHIERRRKLYLAALPLAFEALIPNLDEIDHLSCIKAKKLLETKPEFLKWFVVLEETPWDATSHIDNMENERIPFDLMDTVPAEQLYEAHLEKLRNERKRVEMRRAFKENLETSPFITPGKPWEEARSFIMNEDFYQWLEESVYMDIYGKHQKQIIDKAKEEFQELLLEYSELFYELELDAKPSKEKMGVIQDVLGEEQRFKALQKLQAERDALILKHIHFVYHPTKETCPSCPACVDAKIEHLISSRFIRPSDRNQKNSLSDPNIDRINLVILGKDGLARELANEIRALCTNDDKYVIDGKMYELSLRPIEGNVRLPVNSFQTPTFQPHGCLCLYNSKESLSYVVESIEKSRESTLGRRDNHLVHLPLTLILVNKRGDTSGETLHSLIQQGQQIASKLQCVFLDPASAGAADLSWLGPI

SEQ ID NO: 8212 - protein, 705 aa, Homo sapiens
MTDNSNNQLVVRAKFNFQQTNEDELSFSKGDVIHVTRVEEGGWWEGTLNGRTGWFPSNYVREVKASEKPVSPKSGTLKSPPKGFDTTAINKSYYNVVLQNILETENEYSKELQTVLSTYLRPLQTSEKLSSANISYLMGNLEEICSFQQMLVQSLEECTKLPEAQQRVGGCFLNLMPQMKTLYLTYCANHPSAVNVLTEHSEELGEFMETKGASSPGILVLTTGLSKPFMRLDKYPTLLKELERHMEDYHTDRQDIQKSMAAFKNLSAQCQEVRKRKELELQILTEAIRNWEGDDIKTLGNVTYMSQVLIQCAGSEEKNERYLLLFPNVLLMLSASPRMSGFIYQGKLPTTGMTITKLEDSENHRNAFEISGSMIERILVSCNNQQDLQEWVEHLQKQTKVTSVGNPTIKPHSVPSHTLPSHPVTPSSKHADSKPAPLTPAYHTLPHPSHHGTPHTTINWGPLEPPKTPKPWSLSCLRPAPPLRPSAALCYKEDLSKSPKTMKKLLPKRKPERKPSDEEFASRKSTAALEEDAQILKVIEAYCTSAKTRQTLNSTWQGTDLMHNHVLADDDQPSLDSLGRRSSLSRLEPSDLSEDSDYDSIWTAHSYRMGSTSRSRKESAPQVLLPEEEKIIVEETKSNGQTVIEEKSLVDTVYALKDEVQELRQDNKKMKKSLEEEQRARKDLEKLVRKVLKNMNDPAWDETNL

SEQ ID NO: 8213 - protein, 782 aa, Homo sapiens
MNSAEQTVTWLITLGVLESPKKTISDPEGFLQASLKDGVVLCRLLERLLPGTIEKVYPEPRSESECLSNIREFLRGCGASLRLETFDANDLYQGQNFNKVLSSLVTLNKVTADIGLGSDSVCARPSSHRIKSFDSLGSQSLHTRTSKLFQGQYRSLDMTDNSNNQLVVRAKFNFQQTNEDELSFSKGDVIHVTRVEEGGWWEGTLNGRTGWFPSNYVREVKASEKPVSPKSGTLKSPPKGFDTTAINKSYYNVVLQNILETENEYSKELQTVLSTYLRPLQTSEKLSSANISYLMGNLEEICSFQQMLVQSLEECTKLPEAQQRVGGCFLNLMPQMKTLYLTYCANHPSAVNVLTEHSEELGEFMETKGASSPGILVLTTGLSKPFMRLDKYPTLLKELERHMEDYHTDRQDIQKSMAAFKNLSAQCQEVRKRKELELQILTEAIRNWEGDDIKTLGNVTYMSQVLIQCAGSEEKNERYLLLFPNVLLMLSASPRMSGFIYQGKLPTTGMTITKLEDSENHRNAFEISGSMIERILVSCNNQQDLQEWVEHLQKQTKVTSVGNPTIKPHSVPSHTLPSHPVTPSSKHADSKPAPLTPAYHTLPHPSHHGTPHTTINWGPLEPPKTPKPWSLSCLRPAPPLRPSAALCYKEDLSKSPKTMKKLLPKRKPERKPSDEEFASRKSTAALEEDAQILKVIEAYCTSAKTRQTLNSTWQGTDLMHNHVLADDDQPSLDSLGRRSSLSRLEPSDLSEDSDYDSIWTAHSYRMGSTSRKSCCSYISHQN

SEQ ID NO: 8214 - protein, 731 aa, Homo sapiens
MNSAEQTVTWLITLGVLESPKKTISDPEGFLQASLKDGVVLCRLLERLLPGTIEKVYPEPRSESECLSNIREFLRGCGASLRLEDMTDNSNNQLVVRAKFNFQQTNEDELSFSKGDVIHVTRVEEGGWWEGTLNGRTGWFPSNYVREVKASEKPVSPKSGTLKSPPKGFDTTAINKSYYNVVLQNILETENEYSKELQTVLSTYLRPLQTSEKLSSANISYLMGNLEEICSFQQMLVQSLEECTKLPEAQQRVGGCFLNLMPQMKTLYLTYCANHPSAVNVLTEHSEELGEFMETKGASSPGILVLTTGLSKPFMRLDKYPTLLKELERHMEDYHTDRQDIQKSMAAFKNLSAQCQEVRKRKELELQILTEAIRNWEGDDIKTLGNVTYMSQVLIQCAGSEEKNERYLLLFPNVLLMLSASPRMSGFIYQGKLPTTGMTITKLEDSENHRNAFEISGSMIERILVSCNNQQDLQEWVEHLQKQTKVTSVGNPTIKPHSVPSHTLPSHPVTPSSKHADSKPAPLTPAYHTLPHPSHHGTPHTTINWGPLEPPKTPKPWSLSCLRPAPPLRPSAALCYKEDLSKSPKTMKKLLPKRKPERKPSDEEFASRKSTAALEEDAQILKVIEAYCTSAKTRQTLNSSSRKESAPQVLLPEEEKIIVEETKSNGQTVIEEKSLVDTVYALKDEVQELRQDNKKMKKSLEEEQRARKDLEKLVRKVLKNMNDPAWDETNL

SEQ ID NO: 8215 - protein, 625 aa, Homo sapiens
MTDNSNNQLVVRAKFNFQQTNEDELSFSKGDVIHVTRVEEGGWWEGTLNGRTGWFPSNYVREVKASEKPVSPKSGTLKSPPKGFDTTAINKSYYNVVLQNILETENEYSKELQTVLSTYLRPLQTSEKLSSANISYLMGNLEEICSFQQMLVQSLEECTKLPEAQQRVGGCFLNLMPQMKTLYLTYCANHPSAVNVLTEHSEELGEFMETKGASSPGILVLTTGLSKPFMRLDKYPTLLKELERHMEDYHTDRQDIQKSMAAFKNLSAQCQEVRKRKELELQILTEAIRNWEGDDIKTLGNVTYMSQVLIQCAGSEEKNERYLLLFPNVLLMLSASPRMSGFIYQGKLPTTGMTITKLEDSENHRNAFEISGSMIERILVSCNNQQDLQEWVEHLQKQTKVTSVGNPTIKPHSVPSHTLPSHPVTPSSKHADSKPAPLTPAYHTLPHPSHHGTPHTTINWGPLEPPKTPKPWSLSCLRPAPPLRPSAALCYKEDLSKSPKTMKKLLPKRKPERKPSDEEFASRKSTAALEEDAQILKVIEAYCTSAKTRQTLNSTWQGTDLMHNHVLADDDQPSLDSLGRRSSLSRLEPSDLSEDSDYDSIWTAHSYRMGSTSRKSCCSYISHQN

SEQ ID NO: 8216 - protein, 646 aa, Homo sapiens
MTDNSNNQLVVRAKFNFQQTNEDELSFSKGDVIHVTRVEEGGWWEGTLNGRTGWFPSNYVREVKASEKPVSPKSGTLKSPPKGFDTTAINKSYYNVVLQNILETENEYSKELQTVLSTYLRPLQTSEKLSSANISYLMGNLEEICSFQQMLVQSLEECTKLPEAQQRVGGCFLNLMPQMKTLYLTYCANHPSAVNVLTEHSEELGEFMETKGASSPGILVLTTGLSKPFMRLDKYPTLLKELERHMEDYHTDRQDIQKSMAAFKNLSAQCQEVRKRKELELQILTEAIRNWEGDDIKTLGNVTYMSQVLIQCAGSEEKNERYLLLFPNVLLMLSASPRMSGFIYQGKLPTTGMTITKLEDSENHRNAFEISGSMIERILVSCNNQQDLQEWVEHLQKQTKVTSVGNPTIKPHSVPSHTLPSHPVTPSSKHADSKPAPLTPAYHTLPHPSHHGTPHTTINWGPLEPPKTPKPWSLSCLRPAPPLRPSAALCYKEDLSKSPKTMKKLLPKRKPERKPSDEEFASRKSTAALEEDAQILKVIEAYCTSAKTRQTLNSSSRKESAPQVLLPEEEKIIVEETKSNGQTVIEEKSLVDTVYALKDEVQELRQDNKKMKKSLEEEQRARKDLEKLVRKVLKNMNDPAWDETNL

SEQ ID NO: 8217 - protein, 721 aa, Homo sapiens
MKTFDANDLYQGQNFNKVLSSLVTLNKVTADIGLGSDSVCARPSSHRIKSFDSLGSQSLHTRTSKLFQGQYRSLDMTDNSNNQLVVRAKFNFQQTNEDELSFSKGDVIHVTRVEEGGWWEGTLNGRTGWFPSNYVREVKASEKPVSPKSGTLKSPPKGFDTTAINKSYYNVVLQNILETENEYSKELQTVLSTYLRPLQTSEKLSSANISYLMGNLEEICSFQQMLVQSLEECTKLPEAQQRVGGCFLNLMPQMKTLYLTYCANHPSAVNVLTEHSEELGEFMETKGASSPGILVLTTGLSKPFMRLDKYPTLLKELERHMEDYHTDRQDIQKSMAAFKNLSAQCQEVRKRKELELQILTEAIRNWEGDDIKTLGNVTYMSQVLIQCAGSEEKNERYLLLFPNVLLMLSASPRMSGFIYQGKLPTTGMTITKLEDSENHRNAFEISGSMIERILVSCNNQQDLQEWVEHLQKQTKVTSVGNPTIKPHSVPSHTLPSHPVTPSSKHADSKPAPLTPAYHTLPHPSHHGTPHTTINWGPLEPPKTPKPWSLSCLRPAPPLRPSAALCYKEDLSKSPKTMKKLLPKRKPERKPSDEEFASRKSTAALEEDAQILKVIEAYCTSAKTRQTLNSSSRKESAPQVLLPEEEKIIVEETKSNGQTVIEEKSLVDTVYALKDEVQELRQDNKKMKKSLEEEQRARKDLEKLVRKVLKNMNDPAWDETNL

SEQ ID NO: 8218 - protein, 753 aa, Homo sapiens
MNSAEQTVTWLITLGVLESPKKTISDPEGFLQASLKDGVVLCRLLERLLPGTIEKTFDANDLYQGQNFNKVLSSLVTLNKVTADIGLGSDSVCARPSSHRIKSFDSLGSQSLHTRTSKLFQGQYRSLDMTDNSNNQLVVRAKFNFQQTNEDELSFSKGDVIHVTRVEEGGWWEGTLNGRTGWFPSNYVREVKASEKPVSPKSGTLKSPPKGFDTTAINKSYYNVVLQNILETENEYSKELQTVLSTYLRPLQTSEKLSSANISYLMGNLEEICSFQQMLVQSLEECTKLPEAQQRVGGCFLNLMPQMKTLYLTYCANHPSAVNVLTEHSEELGEFMETKGASSPGILVLTTGLSKPFMRLDKYPTLLKELERHMEDYHTDRQDIQKSMAAFKNLSAQCQEVRKRKELELQILTEAIRNWEGDDIKTLGNVTYMSQVLIQCAGSEEKNERYLLLFPNVLLMLSASPRMSGFIYQGKLPTTGMTITKLEDSENHRNAFEISGSMIERILVSCNNQQDLQEWVEHLQKQTKVTSVGNPTIKPHSVPSHTLPSHPVTPSSKHADSKPAPLTPAYHTLPHPSHHGTPHTTINWGPLEPPKTPKPWSLSCLRPAPPLRPSAALCYKEDLSKSPKTMKKLLPKRKPERKPSDEEFASRKSTAALEEDAQILKVIEAYCTSAKTRQTLNSTWQGTDLMHNHVLADDDQPSLDSLGRRSSLSRLEPSDLSEDSDYDSIWTAHSYRMGSTSRKSCCSYISHQN

SEQ ID NO: 8219 - protein, 803 aa, Homo sapiens
MNSAEQTVTWLITLGVLESPKKTISDPEGFLQASLKDGVVLCRLLERLLPGTIEKVYPEPRSESECLSNIREFLRGCGASLRLELLFPPSQPPQHLVTTILLSASTFDANDLYQGQNFNKVLSSLVTLNKVTADIGLGSDSVCARPSSHRIKSFDSLGSQSLHTRTSKLFQGQYRSLDMTDNSNNQLVVRAKFNFQQTNEDELSFSKGDVIHVTRVEEGGWWEGTLNGRTGWFPSNYVREVKASEKPVSPKSGTLKSPPKGFDTTAINKSYYNVVLQNILETENEYSKELQTVLSTYLRPLQTSEKLSSANISYLMGNLEEICSFQQMLVQSLEECTKLPEAQQRVGGCFLNLMPQMKTLYLTYCANHPSAVNVLTEHSEELGEFMETKGASSPGILVLTTGLSKPFMRLDKYPTLLKELERHMEDYHTDRQDIQKSMAAFKNLSAQCQEVRKRKELELQILTEAIRNWEGDDIKTLGNVTYMSQVLIQCAGSEEKNERYLLLFPNVLLMLSASPRMSGFIYQGKLPTTGMTITKLEDSENHRNAFEISGSMIERILVSCNNQQDLQEWVEHLQKQTKVTSVGNPTIKPHSVPSHTLPSHPVTPSSKHADSKPAPLTPAYHTLPHPSHHGTPHTTINWGPLEPPKTPKPWSLSCLRPAPPLRPSAALCYKEDLSKSPKTMKKLLPKRKPERKPSDEEFASRKSTAALEEDAQILKVIEAYCTSAKTRQTLNSTWQGTDLMHNHVLADDDQPSLDSLGRRSSLSRLEPSDLSEDSDYDSIWTAHSYRMGSTSRKSCCSYISHQN

SEQ ID NO: 8220 - protein, 646 aa, Homo sapiens; identical to SEQ ID NO: 8216

SEQ ID NO: 8221 - protein, 66 aa, Homo sapiens
MTDNSNNQLVVRAKFNFQQTNEDELSFSKGDVIHVTRVEEGGWWEGTLNGRTGWFPSNYVREVKAS

SEQ ID NO: 8222 - protein, 447 aa, Homo sapiens
MTDNSNNQLVVRAKFNFQQTNEDELSFSKGDVIHVTRVEEGGWWEGTLNGRTGWFPSNYVREVKASEKPVSPKSGTLKSPPKGFDTTAINKSYYNVVLQNILETENEYSKELQTVLSTYLRPLQTSEKLSSANISYLMGNLEEICSFQQMLVQSLEECTKLPEAQQRVGGCFLNLMPQMKTLYLTYCANHPSAVNVLTEHSEELGEFMETKGASSPGILVLTTGLSKPFMRLDKYPTLLKELERHMEDYHTDRQDIQKSMAAFKNLSAQCQEVRKRKELELQILTEAIRNWEGDDIKTLGNVTYMSQVLIQCAGSEEKNERYLLLFPNVLLMLSASPRMSGFIYQGKLPTTGMTITKLEDSENHRNAFEISGSMIERILVSCNNQQDLQEWVEHLQKQTKVTSVGNPTIKPHSVPSHTLPSHPVTPSSKHADSKPAPLTPAYHTLPH

SEQ ID NO: 8223 - protein, 61 aa, Homo sapiens
MTDNSNNQLVVRAKFNFQQTNEDELSFSKGDVIHVTRVEEGGWWEGTLNGRTGWFPSNYVR

SEQ ID NO: 8224 - protein, 39 aa, Homo sapiens
MTDNSNNQLVVRAKFNFQQTNEDELSFSKGDVIHVTRVE

SEQ ID NO: 8225 - protein, 181 aa, Homo sapiens
MCFPRSSVTTDDHQLDGIKSTRAPAPGCCCCPSETLRSGEVARSSAESRRLLFKPDATDENPVPHVLCQSPFCSECPHGTQDYHTDRQDIQKSMAAFKNLSAQCQEVRKRKELELQILTEAIRNWEGDDIKTLGNVTYMSQVLIQCAGSEEKNERYLLLFPNVLLMLSASPRMSGFIYQGA

SEQ ID NO: 8226 - protein, 689 aa, Homo sapiens
IPPSKPLRGSSLWGCWSRPKTISDPEGFLQASLKDGVVLCRLLERLLPGTIEKVYPEPRSESECLSNIREFLRGCGASLRLETFDANDLYQGQNFNKVLSSLVTLNKVTADIGLGSDSVCARPSSHRIKSFDSLGSQSLHTRTSKLFQGQYRSLDMTDNSNNQLVVRAKFNFQQTNEDELSFSKGDVIHVTRVEEGGWWEGTLNGRTGWFPSNYVREVKASEKPVSPKSGTLKSPPKGFDTTAINKSYYNVVLQNILETENEYSKELQTVLSTYLRPLQTSEKLSSANISYLMGNLEEICSFQQMLVQSLEECTKLPEAQQRVGGCFLNLMPQMKTLYLTYCANHPSAVNVLTEHSEELGEFMETKGASSPGILVLTTGLSKPFMRLDKYPTLLKELERHMEDYHTDRQDIQKSMAAFKNLSAQCQEVRKRKELELQILTEAIRNWEGDDIKTLGNVTYMSQVLIQCAGSEEKNERYLLLFPNVLLMLSASPRMSGFIYQGKLPTTGMTITKLEDSENHRNAFEISGSMIERILVSCNNQQDLQEWVEHLQKQTKVTSVGNPTIKPHSVPSHTLPSHPVTPSSKHADSKPAPLTPAYHTLPHPSHHGTPHTTINWGPLEPPKTPKPWSLSCLRPAPPLRPSAALCYKEDLSKSPKTMKKLLPKRKPERKPMRSSRPGKAQLLWKKMLRF

SEQ ID NO: 8227 - protein, 1354 aa, Homo sapiens
MSTGDSFETRFEKMDNLLRDPKSEVNSDCLLDGLDALVYDLDFPALRKNKNIDNFLSRYKDTINKIRDLRMKAEDYEVVKVIGRGAFGEVQLVRHKSTRKVYAMKLLSKFEMIKRSDSAFFWEERDIMAFANSPWVVQLFYAFQDDRYLYMVMEYMPGGDLVNLMSNYDVPEKWARFYTAEVVLALDAIHSMGFIHRDVKPDNMLLDKSGHLKLADFGTCMKMNKEGMVRCDTAVGTPDYISPEVLKSQGGDGYYGRECDWWSVGVFLYEMLVGDTPFYADSLVGTYSKIMNHKNSLTFPDDNDISKEAKNLICAFLTDREVRLGRNGVEEIKRHLFFKNDQWAWETLRDTVAPVVPDLSSDIDTSNFDDLEEDKGEEETFPIPKAFVGNQLPFVGFTYYSNRRYLSSANPNDNRTSSNADKSLQESLQKTIYKLEEQLHNEMQLKDEMEQKCRTSNIKLDKIMKELDEEGNQRRNLESTVSQIEKEKMLLQHRINEYQRKAEQENEKRRNVENEVSTLKDQLEDLKKVSQNSQLANEKLSQLQKQLEEANDLLRTESDTAVRLRKSHTEMSKSISQLESLNRELQERNRILENSKSQTDKDYYQLQAILEAERRDRGHDSEMIGDLQARITSLQEEVKHLKHNLEKVEGERKEAQDMLNHSEKEKNNLEIDLNYKLKSLQQRLEQEVNEHKVTKARLTDKHQSIEEAKSVAMCEMEKKLKEEREAREKAENRVVQIEKQCSMLDVDLKQSQQKLEHLTGNKERMEDEVKNLTLQLEQESNKRLLLQNELKTQAFEADNLKGLEKQMKQEINTLLEAKRLLEFELAQLTKQYRGNEGQMRELQDQLEAEQYFSTLYKTQVKELKEEIEEKNRENLKKIQELQNEKETLATQLDLAETKAESEQLARGLLEEQYFELTQESKKAASRNRQEITDKDHTVSRLEEANSMLTKDIEILRRENEELTEKMKKAEEEYKLEKEEEISNLKAAFEKNINTERTLKTQAVNKLAEIMNRKDFKIDRKKANTQDLRKKEKENRKLQLELNQEREKFNQMVVKHQKELNDMQAQLVEECAHRNELQMQLASKESDIEQLRAKLLDLSDSTSVASFPSADETDGNLPESRIEGWLSVPNRGNIKRYGWKKQYVVVSSKKILFYNDEQDKEQSNPSMVLDIDKLFHVRPVTQGDVYRAETEEIPKIFQILYANEGECRKDVEMEPVQQAEKTNFQNHKGHEFIPTLYHFPANCDACAKPLWHVFKPPPALECRRCHVKCHRDHLDKKEDLICPCKVSYDVTSARDMLLLACSQDEQKKWVTHLVKKIPKNPPSGFVRASPRTLSTRSTANQSFRKVVKNTSGKTS

SEQ ID NO: 8228 - protein, 156 aa, Homo sapiens
MAPARAGFCPLLLLLLLGLWVAEIPVSAKPKGMTSSQWFKIQHMQPSPQACNSAMKNINKHTKRCKDLNTFLHEPFSSVAATCQTPKIACKNGDKNCHQSHGAVSLTMCKLTSGKHPNCRYKEKRQNKSYVVACKPPQKKDSQQFHLVPVHLDRVL

SEQ ID NO: 8229 - protein, 156 aa, Homo sapiens; identical to SEQ ID NO: 8228

SEQ ID NO: 8230 - protein, 525 aa, Homo sapiens
MRRRRRRDGFYPAPDFRDREAEDMAGVFDIDLDQPEDAGSEDELEEGGQLNESMDHGGVGPYELGMEHCEKFEISETSVNRGPEKIRPECFELLRVLGKGGYGKVFQVRKVTGANTGKIFAMKVLKKAMIVRNAKDTAHTKAERNILEEVKHPFIVDLIYAFQTGGKLYLILEYLSGGELFMQLEREGIFMEDTACFYLAEISMALGHLHQKGIIYRDLKPENIMLNHQGHVKLTDFGLCKESIHDGTVTHTFCGTIEYMAPEILMRSGHNRAVDWWSLGALMYDMLTGAPPFTGENRKKTIDKILKCKLNLPPYLTQEARDLLKKLLKRNAASRLGAGPGDAGEVQAHPFFRHINWEELLARKVEPPFKPLLQSEEDVSQFDSKFTRQTPVDSPDDSTLSESANQVFLGFTYVAPSVLESVKEKFSFEPKIRSPRRFIGSPRTPVSPVKFSPGDFWGRGASASTANPQTPVEYPMETSGIEQMDVTMSGEASAPLPIRQPNSGPYKKQAFPMISKRPEHLRMNL

SEQ ID NO: 8231 - protein, 472 aa, Homo sapiens
MDHGGVGPYELGMEHCEKFEISETSVNRGPEKIRPECFELLRVLGKGGYGKVFQVRKVTGANTGKIFAMKVLKKAMIVRNAKDTAHTKAERNILEEVKHPFIVDLIYAFQTGGKLYLILEYLSGGELFMQLEREGIFMEDTACFYLAEISMALGHLHQKGIIYRDLKPENIMLNHQGHVKLTDFGLCKESIHDGTVTHTFCGTIEYMAPEILMRSGHNRAVDWWSLGALMYDMLTGAPPFTGENRKKTIDKILKCKLNLPPYLTQEARDLLKKLLKRNAASRLGAGPGDAGEVQAHPFFRHINWEELLARKVEPPFKPLLQSEEDVSQFDSKFTRQTPVDSPDDSTLSESANQVFLGFTYVAPSVLESVKEKFSFEPKIRSPRRFIGSPRTPVSPVKFSPGDFWGRGASASTANPQTPVEYPMETSGIEQMDVTMSGEASAPLPIRQPNSGPYKKQAFPMISKRPEHLRMNL

SEQ ID NO: 8232 - protein, 451 aa, Homo sapiens
MRRRRRRDGFYPAPDFRDREAEDMAGVFDIDLDQPEDAGSEDELEEGGQLNESMDHGGVGPYELGMEHCEKFEISETSVNRGPEKIRPECFELLRVLGKGGYGKVFQVRKVTGANTGKIFAMKVLKKAMIVRNAKDTAHTKAERNILEEVKHPFIVDLIYAFQTGGKLYLILEYLSGGELFMQLEREGIFMEDTACFYLAEISMALGHLHQKGIIYRDLKPENIMLNHQGHVKLTDFGLCKESIHDGTVTHTFCGTIEYMAPEILMRSGHNRAVDWWSLGALMYDMLTGAPPFTGENRKKTIDKILKCKLNLPPYLTQEARDLLKKLLKRNAASRLGAGPGDAGEVQAHPFFRHINWEELLARKVEPPFKPLLQSEEDVSQFDSKFTRQTPVDSPDDSTLSESANQVFLGFTYVAPSVLESVKEKFSFEPKIRSPRRFIGSPRTPVSTAMC

SEQ ID NO: 8233 - protein, 502 aa, Homo sapiens
MRRRRRRDGFYPAPDFRDREAEDMAGVFDIDLDQPEDAGSEDELEEGGQLNESMDHGGVGPYELGMEHCEKFEISETSVNRGPEKIRPECFELLRVLGKGGYGKAMIVRNAKDTAHTKAERNILEEVKHPFIVDLIYAFQTGGKLYLILEYLSGGELFMQLEREGIFMEDTACFYLAEISMALGHLHQKGIIYRDLKPENIMLNHQGHVKLTDFGLCKESIHDGTVTHTFCGTIEYMAPEILMRSGHNRAVDWWSLGALMYDMLTGAPPFTGENRKKTIDKILKCKLNLPPYLTQEARDLLKKLLKRNAASRLGAGPGDAGEVQAHPFFRHINWEELLARKVEPPFKPLLQSEEDVSQFDSKFTRQTPVDSPDDSTLSESANQVFLGFTYVAPSVLESVKEKFSFEPKIRSPRRFIGSPRTPVSPVKFSPGDFWGRGASASTANPQTPVEYPMETSGIEQMDVTMSGEASAPLPIRQPNSGPYKKQAFPMISKRPEHLRMNL

SEQ ID NO: 8234 - protein, 643 aa, Homo sapiens
MKVLKKATLKVRDRVRTKMERDILADVNHPFVVKLHYAFQTEGKLYLILDFLRGGDLFTRLSKEVMFTEEDVKFYLAELALGLDHLHSLGIIYRDLKPENILLDEEGHIKLTDFGLSKEAIDHEKKAYSFCGTVEYMAPEVVNRQGHSHSADWWSYGVLMFEMLTGSLPFQGKDRKETMTLILKAKLGMPQFLSTEAQSLLRALFKRNPANRLGSGPDGAEEIKRHVFYSTIDWNKLYRREIKPPFKPAVAQPDDTFYFDTEFTSRTPKDSPGIPPSAGAHQLFRGFSFVATGLMEDDGKPRAPQAPLHSVVQQLHGKNLVFSDGYVVKETIGVGSYSECKRCVHKATNMEYAVKVIDKSKRDPSEEIEILLRYGQHPNIITLKDVYDDGKHVYLVTELMRGGELLDKILRQKFFSEREASFVLHTIGKTVEYLHSQGVVHRDLKPSNILYVDESGNPECLRICDFGFAKQLRAENGLLMTPCYTANFVAPEVLKRQGYDEGCDIWSLGILLYTMLAGYTPFANGPSDTPEEILTRIGSGKFTLSGGNWNTVSETAKDLVSKMLHVDPHQRLTAKQVLQHPWVTQKDKLPQSQLSHQDLQLVKGAMAATYSALNSSKPTPQLKPIESSILAQRRVRKLPSTTL

SEQ ID NO: 8235 - protein, 228 aa, Homo sapiens
MPQFLSTEAQSLLRALFKRNPANRLGSGPDGAEEIKRHVFYSTIDWNKLYRREIKPPFKPAVAQPDDTFYFDTEFTSRTPKDSPGIPPSAGAHQLFRGFSFVATGLMEDDGKPRAPQAPLHSVVQVIDKSKRDPSEEIEILLRYGQHPNIITLKDVYDDGKHVYLVTELMRGGELLDKILRQKFFSEREASFVLHTIGKTVEYLHSQGVVHRDLKPSNILYVDESGNP

SEQ ID NO: 8236 - protein, 735 aa, Homo sapiens
MPLAQLKEPWPLMELVPLDPENGQTSGEEAGLQPSKDEGVLKEISITHHVKAGSEKADPSHFELLKVLGQGSFGKVFLVRKVTRPDSGHLYAMKVLKKATLKVRDRVRTKMERDILADVNHPFVVKLHYAFQTEGKLYLILDFLRGGDLFTRLSKEVMFTEEDVKFYLAELALGLDHLHSLGIIYRDLKPENILLDEEGHIKLTDFGLSKEAIDHEKKAYSFCGTVEYMAPEVVNRQGHSHSADWWSYGVLMFEMLTGSLPFQGKDRKETMTLILKAKLGMPQFLSTEAQSLLRALFKRNPANRLGSGPDGAEEIKRHVFYSTIDWNKLYRREIKPPFKPAVAQPDDTFYFDTEFTSRTPKDSPGIPPSAGAHQLFRGFSFVATGLMEDDGKPRAPQAPLHSVVQQLHGKNLVFSDGYVVKETIGVGSYSECKRCVHKATNMEYAVKVIDKSKRDPSEEIEILLRYGQHPNIITLKDVYDDGKHVYLVTELMRGGELLDKILRQKFFSEREASFVLHTIGKTVEYLHSQGVVHRDLKPSNILYVDESGNPECLRICDFGFAKQLRAENGLLMTPCYTANFVAPEVLKRQGYDEGCDIWSLGILLYTMLAGYTPFANGPSDTPEEILTRIGSGKFTLSGGNWNTVSETAKDLVSKMLHVDPHQRLTAKQVLQHPWVTQKDKLPQSQLSHQDLQLVKGAMAATYSALNSSKPTPQLKPIESSILAQRRVRKLPSTTL

SEQ ID NO: 8237 - protein, 166 aa, Homo sapiens
AQPDDTFYFDTEFTSRTPKDSPGIPPSAGAHQLFRGFSFVATGLMEDDGKPRAPQAPLHSVVQVIDKSKRDPSEEIEILLRYGQHPNIITLKDVYDDGKHVYLVTELMRGGELLDKILRQKFFSEREASFVLHTIGKTVEYLHSQGVVHRDLKPSNILYVDESGNP

SEQ ID NO: 8238 - protein, 719 aa, Homo sapiens
MQTPADFPRVERDLVPCPRKDEGVLKEISITHHVKAGSEKADPSHFELLKVLGQGSFGKVFLVRKVTRPDSGHLYAMKVLKKATLKVRDRVRTKMERDILADVNHPFVVKLHYAFQTEGKLYLILDFLRGGDLFTRLSKEVMFTEEDVKFYLAELALGLDHLHSLGIIYRDLKPENILLDEEGHIKLTDFGLSKEAIDHEKKAYSFCGTVEYMAPEVVNRQGHSHSADWWSYGVLMFEMLTGSLPFQGKDRKETMTLILKAKLGMPQFLSTEAQSLLRALFKRNPANRLGSGPDGAEEIKRHVFYSTIDWNKLYRREIKPPFKPAVAQPDDTFYFDTEFTSRTPKDSPGIPPSAGAHQLFRGFSFVATGLMEDDGKPRAPQAPLHSVVQQLHGKNLVFSDGYVVKETIGVGSYSECKRCVHKATNMEYAVKVIDKSKRDPSEEIEILLRYGQHPNIITLKDVYDDGKHVYLVTELMRGGELLDKILRQKFFSEREASFVLHTIGKTVEYLHSQGVVHRDLKPSNILYVDESGNPECLRICDFGFAKQLRAENGLLMTPCYTANFVAPEVLKRQGYDEGCDIWSLGILLYTMLAGYTPFANGPSDTPEEILTRIGSGKFTLSGGNWNTVSETAKDLVSKMLHVDPHQRLTAKQVLQHPWVTQKDKLPQSQLSHQDLQLVKGAMAATYSALNSSKPTPQLKPIESSILAQRRVRKLPSTTL

SEQ ID NO: 8239 - protein, 744 aa, Homo sapiens
MEQDPKPPRLRLWALIPWLPRKQRPRISQTSLPVPGPGSGPQRDSDEGVLKEISITHHVKAGSEKADPSHFELLKVLGQGSFGKVFLVRKVTRPDSGHLYAMKVLKKATLKVRDRVRTKMERDILADVNHPFVVKLHYAFQTEGKLYLILDFLRGGDLFTRLSKEVMFTEEDVKFYLAELALGLDHLHSLGIIYRDLKPENILLDEEGHIKLTDFGLSKEAIDHEKKAYSFCGTVEYMAPEVVNRQGHSHSADWWSYGVLMFEMLTGSLPFQGKDRKETMTLILKAKLGMPQFLSTEAQSLLRALFKRNPANRLGSGPDGAEEIKRHVFYSTIDWNKLYRREIKPPFKPAVAQPDDTFYFDTEFTSRTPKDSPGIPPSAGAHQLFRGFSFVATGLMEDDGKPRAPQAPLHSVVQQLHGKNLVFSDGYVVKETIGVGSYSECKRCVHKATNMEYAVKVIDKSKRDPSEEIEILLRYGQHPNIITLKDVYDDGKHVYLVTELMRGGELLDKILRQKFFSEREASFVLHTIGKTVEYLHSQGVVHRDLKPSNILYVDESGNPECLRICDFGFAKQLRAENGLLMTPCYTANFVAPEVLKRQGYDEGCDIWSLGILLYTMLAGYTPFANGPSDTPEEILTRIGSGKFTLSGGNWNTVSETAKDLVSKMLHVDPHQRLTAKQVLQHPWVTQKDKLPQSQLSHQDLQLVKGAMAATYSALNSSKPTPQLKPIESSILAQRRVRKLPSTTL

SEQ ID NO: 8240 - protein, 733 aa, Homo sapiens
MDLSMKKFAVRRFFSVYLRRKSRSKSSSLSRLEEEGVVKEIDISHHVKEGFEKADPSQFELLKVLGQGSYGKVFLVRKVKGSDAGQLYAMKVLKKATLKVRDRVRSKMERDILAEVNHPFIVKLHYAFQTEGKLYLILDFLRGGDLFTRLSKEVMFTEEDVKFYLAELALALDHLHSLGIIYRDLKPENILLDEEGHIKITDFGLSKEAIDHDKRAYSFCGTIEYMAPEVVNRRGHTQSADWWSFGVLMFEMLTGSLPFQGKDRKETMALILKAKLGMPQFLSGEAQSLLRALFKRNPCNRLGAGIDGVEEIKRHPFFVTIDWNTLYRKEIKPPFKPAVGRPEDTFHFDPEFTARTPTDSPGVPPSANAHHLFRGFSFVASSLIQEPSQQDLHKVPVHPIVQQLHGNNIHFTDGYEIKEDIGVGSYSVCKRCVHKATDTEYAVKIIDKSKRDPSEEIEILLRYGQHPNIITLKDVYDDGKFVYLVMELMRGGELLDRILRQRYFSEREASDVLCTITKTMDYLHSQGVVHRDLKPSNILYRDESGSPESIRVCDFGFAKQLRAGNGLLMTPCYTANFVAPEVLKRQGYDAACDIWSLGILLYTMLAGFTPFANGPDDTPEEILARIGSGKYALSGGNWDSISDAAKDVVSKMLHVDPHQRLTAMQVLKHPWVVNREYLSPNQLSRQDVHLVKGAMAATYFALNRTPQAPRLEPVLSSNLAQRRGMKRLTSTRL

SEQ ID NO: 8241 - protein, 166 aa, Homo sapiens
MFTEEDVKFYLAELALALDHLHSLGIIYRDLKPENILLDEEGHIKITDFGLSKEAIDHDKRAYSFCGTIEYMAPEVVNRRGHTQSADWWSFGVLMFEMLTGSLPFQGKDRKETMALILKAKLGMPQFLSGEAQSLLRALFKRNPCNRLGEKTALCPRVSCSRLLGF

SEQ ID NO: 8242 - protein, 644 aa, Homo sapiens
MKVLKKATLKVRDRVRSKMERDILAEVNHPFIVKLHYAFQTEGKLYLILDFLRGGDLFTRLSKEVMFTEEDVKFYLAELALALDHLHSLGIIYRDLKPENILLDEEGHIKITDFGLSKEAIDHDKRAYSFCGTIEYMAPEVVNRRGHTQSADWWSFGVLMFEMLTGSLPFQGKDRKETMALILKAKLGMPQFLSGEAQSLLRALFKRNPCNRLGAGIDGVEEIKRHPFFVTIDWNTLYRKEIKPPFKPAVGRPEDTFHFDPEFTARTPTDSPGVPPSANAHHLFRGFSFVASSLIQEPSQQDLHKVPVHPIVQQLHGNNIHFTDGYEIKEDIGVGSYSVCKRCVHKATDTEYAVKIIDKSKRDPSEEIEILLRYGQHPNIITLKDVYDDGKFVYLVMELMRGGELLDRILRQRYFSEREASDVLCTITKTMDYLHSQGVVHRDLKPSNILYRDESGSPESIRVCDFGFAKQLRAGNGLLMTPCYTANFVAPEVLKRQGYDAACDIWSLGILLYTMLAGFTPFANGPDDTPEEILARIGSGKYALSGGNWDSISDAAKDVVSKMLHVDPHQRLTAMQVLKHPWVVNREYLSPNQLSRQDVHLVKGAMAATYFALNRTPQAPRLEPVLSSNLAQRRGMKRLTSTRL

SEQ ID NO: 8243 - protein, 644 aa, Homo sapiens; identical to SEQ ID NO: 8242

SEQ ID NO: 8244 - protein, 741 aa, Homo sapiens
MPIAQLLELWKKIEVEPMEIETTEEDLNLDVEPTTEDTAEEEEGVVKEIDISHHVKEGFEKADPSQFELLKVLGQGSYGKVFLVRKVKGSDAGQLYAMKVLKKATLKVRDRVRSKMERDILAEVNHPFIVKLHYAFQTEGKLYLILDFLRGGDLFTRLSKEVMFTEEDVKFYLAELALALDHLHSLGIIYRDLKPENILLDEEGHIKITDFGLSKEAIDHDKRAYSFCGTIEYMAPEVVNRRGHTQSADWWSFGVLMFEMLTGSLPFQGKDRKETMALILKAKLGMPQFLSGEAQSLLRALFKRNPCNRLGAGIDGVEEIKRHPFFVTIDWNTLYRKEIKPPFKPAVGRPEDTFHFDPEFTARTPTDSPGVPPSANAHHLFRGFSFVASSLIQEPSQQDLHKVPVHPIVQQLHGNNIHFTDGYEIKEDIGVGSYSVCKRCVHKATDTEYAVKIIDKSKRDPSEEIEILLRYGQHPNIITLKDVYDDGKFVYLVMELMRGGELLDRILRQRYFSEREASDVLCTITKTMDYLHSQGVVHRDLKPSNILYRDESGSPESIRVCDFGFAKQLRAGNGLLMTPCYTANFVAPEVLKRQGYDAACDIWSLGILLYTMLAGFTPFANGPDDTPEEILARIGSGKYALSGGNWDSISDAAKDVVSKMLHVDPHQRLTAMQVLKHPWVVNREYLSPNQLSRQDVHLVKGAMAATYFALNRTPQAPRLEPVLSSNLAQRRGMKRLTSTRL

SEQ ID NO: 8245 - protein, 171 aa, Homo sapiens
MPIAQLLELWKKIEVEPMEIETTEEDLNLDVEPTTEDTAEEGKSDSAACKTKVAGSVEEEGVVKEIDISHHVKEGFEKADPSQFELLKVLGQGSYGKVFLVRKVKGSDAGQLYAMKVLKKATLKVRDRVRSKMERDILAEVNHPFIVKLHYAFQTEGKLYLILDFLRGGDL

SEQ ID NO: 8246 - protein, 758 aa, Homo sapiens
MPIAQLLELWKKIEVEPMEIETTEEDLNLDVEPTTEDTAEEGKSDSAACKTKVAGSVEEEGVVKEIDISHHVKEGFEKADPSQFELLKVLGQGSYGKVFLVRKVKGSDAGQLYAMKVLKKATLKVRDRVRSKMERDILAEVNHPFIVKLHYAFQTEGKLYLILDFLRGGDLFTRLSKEVMFTEEDVKFYLAELALALDHLHSLGIIYRDLKPENILLDEEGHIKITDFGLSKEAIDHDKRAYSFCGTIEYMAPEVVNRRGHTQSADWWSFGVLMFEMLTGSLPFQGKDRKETMALILKAKLGMPQFLSGEAQSLLRALFKRNPCNRLGAGIDGVEEIKRHPFFVTIDWNTLYRKEIKPPFKPAVGRPEDTFHFDPEFTARTPTDSPGVPPSANAHHLFRGFSFVASSLIQEPSQQDLHKVPVHPIVQQLHGNNIHFTDGYEIKEDIGVGSYSVCKRCVHKATDTEYAVKIIDKSKRDPSEEIEILLRYGQHPNIITLKDVYDDGKFVYLVMELMRGGELLDRILRQRYFSEREASDVLCTITKTMDYLHSQGVVHRDLKPSNILYRDESGSPESIRVCDFGFAKQLRAGNGLLMTPCYTANFVAPEVLKRQGYDAACDIWSLGILLYTMLAGFTPFANGPDDTPEEILARIGSGKYALSGGNWDSISDAAKDVVSKMLHVDPHQRLTAMQVLKHPWVVNREYLSPNQLSRQDVHLVKGAMAATYFALNRTPQAPRLEPVLSSNLAQRRGMKRLTSTRL

SEQ ID NO: 8247 - protein, 295 aa, Homo sapiens [sequence omitted]

SEQ ID NO: 8248 - protein, 264 aa, Homo sapiens
MSGALDVLQMKEEDVLKFLAAGTHLGGTNLDFQMEQYIYKRKSDGIYIINLKRTWEKLLLAARAIVAIENPADVSVISSRNTGQRAVLKFAAATGATPIAGRFTPGTFTNQIQAAFREPRLLVVTDPRADHQPLTEASYVNLPTIALCNTDSPLRYVDIAIPCNNKGAHSVGLMWWMLAREVLRMRGTISREHPWEVMPDLYFYRDPEEIEKEEQAAAEKAVTKEEFQGEWTAPAPEFTATQPEVADWSEGVQVPSVPIQQFPT

SEQ ID NO: 8249 - protein, 485 aa, Homo sapiens
MGEPGFFVTGDRAGGRSWCLRRVGMSAGWLLLEDGCEVTVGRGFGVTYQLVSKICPLMISRNHCVLKQNPEGQWTIMDNKSLNGVWLNRARLEPLRVYSIHQGDYIQLGVPLENKENAEYEYEVTEEDWETIYPCLSPKNDQMIEKNKELRTKRKFSLDELAGPGAEGPSNLKSKINKVSCESGQPVKSQGKGEVASTPSDNLDPKLTALEPSKTTGAPIYPGFPKVTEVHHEQKASNSSASQRSLQMFKVTMSRILRLKIQMQEKHEAVMNVKKQTQKGNSKKVVQMEQELQDLQSQLCAEQAQQQARVEQLEKTFQEEEQHLQGLEIAQGEKDLKQQLAQALQEHWALMEELNRSKKDFEAIIQAKNKELEQTKEEKEKMQAQKEEVLSHMNDVLENELQCIICSEYFIEAVTLNCAHSFCSYCINEWMKRKIECPICRKDIKSKTYSLVLDNCINKMVNNLSSEVKERRIVLIRERKAKRLF

SEQ ID NO: 8250 - protein, 98 aa, Homo sapiens
MGEPGFFVTGDRAGGRSWCLRRVGMSAGWLLLEDGCEVTVGRGFGVTYQLVSKICPLMISRNHCVLKQNPEGQWTIMDNKSFPSEKAEDFTAAGERFL

SEQ ID NO: 8251 - protein, 448 aa, Homo sapiens
MGEPGFFVTGDRAGGRSWCLRRVGMSAGWLLLEDGCEVTVGRGFGVTYQLVSKICPLMISRNHCVLKQNPEGQWTIMDNKSLNGVWLNRARLEPLRVYSIHQGDYIQLGVPLENKENAEYEYEVTEEDWETIYPCLSPKNDQMIEKNKELRTKRKFSLDELAGPGAEGPSNLKSKINKVSCESGQPVKSQGKGEVASTPSDNLDPKLTALEPSKTTGAPIYPGFPKVTEVHHEQKASNSSASQRSLQMFKVTMSRILRLKIQMQEKHEAVMNVKKQTQKGNSKKVVQMEQELQDLQSQLCAEQAQQQARVEQLEKTFQEEEQHLQGLEIAQGEKDLKQQLAQALQEHWALMEELNRSKKDFEAIIQAKNKELEQTKEEKEKMQAQKEEVLSHMNDVLENELQCIICSEYFIEQRDCSEDRALRAFERLPGSASLRWSGGFSLAVTPLL

SEQ ID NO: 8252 - protein, 530 aa, Homo sapiens
MADDIDIEAMLEAPYKKDENKLSSANGHEERSKKRKKSKSRSRSHERKRSKSKERKRSRDRERKKSKSRERKRSRSKERRRSRSRSRDRRFRGRYRSPYSGPKFNSAIRGKIGLPHSIKLSRRRSRSKSPFRKDKSPVREPIDNLTPEERDARTVFCMQLAARIRPRDLEEFFSTVGKVRDVRMISDRNSRRSKGIAYVEFVDVSSVPLAIGLTGQRVLGVPIIVQASQAEKNRAAAMANNLQKGSAGPMRLYVGSLHFNITEDMLRGIFEPFGRIESIQLMMDSETGRSKGYGFITFSDSECAKKALEQLNGFELAGRPMKVGHVTERTDASSASSFLDSDELERTGIDLGTTGRLQLMARLAEGTGLQIPPAAQQALQMSGSLAFGAVAEFSFVIDLQTRLSQQTEASALAAAASVQPLATQCFQLSNMFNPQTEEEVGWDTEIKDDVIEECNKHGGVIHIYVDKNSAQGNVYVKCPSIAAAIAAVNALHGRWFAGKMITAAYVPLPTYHNLFPDSMTATQLLVPSRR

SEQ ID NO: 8253 - protein, 423 aa, Homo sapiens
MADDIDIEAMLEAPYKKDENKLSSANGHEERSKKRKKSKSRSRSHERKRSKSKERKRSRDRERKKSKSRERKRSRSKERRRSRSRSRDRRFRGRYRSPYSGPKFNSAIRGKIGLPHSIKLSRRRSRSKSPFRKDKSPVREPIDNLTPEERDARTVFCMQLAARIRPRDLEEFFSTVGKVRDVRMISDRNSRRSKGIAYVEFVDVSSVPLAIGLTGQRVLGVPIIVQASQAEKNRAAAMANNLQKGSAGPMRLYVGSLHFNITEDMLRGIFEPFGRIESIQLMMDSETGRSKGYGFITFSDSECAKKALEQLNGFELAGRPMKVGHVTERTDASSASSFLDSDELERTGIDLGTTGRLQLMARLAEGTGLQIPPAAQQALQMSGSLAFGAVADLQTRLSQQTEALFVIMFWNEIWSDNMITLQL

SEQ ID NO: 8254 - protein, 524 aa, Homo sapiens
MADDIDIEAMLEAPYKKDENKLSSANGHEERSKKRKKSKSRSRSHERKRSKSKERKRSRDRERKKSKSRERKRSRSKERRRSRSRSRDRRFRGRYRSPYSGPKFNSAIRGKIGLPHSIKLSRRRSRSKSPFRKDKSPVREPIDNLTPEERDARTVFCMQLAARIRPRDLEEFFSTVGKVRDVRMISDRNSRRSKGIAYVEFVDVSSVPLAIGLTGQRVLGVPIIVQASQAEKNRAAAMANNLQKGSAGPMRLYVGSLHFNITEDMLRGIFEPFGRIESIQLMMDSETGRSKGYGFITFSDSECAKKALEQLNGFELAGRPMKVGHVTERTDASSASSFLDSDELERTGIDLGTTGRLQLMARLAEGTGLQIPPAAQQALQMSGSLAFGAVADLQTRLSQQTEASALAAAASVQPLATQCFQLSNMFNPQTEEEVGWDTEIKDDVIEECNKHGGVIHIYVDKNSAQGNVYVKCPSIAAAIAAVNALHGRWFAGKMITAAYVPLPTYHNLFPDSMTATQLLVPSRR

SEQ ID NO: 8255 - protein, 231 aa, Homo sapiens
MADDIDIEAMLEAPYKKDENKLSSANGHEERSKKRKKSKSRSRSHERKRSKSKERKRSRDRERKKSKSRERKRSRSKERRRSRSRSRDRRFRGRYRSPYSGPKFNSAIRGKIGLPHSIKLRRRSRSKSPFRKDKSPVREPIDNLTPEERDARTVFCMQLAARIRPRDLEEFFSTVGKVRDVRMISDRNSRRSKGIAYVEFVDVSSVPLAIGLTGQRVLGVPIIVQASQAEK

SEQ ID NO: 8256 - protein, 373 aa, Homo sapiens
MQLAARIRPRDLEEFFSTVGKVRDVRMISDRNSRRSKGIAYVEFVDVSSVPLAIGLTGQRVLGVPIIVQASQAEKNRAAAMANNLQKGSAGPMRLYVGSLHFNITEDMLRGIFEPFGRIESIQLMMDSETGRSKGYGFITFSDSECAKKALEQLNGFELAGRPMKVGHVTERTDASSASSFLDSDELERTGIDLGTTGRLQLMARLAEGTGLQIPPAAQQALQMSGSLAFGAVAEFSFVIDLQTRLSQQTEASALAAAASVQPLATQCFQLSNMFNPQTEEEVGWDTEIKDDVIEECNKHGGVIHIYVDKNSAQGNVYVKCPSIAAAIAAVNALHGRWFAGKMITAAYVPLPTYHNLFPDSMTATQLLVPSRR

SEQ ID NO: 8257 - protein, 193 aa, Homo sapiens
MADDIDIEAMLEAPYKKDENKLSSANGHEERSKKRKKSKSRSRSHERKRSKSKERKRSRDRERKKSKSRERKRSRSKERRRSRSRSRDRRFRGRYRSPYSGPKFNSAIRGKIGLPHSIKLSRRRSRSKSPFRKDKSPVREPIDNLTPEERDARTVFCMQLAARIRPRDLEEFFSTVGKVRDVRMISDRNSRRS

SEQ ID NO: 8258 - protein, 337 aa, Homo sapiens
  VARIANT 1: note = MOD_RES - Any amino acid
XSPFRKDKSPVREPIDNLTPEERDARTVFCMQLAARIRPRDLEEFFSTVGKVRDVRMISDRNSRRSKGIAYVEFVDVSSVPLAIGLTGQRVLGVPIIVQASQAEKNRAAAMANNLQKGSAGPMRLYVGSLHFNITEDMLRGIFEPFGRFSDSECAKKALEQLNGFELAGRPMKVGHVTERTDASSASSFLDSDELERTGIDLGTTGRLQLMARLAEGTGLQIPPAAQQALQMSGSLAFGAVAEFSFVIDLQTRLSQQTEASALAAAASVQPLATQCFQLSNMFNPQTEEEVGWDTEIKDDVIEECNKHGGVIHIYVDKNSAQGNVYVKCPSIAAAIA

SEQ ID NO: 8259 - protein, 508 aa, Homo sapiens
MADDIDIEAMLEAPYKKDENKLSSANGHEERSKKRKKSKSRSRSHERKRSKSKERKRSRDRERKKSKSRERKRSRSKERRRSRSRSRDRRFRGRYRSPYRRRSRSKSPFRKDKSPVREPIDNLTPEERDARTVFCMQLAARIRPRDLEEFFSTVGKVRDVRMISDRNSRRSKGIAYVEFVDVSSVPLAIGLTGQRVLGVPIIVQASQAEKNRAAAMANNLQKGSAGPMRLYVGSLHFNITEDMLRGIFEPFGRIESIQLMMDSETGRSKGYGFITFSDSECAKKALEQLNGFELAGRPMKVGHVTERTDASSASSFLDSDELERTGIDLGTTGRLQLMARLAEGTGLQIPPAAQQALQMSGSLAFGAVAEFSFVIDLQTRLSQQTEASALAAAASVQPLATQCFQLSNMFNPQTEEEVGWDTEIKDDVIEECNKHGGVIHIYVDKNSAQGNVYVKCPSIAAAIAAVNALHGRWFAGKMITAAYVPLPTYHNLFPDSMTATQLLVPSRR

SEQ ID NO: 8260 - protein, 391 aa, Homo sapiens
MVEADRPGKLFIGGLNTETNEKALEAVFGKYGRIVEVLLMKDRETNKSRGFAFVTFESPADAKDAARDMNGKSLDGKAIKVEQATKPSFESGRRGPPPPPRSRGPPRGLRGGRGGSGGTRGPPSRGGHMDDGGYSMNFNMSSSRGPLPVKRGPPPRSGGPPPKRSAPSGPVRSSSGMGGRAPVSRGRDSYGGPPRREPLPSRRDVYLSPRDDGYSTKDSYSSRDYPSSRDTRDYAPPPRDYTYRDYGHSSSRDDYPSRGYSDRDGYGRDRDYSDHPSGGSYRDSYESYGNSRSAPPTRGPPPSYGGSSRYDDYSSSRDGYGGSRDSYSSSRSDLYSSGRDRVGRQERGLPPSMERGYPPPRDSYSSSSRGAPRGGGRGGSRSDRGGGRSRY

SEQ ID NO: 8261 - protein, 102 aa, Homo sapiens
  VARIANT 1: note = MOD_RES - Any amino acid
XMFICPQEMMGILLKTAIQAEITQVLVILEIMHHHHEIILTVIMVIPVHVMTIHQEDIAIEMDMVVIVTIQIIQVEVPTEIHMRVMVGDFAHYGRGVLIDSQ

SEQ ID NO: 8262 - protein, 196 aa, Homo sapiens
MVEADRPGKLFIGGLNTETNEKALEAVFGKYGRIVEVLLMKDRETNKSRGFAFVTFESPADAKDAARDMNGKLLYHVEEIVMEVHLEGNRCPLVEMFICPQEMMGILLKTAIQAEITQVLVILEIMHHHHEIILTVIMVIPVHVMTIHQEDIAIEMDMVVIVTIQIIQVEVPTEIHMRVMVGDFAHYGRGVLIDSQ

SEQ ID NO: 8263 - protein, 378 aa, Homo sapiens
MVEADRPGKLFIGGLNTETNEKALEAVFGKYGRIVEVLLMKDRESPADAKDAARDMNGKSLDGKAIKVEQATKPSFESGRRGPPPPPRSRGPPRGLRGGRGGSGGTRGPPSRGGHMDDGGYSMNFNMSSSRGPLPVKRGPPPRSGGPPPKRSAPSGPVRSSSGMGGRAPVSRGRDSYGGPPRREPLPSRRDVYLSPRDDGYSTKDSYSSRDYPSSRDTRDYAPPPRDYTYRDYGHSSSRDDYPSRGYSDRDGYGRDRDYSDHPSGGSYRDSYESYGNSRSAPPTRGPPPSYGGSSRYDDYSSSRDGYGGSRDSYSSSRSDLYSSGRDRVGRQERGLPPSMERGYPPPRDSYSSSSRGAPRGGGRGGSRSDRGGGRSRY

SEQ ID NO: 8264 - protein, 480 aa, Homo sapiens
MASDSIFESFPSYPQCFMRECILGMNPSRDVHDASTSRRFTPPSTALSPGKMSEALPLGAPDAGAALAGKLRSGDRSMVEVLADHPGELVRTDSPNFLCSVLPTHWRCNKTLPIAFKVVALGDVPDGTLVTVMAGNDENYSAELRNATAAMKNQVARFNDLRFVGRSGRGKSFTLTITVFTNPPQVATYHRAIKITVDGPREPRRHRQKLDDQTKPGSLSFSERLSELEQLRRTAMRVSPHHPAPTPNPRASLNHSTAFNPQPQSQMQDTRQIQPSPPWSYDQSYQYLGSIASPSVHPATPISPGRASGMTTLSAELSSRLSTAPDLTAFSDPRQFPALPSISDPRMHYPGAFTYSPTPVTSGIGIGMSAMGSATRYHTYLPPPYPGSSQAQGGPFQASSPSYHLYYGASAGSYQFSMVGGERSPPRILPPCTNASTGSALLNPSLPNQSDVVEAEGSHSNSPTNMAPSARLEEAVWRPY

SEQ ID NO: 8265 - protein, 468 aa, Homo sapiens
MPAAPRGPAQGEAAARTRSRDASTSRRFTPPSTALSPGKMSEALPLGAPDAGAALAGKLRSGDRSMVEVLADHPGELVRTDSPNFLCSVLPTHWRCNKTLPIAFKVVALGDVPDGTLVTVMAGNDENYSAELRNATAAMKNQVARFNDLRFVGRSGRGKSFTLTITVFTNPPQVATYHRAIKITVDGPREPRRHRQKLDDQTKPGSLSFSERLSELEQLRRTAMRVSPHHPAPTPNPRASLNHSTAFNPQPQSQMQDTRQIQPSPPWSYDQSYQYLGSIASPSVHPATPISPGRASGMTTLSAELSSRLSTAPDLTAFSDPRQFPALPSISDPRMHYPGAFTYSPTPVTSGIGIGMSAMGSATRYHTYLPPPYPGSSQAQGGPFQASSPSYHLYYGASAGSYQFSMVGGERSPPRILPPCTNASTGSALLNPSLPNQSDVVEAEGSHSNSPTNMAPSARLEEAVWRPY

SEQ ID NO: 8266 - protein, 453 aa, Homo sapiens
MRIPVDASTSRRFTPPSTALSPGKMSEALPLGAPDAGAALAGKLRSGDRSMVEVLADHPGELVRTDSPNFLCSVLPTHWRCNKTLPIAFKVVALGDVPDGTLVTVMAGNDENYSAELRNATAAMKNQVARFNDLRFVGRSGRGKSFTLTITVFTNPPQVATYHRAIKITVDGPREPRRHRQKLDDQTKPGSLSFSERLSELEQLRRTAMRVSPHHPAPTPNPRASLNHSTAFNPQPQSQMQDTRQIQPSPPWSYDQSYQYLGSIASPSVHPATPISPGRASGMTTLSAELSSRLSTAPDLTAFSDPRQFPALPSISDPRMHYPGAFTYSPTPVTSGIGIGMSAMGSATRYHTYLPPPYPGSSQAQGGPFQASSPSYHLYYGASAGSYQFSMVGGERSPPRILPPCTNASTGSALLNPSLPNQSDVVEAEGSHSNSPTNMAPSARLEEAVWRPY

SEQ ID NO: 8267 - protein, 475 aa, Homo sapiens
MNPSRDVHDASTSRRFTPPSTALSPGKMSEALPLGAPDAGAALAGKLRSGDRSMVEVLADHPGELVRTDSPNFLCSVLPTHWRCNKTLPIAFKVVALGDVPDGTLVTVMAGNDENYSAELRNATAAMKNQVARFNDLRFVGRSGRGKSFTLTITVFTNPPQVATYHRAIKITVDGPREPRRHRQKLDDQTKPGSLSFSERLSELEQLRRTAMRVSPHHPAPTPNPRASLNHSTAFNPQPQSQMQDTRQIQPSPPWSYDQSYQYLGSIASPSVHPATPISPGRASGMTTLSAELSSRLSTAPDLTAFSDPRQFPALPSISDPRMHYPGAFTYSPTPVTSGIGIGMSAMGSATRYHTYLPPPYPGSSQAQGGPFQASSPSYHLYYGASAGSYQFSMVGGERSPPRILPPCTNASTGSALLNPSLPNQSDVVEAEGSHSNSPTNMARASCSRQARRDPGPWARPPSWGRGRPTARISL

SEQ ID NO: 8268 - protein, 32 aa, Homo sapiens
MASDSIFESFPSYPQCFMRECILGMNPSRDVH

SEQ ID NO: 8269 - protein, 137 aa, Homo sapiens
MQDTRQIQPSPPWSYDQSYQYLGSIASPSVHPATPISPGRASGMTTLSAELSSRLSTAPDLTAFSDPRQFPALPSISDPRMHYPGAFTYSPTPVTSGIGIGMSAMGSATRYHTYLPPPYPGSSQAQGGPFQASSPSY

SEQ ID NO: 8270 - protein, 480 aa, Homo sapiens; identical to SEQ ID NO: 8264

SEQ ID NO: 8271 - protein, 191 aa, Homo sapiens
MNPSRDVHDASTSRRFTPPSTALSPGKMSEALPLGAPDAGAALAGKLRSGDRSMVEVLADHPGELVRTDSPNFLCSVLPTHWRCNKTLPIAFKVVALGDVPDGTLVTVMAGNDENYSAELRNATAAMKNQVARFNDLRFVGRSGRGKSFTLTITVFTNPPQVATYHRAIKITVDGPREPRNSLTWPRYPHI

SEQ ID NO: 8272 - protein, 250 aa, Homo sapiens
MRIPVDASTSRRFTPPSTALSPGKMSEALPLGAPDAGAALAGKLRSGDRSMVEVLADHPGELVRTDSPNFLCSVLPTHWRCNKTLPIAFKVVALGDVPDGTLVTVMAGNDENYSAELRNATAAMKNQVARFNDLRFVGRSGRGKSFTLTITVFTNPPQVATYHRAIKITVDGPREPRRHRQKLDDQTKPGSLSFSERLSELEQLRRTAMRVSPHHPAPTPNPRASLNHSTAFNPQPQSQMQEEDTAPWRC

SEQ ID NO: 8273 - protein, 589 aa, Homo sapiens
MLHSPHKQPQNHKCGANFLQEDSKKSLVFKWLISAGHYQPPRPTESFKAASSIYNRGYKFYLKKKGGTMASNSLFSTVTPCQQNFFWDPSTSRRFSPPSSSLQPGKMSDVSPVVAAQQQQQQQQQQQQQQQQQQQQQQQEAAAAAAAAAAAAAAAAAVPRLRPPHDNRTMVEIIADHPAELVRTDSPNFLCSVLPSHWRCNKTLPVAFKVVALGEVPDGTVVTVMAGNDENYSAELRNASAVMKNQVARFNDLRFVGRSGRGKSFTLTITVFTNPPQVATYHRAIKVTVDGPREPRRHRQKLDDSKPSLFSDRLSDLGRIPHPSMRVGVPPQNPRPSLNSAPSPFNPQGQSQITDPRQAQSSPPWSYDQSYPSYLSQMTSPSIHSTTPLSSTRGTGLPAITDVPRRISDDDTATSDFCLWPSTLSKKSQAGASELGPFSDPRQFPSISSLTESRFSNPRMHYPATFTYTPPVTSGMSLGMSATTHYHTYLPPPYPGSSQSQSGPFQTSSTPYLYYGTSSGSYQFPMVPGGDRSPSRMLPPCTTTSNGSTLLNPNLPNQNDGVDADGSHSSSPTVLNSSGRMDESVWRPY

SEQ ID NO: 8274 - protein, 507 aa, Homo sapiens
MRIPVDPSTSRRFSPPSSSLQPGKMSDVSPVVAAQQQQQQQQQQQQQQQQQQQQQQQEAAAAAAAAAAAAAAAAAVPRLRPPHDNRTMVEIIADHPAELVRTDSPNFLCSVLPSHWRCNKTLPVAFKVVALGEVPDGTVVTVMAGNDENYSAELRNASAVMKNQVARFNDLRFVGRSGRGKSFTLTITVFTNPPQVATYHRAIKVTVDGPREPRRHRQKLDDSKPSLFSDRLSDLGRIPHPSMRVGVPPQNPRPSLNSAPSPFNPQGQSQITDPRQAQSSPPWSYDQSYPSYLSQMTSPSIHSTTPLSSTRGTGLPAITDVPRRISDDDTATSDFCLWPSTLSKKSQAGASELGPFSDPRQFPSISSLTESRFSNPRMHYPATFTYTPPVTSGMSLGMSATTHYHTYLPPPYPGSSQSQSGPFQTSSTPYLYYGTSSGSYQFPMVPGGDRSPSRMLPPCTTTSNGSTLLNPNLPNQNDGVDADGSHSSSPTVLNSSGRMDESVWRPY

SEQ ID NO: 8275 - protein, 485 aa, Homo sapiens
MRIPVDPSTSRRFSPPSSSLQPGKMSDVSPVVAAQQQQQQQQQQQQQQQQQQQQQQQEAAAAAAAAAAAAAAAAAVPRLRPPHDNRTMVEIIADHPAELVRTDSPNFLCSVLPSHWRCNKTLPVAFKVVALGEVPDGTVVTVMAGNDENYSAELRNASAVMKNQVARFNDLRFVGRSGRGKSFTLTITVFTNPPQVATYHRAIKVTVDGPREPRRHRQKLDDSKPSLFSDRLSDLGRIPHPSMRVGVPPQNPRPSLNSAPSPFNPQGQSQITDPRQAQSSPPWSYDQSYPSYLSQMTSPSIHSTTPLSSTRGTGLPAITDVPRRISGASELGPFSDPRQFPSISSLTESRFSNPRMHYPATFTYTPPVTSGMSLGMSATTHYHTYLPPPYPGSSQSQSGPFQTSSTPYLYYGTSSGSYQFPMVPGGDRSPSRMLPPCTTTSNGSTLLNPNLPNQNDGVDADGSHSSSPTVLNSSGRMDESVWRPY

SEQ ID NO: 8276 - protein, 499 aa, Homo sapiens
MASNSLFSTVTPCQQNFFWDPSTSRRFSPPSSSLQPGKMSDVSPVVAAQQQQQQQQQQQQQQQQQQQQQQQEAAAAAAAAAAAAAAAAAVPRLRPPHDNRTMVEIIADHPAELVRTDSPNFLCSVLPSHWRCNKTLPVAFKVVALGEVPDGTVVTVMAGNDENYSAELRNASAVMKNQVARFNDLRFVGRSGRGKSFTLTITVFTNPPQVATYHRAIKVTVDGPREPRRHRQKLDDSKPSLFSDRLSDLGRIPHPSMRVGVPPQNPRPSLNSAPSPFNPQGQSQITDPRQAQSSPPWSYDQSYPSYLSQMTSPSIHSTTPLSSTRGTGLPAITDVPRRISGASELGPFSDPRQFPSISSLTESRFSNPRMHYPATFTYTPPVTSGMSLGMSATTHYHTYLPPPYPGSSQSQSGPFQTSSTPYLYYGTSSGSYQFPMVPGGDRSPSRMLPPCTTTSNGSTLLNPNLPNQNDGVDADGSHSSSPTVLNSSGRMDESVWRPY

SEQ ID NO: 8277 - protein, 521 aa, Homo sapiens
MASNSLFSTVTPCQQNFFWDPSTSRRFSPPSSSLQPGKMSDVSPVVAAQQQQQQQQQQQQQQQQQQQQQQQEAAAAAAAAAAAAAAAAAVPRLRPPHDNRTMVEIIADHPAELVRTDSPNFLCSVLPSHWRCNKTLPVAFKVVALGEVPDGTVVTVMAGNDENYSAELRNASAVMKNQVARFNDLRFVGRSGRGKSFTLTITVFTNPPQVATYHRAIKVTVDGPREPRRHRQKLDDSKPSLFSDRLSDLGRIPHPSMRVGVPPQNPRPSLNSAPSPFNPQGQSQITDPRQAQSSPPWSYDQSYPSYLSQMTSPSIHSTTPLSSTRGTGLPAITDVPRRISDDDTATSDFCLWPSTLSKKSQAGASELGPFSDPRQFPSISSLTESRFSNPRMHYPATFTYTPPVTSGMSLGMSATTHYHTYLPPPYPGSSQSQSGPFQTSSTPYLYYGTSSGSYQFPMVPGGDRSPSRMLPPCTTTSNGSTLLNPNLPNQNDGVDADGSHSSSPTVLNSSGRMDESVWRPY

SEQ ID NO: 8278 - protein, 521 aa, Homo sapiens; identical to SEQ ID NO: 8277

SEQ ID NO: 8279 - protein, 567 aa, Homo sapiens
MLHSPHKQPQNHKCGANFLQEDSKKSLVFKWLISAGHYQPPRPTESFKAASSIYNRGYKFYLKKKGGTMASNSLFSTVTPCQQNFFWDPSTSRRFSPPSSSLQPGKMSDVSPVVAAQQQQQQQQQQQQQQQQQQQQQQQEAAAAAAAAAAAAAAAAAVPRLRPPHDNRTMVEIIADHPAELVRTDSPNFLCSVLPSHWRCNKTLPVAFKVVALGEVPDGTVVTVMAGNDENYSAELRNASAVMKNQVARFNDLRFVGRSGRGKSFTLTITVFTNPPQVATYHRAIKVTVDGPREPRRHRQKLDDSKPSLFSDRLSDLGRIPHPSMRVGVPPQNPRPSLNSAPSPFNPQGQSQITDPRQAQSSPPWSYDQSYPSYLSQMTSPSIHSTTPLSSTRGTGLPAITDVPRRISGASELGPFSDPRQFPSISSLTESRFSNPRMHYPATFTYTPPVTSGMSLGMSATTHYHTYLPPPYPGSSQSQSGPFQTSSTPYLYYGTSSGSYQFPMVPGGDRSPSRMLPPCTTTSNGSTLLNPNLPNQNDGVDADGSHSSSPTVLNSSGRMDESVWRPY

SEQ ID NO: 8280 - protein, 415 aa, Homo sapiens
MRIPVDPSTSRRFTPPSPAFPCGGGGGKMGENSGALSAQAAVGPGGRARPEVRSMVDVLADHAGELVRTDSPNFLCSVLPSHWRCNKTLPVAFKVVALGDVPDGTVVTVMAGNDENYSAELRNASAVMKNQVARFNDLRFVGRSGRGKSFTLTITVFTNPTQVATYHRAIKVTVDGPREPRRHRQKLEDQTKPFPDRFGDLERLRMRVTPSTPSPRGSLSTTSHFSSQPQTPIQGTSELNPFSDPRQFDRSFPTLPTLTESRFPDPRMHYPGAMSAAFPYSATPSGTSISSLSVAGMPATSRFHHTYLPPPYPGAPQNQSGPFQANPSPYHLYYGTSSGSYQFSMVAGSSSGGDRSPTRMLASCTSSAASVAAGNLMNPSLGGQSDGVEADGSHSNSPTALSTPGRMDEAVWRPY

SEQ ID NO: 8281 - protein, 429 aa, Homo sapiens
MASNSIFDSFPTYSPTFIRDPSTSRRFTPPSPAFPCGGGGGKMGENSGALSAQAAVGPGGRARPEVRSMVDVLADHAGELVRTDSPNFLCSVLPSHWRCNKTLPVAFKVVALGDVPDGTVVTVMAGNDENYSAELRNASAVMKNQVARFNDLRFVGRSGRGKSFTLTITVFTNPTQVATYHRAIKVTVDGPREPRRHRQKLEDQTKPFPDRFGDLERLRMRVTPSTPSPRGSLSTTSHFSSQPQTPIQGTSELNPFSDPRQFDRSFPTLPTLTESRFPDPRMHYPGAMSAAFPYSATPSGTSISSLSVAGMPATSRFHHTYLPPPYPGAPQNQSGPFQANPSPYHLYYGTSSGSYQFSMVAGSSSGGDRSPTRMLASCTSSAASVAAGNLMNPSLGGQSDGVEADGSHSNSPTALSTPGRMDEAVWRPY

SEQ ID NO: 8282 - protein, 429 aa, Homo sapiens; identical to SEQ ID NO: 8281

SEQ ID NO: 8283 - protein, 362 aa, Homo sapiens
MRIPVDPSTSRRFTPPSPAFPCGGGGGKMGENSGALSAQAAVGPGGRARPEVRSMVDVLADHAGELVRTDSPNFLCSVLPSHWRCNKTLPVAFKVVALGDVPDGTVVTVMAGNDENYSAELRNASAVMKNQVARFNDLRFVGRSGRGKSFTLTITVFTNPTQVATYHRAIKVTVDGPREPRRTSELNPFSDPRQFDRSFPTLPTLTESRFPDPRMHYPGAMSAAFPYSATPSGTSISSLSVAGMPATSRFHHTYLPPPYPGAPQNQSGPFQANPSPYHLYYGTSSGSYQFSMVAGSSSGGDRSPTRMLASCTSSAASVAAGNLMNPSLGGQSDGVEADGSHSNSPTALSTPGRMDEAVWRPY

SEQ ID NO: 8284 - protein, 322 aa, Homo sapiens
MVVALGDVPDGTVVTVMAGNDENYSAELRNASAVMKNQVARFNDLRFVGRSGRGKSFTLTITVFTNPTQVATYHRAIKVTVDGPREPRRHRQKLEDQTKPFPDRFGDLERLRMRVTPSTPSPRGSLSTTSHFSSQPQTPIQGTSELNPFSDPRQFDRSFPTLPTLTESRFPDPRMHYPGAMSAAFPYSATPSGTSISSLSVAGMPATSRFHHTYLPPPYPGAPQNQSGPFQANPSPYHLYYGTSSGSYQFSMVAGSSSGGDRSPTRMLASCTSSAASVAAGNLMNPSLGGQSDGVEADGSHSNSPTALSTPGRMDEAVWRPY

SEQ ID NO: 8285 - protein, 812 aa, Homo sapiens
MDFSRLHMYSPPQCVPENTGYTYALSSSYSSDALDFETEHKLDPVFDSPRMSRRSLRLATTACTLGDGEAVGADSGTSSAVSLKNRAARTTKQRRSTNKSAFSINHVSRQVTSSGVSHGGTVSLQDAVTRRPPVLDESWIREQTTVDHFWGLDDDGDLKGGNKAAIQGNGDVGAAAATAHNGFSCSNCSMLSERKDVLTAHPAAPGPVSRVYSRDRNQKCDDCKGKRHLDAHPGRAGTLWHIWACAGYFLLQILRRIGAVGQAVSRTAWSALWLAVVAPGKAASGVFWWLGIGWYQFVTLISWLNVFLLTRCLRNICKFLVLLIPLFLLLAGLSLRGQGNFFSFLPVLNWASMHRTQRVDDPQDVFKPTTSRLKQPLQGDSEAFPWHWMSGVEQQVASLSGQCHHHGENLRELTTLLQKLQARVDQMEGGAAGPSASVRDAVGQPPRETDFMAFHQEHEVRMSHLEDILGKLREKSEAIQKELEQTKQKTISAVGEQLLPTVEHLQLELDQLKSELSSWRHVKTGCETVDAVQERVDVQVREMVKLLFSEDQQGGSLEQLLQRFSSQFVSKGDLQTMLRDLQLQILRNVTHHVSVTKQLPTSEAVVSAVSEAGASGITEAQARAIVNSALKLYSQDKTGMVDFALESGGGSILSTRCSETYETKTALMSLFGIPLWYFSQSPRVVIQPDIYPGNCWAFKGSQGYLVVRLSMMIHPAAFTLEHIPKTLSPTGNISSAPKDFAVYGLENEYQEEGQLLGQFTYDQDGESLQMFQALKRPDDTAFQIVELRIFSNWGHPEYTCLYRFRVHGEPVK

SEQ ID NO: 8286 - protein, 702 aa, Homo sapiens
MSRRSLRLATTACTLGDGEAVGADSGTSSAVSLKNRAARTTKQRRSTNKSAFSINHVSRQVTSSGVSHGGTVSLQDAVTRRPPVLDESWIREQTTVDHFWGLDDDGDLKGGNKAAIQGNGDVGAAAATAHNGFSCSNCSMLSERKDVLTAHPAAPGPVSRVYSRDRNQKWKAASGVFWWLGIGWYQFVTLISWLNVFLLTRCLRNICKFLVLLIPLFLLLAGLSLRGQGNFFSFLPVLNWASMHRTQRVDDPQDVFKPTTSRLKQPLQGDSEAFPWHWMSGVEQQVASLSGQCHHHGENLRELTTLLQKLQARVDQMEGGAAGPSASVRDAVGQPPRETDFMAFHQEHEVRMSHLEDILGKLREKSEAIQKELEQTKQKTISAVGEQLLPTVEHLQLELDQLKSELSSWRHVKTGCETVDAVQERVDVQVREMVKLLFSEDQQGGSLEQLLQRFSSQFVSKGDLQTMLRDLQLQILRNVTHHVSVTKQLPTSEAVVSAVSEAGASGITEAQARAIVNSALKLYSQDKTGMVDFALESGGGSILSTRCSETYETKTALMSLFGIPLWYFSQSPRVVIQPDIYPGNCWAFKGSQGYLVVRLSMMIHPAAFTLEHIPKTLSPTGNISSAPKDFAVYGLENEYQEEGQLLGQFTYDQDGESLQMFQALKRPDDTAFQIVELRIFSNWGHPEYTCLYRFRVHGEPVK

SEQ ID NO: 8287 - protein, 785 aa, Homo sapiens
MDFSRLHMYSPPQCVPENTGYTYALSSSYSSDALDFETEHKLDPVFDSPRMSRRSLRLATTACTLGDGEAVGADSGTSSAVSLKNRAARTTKQRRSTNKSAFSINHVSRQVTSSGVSHGGTVSLQDAVTRRPPVLDESWIREQTTVDHFWGLDDDGDLKGGNKAAIQGNGDVGAAAATAHNGFSCSNCSMLSERKDVLTAHPAAPGPVSRVYSRDRNQKCYFLLQILRRIGAVGQAVSRTAWSALWLAVVAPGKAASGVFWWLGIGWYQFVTLISWLNVFLLTRCLRNICKFLVLLIPLFLLLAGLSLRGQGNFFSFLPVLNWASMHRTQRVDDPQDVFKPTTSRLKQPLQGDSEAFPWHWMSGVEQQVASLSGQCHHHGENLRELTTLLQKLQARVDQMEGGAAGPSASVRDAVGQPPRETDFMAFHQEHEVRMSHLEDILGKLREKSEAIQKELEQTKQKTISAVGEQLLPTVEHLQLELDQLKSELSSWRHVKTGCETVDAVQERVDVQVREMVKLLFSEDQQGGSLEQLLQRFSSQFVSKGDLQTMLRDLQLQILRNVTHHVSVTKQLPTSEAVVSAVSEAGASGITEAQARAIVNSALKLYSQDKTGMVDFALESGGGSILSTRCSETYETKTALMSLFGIPLWYFSQSPRVVIQPDIYPGNCWAFKGSQGYLVVRLSMMIHPAAFTLEHIPKTLSPTGNISSAPKDFAVYGLENEYQEEGQLLGQFTYDQDGESLQMFQALKRPDDTAFQIVELRIFSNWGHPEYTCLYRFRVHGEPVK

SEQ ID NO: 8288 - protein, 257 aa, Homo sapiens
MDFSRLHMYSPPQCVPENTGYTYALSSSYSSDALDFETEHKLDPVFDSPRMSRRSLRLATTACTLGDGEAVGADSGTSSAVSLKNRAARTTKQRRSTNKSAFSINHVSRQVTSSGVSHGGTVSLQDAVTRRPPVLDESWIREQTTVDHFWGLDDDGDLKGGNKAAIQGNGDVGAAAATAHNGFSCSNCSMLSERKDVLTAHPAAPGPVSRVYSRDRNQKCKSQSFKTQKKVCFPNLIFPFCKSQCLHYLSWRLKIIP

SEQ ID NO: 8289 - protein, 822 aa, Homo sapiens
MDFSRLHMYSPPQCVPENTGYTYALSSSYSSDALDFETEHKLDPVFDSPRMSRRSLRLATTACTLGDGEAVGADSGTSSAVSLKNRAARTTKQRRSTNKSAFSINHVSRQVTSSGVSHGGTVSLQDAVTRRPPVLDESWIREQTTVDHFWGLDDDGDLKGGNKAAIQGNGDVGAAAATAHNGFSCSNCSMLSERKDVLTAHPAAPGPVSRVYSRDRNQKCDDCKGKRHLDAHTAAHSQSPRLPGRAGTLWHIWACAGYFLLQILRRIGAVGQAVSRTAWSALWLAVVAPGKAASGVFWWLGIGWYQFVTLISWLNVFLLTRCLRNICKFLVLLIPLFLLLAGLSLRGQGNFFSFLPVLNWASMHRTQRVDDPQDVFKPTTSRLKQPLQGDSEAFPWHWMSGVEQQVASLSGQCHHHGENLRELTTLLQKLQARVDQMEGGAAGPSASVRDAVGQPPRETDFMAFHQEHEVRMSHLEDILGKLREKSEAIQKELEQTKQKTISAVGEQLLPTVEHLQLELDQLKSELSSWRHVKTGCETVDAVQERVDVQVREMVKLLFSEDQQGGSLEQLLQRFSSQFVSKGDLQTMLRDLQLQILRNVTHHVSVTKQLPTSEAVVSAVSEAGASGITEAQARAIVNSALKLYSQDKTGMVDFALESGGGSILSTRCSETYETKTALMSLFGIPLWYFSQSPRVVIQPDIYPGNCWAFKGSQGYLVVRLSMMIHPAAFTLEHIPKTLSPTGNISSAPKDFAVYGLENEYQEEGQLLGQFTYDQDGESLQMFQALKRPDDTAFQIVELRIFSNWGHPEYTCLYRFRVHGEPVK

SEQ ID NO: 8290 - protein, 583 aa, Homo sapiens
MKLSYESENYKLKTHESKDCESESYKSKSHESKAHASYYGRMNVREVLREDGHLSVNGEALWKAASGVFWWLGIGWYQFVTLISWLNVFLLTRCLRNICKFLVLLIPLFLLLAGLSLRGQGNFFSFLPVLNWASMHRTQRVDDPQDVFKPTTSRLKQPLQGDSEAFPWHWMSGVEQQVASLSGQCHHHGENLRELTTLLQKLQARVDQMEGGAAGPSASTDFMAFHQEHEVRMSHLEDILGKLREKSEAIQKELEQTKQKTISAVGEQLLPTVEHLQLELDQLKSELSSWRHVKTGCETVDAVQERVDVQVREMVKLLFSEDQQGGSLEQLLQRFSSQFVSKGDLQTMLRDLQLQILRNVTHHVSVTKQLPTSEAVVSAVSEAGASGITEAQARAIVNSALKLYSQDKTGMVDFALESGGGSILSTRCSETYETKTALMSLFGIPLWYFSQSPRVVIQPDIYPGNCWAFKGSQGYLVVRLSMMIHPAAFTLEHIPKTLSPTGNISSAPKDFAVYGLENEYQEEGQLLGQFTYDQDGESLQMFQALKRPDDTAFQIVELRIFSNWGHPEYTCLYRFRVHGEPVK

SEQ ID NO: 8291 - protein, 113 aa, Homo sapiens
MDFSRLHMYSPPQCVPENTGYTYALSSSYSSDALDFETEHKLDPVFDSPRMSRRSLRLATTACTLGDGEAVGADSGTSSAVSLKNRAARTTKQRRSTNKSAFSINHVSRQVTS

SEQ ID NO: 8292 - protein, 88 aa, Homo sapiens
MDFSRLHMYSPPQCVPENTGYTYALSSSYSSDALDFETEHKLDPVFDSPRMSRRSLRLATTACTLGDGEAVGADSGTSSAVSLKNRAA

SEQ ID NO: 8293 - protein, 702 aa, Homo sapiens; identical to SEQ ID NO: 8286

SEQ ID NO: 8294 - protein, 174 aa, Homo sapiens
MDFSRLHMYSPPQCVPENTGYTYALSSSYSSDALDFETEHKLDPVFDSPRMSRRSLRLATTACTLGDGEAVGADSGTSSAVSLKNRAARTTKQRRSTNKSAFSINHVSRQVTSSGVSHGGTVSLQDAVTRRPPVLDESWIREQTTVDHFWGLDDDGDLKGGNKAAIQGNGDVGA

SEQ ID NO: 8295 - protein, 135 aa, Homo sapiens
MDFSRLHMYSPPQCVPENTGYTYALSSSYSSDALDFETEHKLDPVFDSPRMSRRSLRLATTACTLGDGEAVGADSGTSSAVSLKNRAARTTKQRRSTNKSAFSINHVSRQVTSSGVSHGGTVSLQDAVTRRPPVL

SEQ ID NO: 8296 - protein, 88 aa, Homo sapiens; identical to SEQ ID NO: 8292

SEQ ID NO: 8297 - protein, 682 aa, Homo sapiens
MDFSRLHMYSPPQCVPENTGYTYALSSSYSSDALDFETEHKLDPVFDSPRMSRRSLRLATTACTLGDGEAVGADSGTSSAVSLKNRAARTTKQRRSTNKSAFSINHVSRQVTSSGVSHGGTVSLQDAVTRRPPVLDESWIREQTTVDHFWGKAASGVFWWLGIGWYQFVTLISWLNVFLLTRCLRNICKFLVLLIPLFLLLGLSLRGQGNFFSFLPVLNWASMHRTQRVDDPQDVFKPTTSRLKQPLQGDSEAFPWHWMSGVEQQVASLSGQCHHHGENLRELTTLLQKLQARVDQMEGGAAGPSASVRDAVGQPPRETDFMAFHQEHEVRMSHLEDILGKLREKSEAIQKELEQTKQKTISAVGEQLLPTVEHLQLELDQLKSELSSWRHVKTGCETVDAVQERVDVQVREMVKLLFSEDQQGGSLEQLLQRFSSQFVSKGDLQTMLRDLQLQILRNVTHHVSVTKQLPTSEAVVSAVSEAGASGITEAQARAIVNSALKLYSQDKTGMVDFALESGGGSILSTRCSETYETKTALMSLFGIPLWYFSQSPRVVIQPDIYPGNCWAFKGSQGYLVVRLSMMIHPAAFTLEHIPKTLSPTGNISSAPKDFAVYGLENEYQEEGQLLGQFTYDQDGESLQMFQALKRPDDTAFQIVELRIFSNWGHPEYTCLYRFRVHGEPVK

SEQ ID NO: 8298 - protein, 974 aa, Homo sapiens
MGDVRKAKEALAEVQIPPPDAGPSPRCKPPPAERLLGPGRRRRGLRRRREAVWFEVVNMDFSRLHMYSPPQCVPENTGYTYALSSSYSSDALDFETEHKLDPVFDSPRMSRRSLRLATTACTLGDGEAVGADSGTSSAVSLKNRAARTTKQRRSTNKSAFSINHVSRQVTSSGVSHGGTVSLQDAVTRRPPVLDESWIREQTTVDHFWGLDDDGDLKGGNKAAIQGNGDVGAAAATAHNGFSCSNCSMLSERKDVLTAHPAAPGPVSRVYSRDRNQKCGASFYVNRILWLARYTASSFSSFLVQLFQVVLMKLSYESENYKLKTHESKDCESESYKSKSHESKAHASYYGRMNVREVLREDGHLSVNGEALCDDCKGKRHLDAHTAAHSQSPRLPGRAGTLWHIWACAGYFLLQILRRIGAVGQAVSRTAWSALWLAVVAPGKAASGVFWWLGIGWYQFVTLISWLNVFLLTRCLRNICKFLVLLIPLFLLLAGLSLRGQGNFFSFLPVLNWASMHRTQRVDDPQDVFKPTTSRLKQPLQGDSEAFPWHWMSGVEQQVASLSGQCHHHGENLRELTTLLQKLQARVDQMEGGAAGPSASVRDAVGQPPRETDFMAFHQEHEVRMSHLEDILGKLREKSEAIQKELEQTKQKTISAVGEQLLPTVEHLQLELDQLKSELSSWRHVKTGCETVDAVQERVDVQVREMVKLLFSEDQQGGSLEQLLQRFSSQFVSKGDLQTMLRDLQLQILRNVTHHVSVTKQLPTSEAVVSAVSEAGASGITEAQARAIVNSALKLYSQDKTGMVDFALESGGGSILSTRCSETYETKTALMSLFGIPLWYFSQSPRVVIQPDIYPGNCWAFKGSQGYLVVRLSMMIHPAAFTLEHIPKTLSPTGNISSAPKDFAVYGLENEYQEEGQLLGQFTYDQDGESLQMFQALKRPDDTAFQIVELRIFSNWGHPEYTCLYRFRVHGEPVK

SEQ ID NO: 8299 - protein, 278 aa, Homo sapiens
MGRISPGSPGLPRTVWFEVVNMDFSRLHMYSPPQCVPENTGYTYALSSSYSSDALDFETEHKLDPVFDSPRMSRRSLRLATTACTLGDGEAVGADSGTSSAVSLKNRAARTTKQRRSTNKSAFSINHVSRQVTSSGVSHGGTVSLQDAVTRRPPVLDESWIREQTTVDHFWGLDDDGDLKGGNKAAIQGNGDVGAAAATAHNGFSCSNCSMLSERKDVLTAHPAAPGPVSRVYSRDRNQKCKSQSFKTQKKVCFPNLIFPFCKSQCLHYLSWRLKIIP

SEQ ID NO: 8300 - protein, 119 aa, Homo sapiens
MDFSRLHMYSPPQCVPENTGYTYALSSSYSSDALDFETEHKLDPVFDSPRMSRRSLRLATTACTLGDGEAVGADSGTSSAVSLKNRAARTTKQRRSTNKSAFSINHVSRQVTSSGVSHG

SEQ ID NO: 8301 - protein, 783 aa, Homo sapiens
MVIMSEFSADPAGQGQGQQKPLRVGFYDIERTLGKGNFAVVKLARHRVTKTQVAIKIIDKTRLDSSNLEKIYREVQLMKLLNHPHIIKLYQVMETKDMLYIVTEFAKNGEMFDYLTSNGHLSENEARKKFWQILSAVEYCHDHHIVHRDLKTENLLLDGNMDIKLADFGFGNFYKSGEPLSTWCGSPPYAAPEVFEGKEYEGPQLDIWSLGVVLYVLVCGSLPFDGPNLPTLRQRVLEGRFRIPFFMSQDCESLIRRMLVVDPARRITIAQIRQHRWMRAEPCLPGPACPAFSAHSYTSNLGDYDEQALGIMQTLGVDRQRTVESLQNSSYNHFAAIYYLLLERLKEYRNAQCARPGPARQPRPRSSDLSGLEVPQEGLSTDPFRPALLCPQPQTLVQSVLQAEMDCELQSSLQWPLFFPVDASCSGVFRPRPVSPSSLLDTAISEEARQGPGLEEEQDTQESLPSSTGRRHTLAEVSTRLSPLTAPCIVVSPSTTASPAEGTSSDSCLTFSASKSPAGLSGTPATQGLLGACSPVRLASPFLGSQSATPVLQAQGGLGGAVLLPVSFQEGRRASDTSLTQGLKAFRQQLRKTTRTKGFLGLNKIKGLARQVCQAPASRASRGGLSPFHAPAQSPGLHGGAAGSREGWSLLEEVLEQQRLLQLQHHPAAAPGCSQAPQPAPAPFVIAPCDGPGAAPLPSTLLTSGLPLLPPPLLQTGASPVASAAQLLDTHLHIGTGPTALPAVPPPRLARLAPGCEPLGLLQGDCEMEDLMPCSLGTFVLVQ

SEQ ID NO: 8302 - protein, 1247 aa, Homo sapiens
MEDAGAAGPGPEPEPEPEPEPEPAPEPEPEPKPGAGTSEAFSRLWTDVMGILDGSLGNIDDLAQQYADYYNTCFSDVCERMEELRKRRVSQDLEVEKPDASPTSLQLRSQIEESLGFCSAVSTPEVERKNPLHKSNSEDSSVGKGDWKKKNKYFWQNFRKNQKGIMRQTSKGEDVGYVASEITMSDEERIQLMMMVKEKMITIEEALARLKEYEAQHRQSAALDPADWPDGSYPTFDGSSNCNSREQSDDETEESVKFKRLHKLVNSTRRVRKKLIRVEEMKKPSTEGGEEHVFENSPVLDERSALYSGVHKKPLFFDGSPEKPPEDDSDSLTTSPSSSSLDTWGAGRKLVKTFSKGESRGLIKPPKKMGTFFSYPEEEKAQKVSRSLTEGEMKKGLGSLSHGRTCSFGGFDLTNRSLHVGSNNSDPMGKEGDFVYKEVIKSPTASRISLGKKVKSVKETMRKRMSKKYSSSVSEQDSGLDGMPGSPPPSQPDPEHLDKPKLKAGGSVESLRSSLSGQSSMSGQTVSTTDSSTSNRESVKSEDGDDEEPPYRGPFCGRARVHTDFTPSPYDTDSLKLKKGDIIDIISKPPMGTWMGLLNNKVGTFKFIYVDVLSEDEEKPKRPTRRRRKGRPPQPKSVEDLLDRINLKEHMPTFLFNGYEDLDTFKLLEEEDLDELNIRDPEHRAVLLTAVELLQEYDSNSDQSGSQEKLLVDSQGLSGCSPRDSGCYESSENLENGKTRKASLLSAKSSTEPSLKSFSRNQLGNYPTLPLMKSGDALKQGQEEGRLGGGLAPDTSKSCDPPGVTGLNKNRRSLPVSICRSCETLEGPQTVDTWPRSHSLDDLQVEPGAEQDVPTEVTEPPPQIVPEVPQKTTASSTKAQPLEQDSAVDNALLLTQSKRFSEPQKLTTKKLEGSIAASGRGLSPPQCLPRNYDAQPPGAKHGLARTPLEGHRKGHEFEGTHHPLGTKEGVDAEQRMQPKIPSQPPPVPAKKSRERLANGLHPVPMGPSGALPSPDAPCLPVKRGSPASPTSPSDCPPALAPRPLSGQAPGSPPSTRPPPWLSELPENTSLQEHGVKLGPALTRKVSCARGVDLETLTENKLHAEGIDLTEEPYSDKHGRCGIPEALVQRYAEDLDQPERDVAANMDQIRVKQLRKQHRMAIPSGGLTEICRKPVSPGCISSVSDWLISIGLPMYAGTLSTAGFSTLSQVPSLSHTCLQEAGITEERHIRKLLSAARLFKLPPGPEAM

SEQ ID NO: 8303 - protein, 84 aa, Homo sapiens
MEEQDCRDGSLGNIDDLAQQYADYYNTCFSDVCERMEELRKRRVSQDLEVEKPDASPTSLQLRSQIEESLGFCSAVSTPEVERK

SEQ ID NO: 8304 - protein, 82 aa, Homo sapiens
QAQDFKDGSLGNIDDLAQQYADYYNTCFSDVCERMEELRKRRVSQDLEVEKPDASPTSLQLRSQIEESLGFCSAVSTPEVER

SEQ ID NO: 8305 - protein, 696 aa, Homo sapiens
MPKPSREQSDDETEESVKFKRLHKLVNSTRRVRKKLIRVEEMKKPSTEGGEEHVFENSPVLDERSALYSGVHKKPLFFDGSPEKPPEDDSDSLTTSPSSSSLDTWGAGRKLVKTFSKGESRGLIKPPKKMGTFFSYPEEEKAQKVSRSLTEGEMKKGLGSLSHGRTCSFGGFDLTNRSLHVGSNNSDPMGKEGDFVYKEVIKSPTASRISLGKKVKSVKETMRKRMSKKYSSSVSEQDSGLDGMPGSPPPSQPDPEHLDKPKLKAGGSVESLRSSLSGQSSMSGQTVSTTDSSTSNRESVKSEDGDDEEPPYRGPFCGRARVHTDFTPSPYDTDSLKLKKGDIIDIISKPPMGTWMGLLNNKVGTFKFIYVDVLSEDEEKPKRPTRRRRKGRPPQPKSVEDLLDRINLKEHMPTFLFNGYEDLDTFKLLEEEDLDELNIRDPEHRAVLLTAVELLQEYDSNSDQSGSQEKLLVDSQGLSGCSPRDSGCYESSENLENGKTRKASLLSAKSSTEPSLKSFSRNQLGNYPTLPLMKSGDALKQGQEEGRLGGGLAPDTSKSCDPPGVTGLNKNRRSLPVSICRSCETLEGPQTVDTWPRSHSLDDLQVEPGAEQDVPTEVTEPPPQIVPEVPQKTTASSTKAQPLEQDSAVDNALLLTQSKRFSEPQKLTTKKLEGSIAASGRGLSPPQCLPRNYDAQ

SEQ ID NO: 8306 - protein, 657 aa, Homo sapiens
MGTWMGLLNNKVGTFKFIYVDVLSEDEEKPKRPTRRRRKGRPPQPKSVEDLLDRINLKEHMPTFLFNGYEDLDTFKLLEEEDLDELNIRDPEHRAVLLTAVELLQEYDSNSDQSGSQEKLLVDSQGLSGCSPRDSGCYESSENLENGKTRKASLLSAKSSTEPSLKSFSRNQLGNYPTLPLMKSGDALKQGQEEGRLGGGLAPDTSKSCDPPGVTGLNKNRRSLPVSICRSCETLEGPQTVDTWPRSHSLDDLQVEPGAEQDVPTEVTEPPPQIVPEVPQKTTASSTKAQPLEQDSAVDNALLLTQSKRFSEPQKLTTKKLEGSIAASGRGLSPPQCLPRNYDAQPPGAKHGLARTPLEGHRKGHEFEGTHHPLGTKEGVDAEQRMQPKIPSQPPPVPAKKSRERLANGLHPVPMGPSGALPSPDAPCLPVKRGSPASPTSPSDCPPALAPRPLSGQAPGSPPSTRPPPWLSELPENTSLQEHGVKLGPALTRKVSCARGVDLETLTENKLHAEGIDLTEEPYSDKHGRCGIPEALVQRYAEDLDQPERDVAANMDQIRVKQLRKQHRMAIPSGGLTEICRKPVSPGCISSVSDWLISIGLPMYAGTLSTAGFSTLSQVPSLSHTCLQEAGITEERHIRKLLSAARLFKLPPGPEAM

SEQ ID NO: 8307 - protein, 206 aa, Homo sapiens
MLPPAIHFYLLPLACILMKSCLAFKNDATEILYSHVVKPVPAHPSSNSTLNQARNGGRHFSNTGLDRNTRVQVGCRELRSTKYISDGQCTSISPLKELVCAGECLPLPVLPNWIGGGYGTKYWSRRSSQEWRCVNDKTRTQRIQLQCQDGSTRTYKITVVTACKCKRYTRQHNESSHNFESMSPAKPVQHHRERKRASKSSKHSMS

SEQ ID NO: 8308 - protein, 230 aa, Homo sapiens
MLPPAIHFYLLPLACILMKSCLAFKNDATEILYSHVVKPVPAHPSSNSTLNQARNGGRHFSNTGLDRNRTESLTRQNYFWLFPGAFLRQLQEARVQVGCRELRSTKYISDGQCTSISPLKELVCAGECLPLPVLPNWIGGGYGTKYWSRRSSQEWRCVNDKTRTQRIQLQCQDGSTRTYKITVVTACKCKRYTRQHNESSHNFESMSPAKPVQHHRERKRASKSSKHSMS

SEQ ID NO: 8309 - protein, 742 aa, Homo sapiens
MGSENSALKSYTLREPPFTLPSGLAVYPAVLQDGKFASVFVYKRENEDKVNKAAKHLKTLRHPCLLRFLSCTVEADGIHLVTERVQPLEVALETLSSAEVCAGIYDILLALIFLHDRGHLTHNNVCLSSVFVSEDGHWKLGGMETVCKVSQATPEFLRSIQSIRDPASIPPEEMSPEFTTLPECHGHARDAFSFGTLVESLLTILNEQVSADVLSSFQQTLHSTLLNPIPKCRPALCTLLSHDFFRNDFLEVVNFLKSLTLKSEEEKTEFFKFLLDRVSCLSEELIASRLVPLLLNQLVFAEPVAVKSFLPYLLGPKKDHAQGETPCLLSPALFQSRVIPVLLQLFEVHEEHVRMVLLSHIEAYVEHFTQEQLKKVILPQVLLGLRDTSDSIVAITLHSLAVLVSLLGPEVVVGGERTKIFKRTAPSFTKNTDLSLEDSPMCVVCSHHSQISPILENPFSSIFPKCFFSGSTPINSKKHIQRDYYNTLLQTGDPFSQPIKFPINGLSDVKNTSEDSENFPSSSKKSEEWPDWSEPEEPENQTVNIQIWPREPCDDVKSQCTTLDVEESSWDDCEPSSLDTKVNPGGGITATKPVTSGEQKPIPALLSLTEESMPWKSSLPQKISLVQRGDDADQIEPPKVSSQERPLKVPSELGLGEEFTIQVKKKPVKDPEMDWFADMIPEIKPSAAFLILPELRTEMVPKKDDVSPVMQFSSKFAAAEITEGEAEGWEEEGELNWEDNNW

SEQ ID NO: 8310 - protein, 688 aa, Homo sapiens
MGSENSALKSYTLREPPFTLPSGLAVYPAVLQDGKFASVFVYKRENEDKVNKAAKHLKTLRHPCLLRFLSCTVEADGIHLVTERVQPLEVALETLSSAEVCAGIYDILLALIFLHDRGHLTHNNVCLSSVFVSEDGHWKLGGMETVCKVSQATPEFLRSIQSIRDPASIPPEEMSPEFTTLPECHGHARDAFSFGTLVESLLTILNEQVSADVLSSFQQTLHSTLLNPIPKCRPALCTLLSHDFFRNDFLEVVNFLKSLTLKSEEEKTEFFKFLLDRVSCLSEELIASRLVPLLLNQLVFAEPVAVKSFLPYLLGPKKDHAQGETPCLLSPALFQSRVIPVLLQLFEVHEEHVRMVLLSHIEAYVEHFTQEQLKKVILPQVLLGLRDTSDSIVAITLHSLAVLVSLLGPEVVVGGERTKIFKRTAPSFTKNTDLSLEGDPFSQPIKFPINGLSDVKNTSEDSENFPSSSKKSEEWPDWSEPEEPENQTVNIQIWPREPCDDVKSQCTTLDVEESSWDDCEPSSLDTKVNPGGGITATKPVTSGEQKPIPALLSLTEESMPWKSSLPQKISLVQRGDDADQIEPPKVSSQERPLKVPSELGLGEEFTIQVKKKPVKDPEMDWFADMIPEIKPSAAFLILPELRTEMVPKKDDVSPVMQFSSKFAAAEITEGEAEGWEEEGELNWEDNNW

SEQ ID NO: 8311 - protein, 742 aa, Homo sapiens; identical to SEQ ID NO: 8309

SEQ ID NO: 8312 - protein, 588 aa, Homo sapiens
MGSENSALKSYTLREPPFTLPSGLAVYPAVLQDGKFASVFVYKRENEDKVNKAAKHLKTLRHPCLLRFLSCTVEADGIHLVTERVQPLEVALETLSSAEVCAGIYDILLALIFLHDRGHLTHNNVCLSSVFVSEDGHWKLGGMETVCKVSQATPEFLRSIQSIRDPASIPPEEMSPEFTTLPECHGHARDAFSFGTLVESLLTILNEQVSADVLSSFQQTLHSTLLNPIPKCRPALCTLLSHDFFRNDFLEVVNFLKSLTLKSEEEKTEFFKFLLDRVSCLSEELIASRLVPLLLNQLVFAEPVAVKSFLPYLLGPKKDHAQGETPCLLSPALFQSRVIPVLLQLFEVHEEHVRMVLLSHIEAYVEHFTQEQLKKVILPQVLLGLRDTSDSIVAITLHSLAVLVSLLGPEVVVGGERTKIFKRTAPSFTKNTDLSLEGDPFSQPIKFPINGLSDVKNTSEDSENFPSSSKKSEEWPDWSEPEEPENQTVNIQIWPREPCDDVKSQCTTLDVEESSWDDCEPSSLDTKVNPGGGITATKPVTSGEQKPIPALLSLTEESMPWKSSLPQKISLVQRGDDADQIEPPKVSS

SEQ ID NO: 8313 - protein, 314 aa, Homo sapiens
MGIGRSEGGRRGAALGVLLALGAALLAVGSASEYDYVSFQSDIGPYQSGRFYTKPPQCVDIPADLRLCHNVGYKKMVLPNLLEHETMAEVKQQASSWVPLLNKNCHAGTQVFLCSLFAPVCLDRPIYPCRWLCEAVRDSCEPVMQFFGFYWPEMLKCDKFPEGDVCIAMTPPNATEASKPQGTTVCPPCDNELKSEAIIEHLCASEFALRMKIKEVKKENGDKKIVPKKKKPLKLGPIKKKDLKKLVLYLKNGADCPCHQLDNLSHHFLIMGRKVKSQYLLTAIHKWDKKNKEFKNFMKKMKNHECPTFQSVFK

SEQ ID NO: 8314 - protein, 314 aa, Homo sapiens; identical to SEQ ID NO: 8313

SEQ ID NO: 8315 - protein, 346 aa, Homo sapiens
MFLSILVALCLWLHLALGVRGAPCEAVRIPMCRHMPWNITRMPNHLHHSTQENAILAIEQYEELVDVNCSAVLRFFLCAMYAPICTLEFLHDPIKPCKSVCQRARDDCEPLMKMYNHSWPESLACDELPVYDRGVCISPEAIVTDLPEDVKWIDITPDMMVQERPLDVDCKRLSPDRCKCKKVKPTLATYLSKNYSYVIHAKIKAVQRSGCNEVTTVVDVKEIFKSSSPIPRTQVPLITNSSCQCPHILPHQDVLIMCYEWRSRMMLLENCLVEKWRDQLSKRSIQWEERLQEQRRTVQDKKKTAGRTSRSNPPKPKGKPPAPKPASPKKNIKTRSAQKRTNPKRV

SEQ ID NO: 8316 - protein, 343 aa, Homo sapiens
MRVAGREGRFLSAGVAAREGSAMFLSILVALCLWLHLALGVRGAPCEAVRIPMCRHMPWNITRMPNHLHHSTQENAMYAPICTLEFLHDPIKPCKSVCQRARDDCEPLMKMYNHSWPESLACDELPVYDRGVCISPEAIVTDLPEDVKWIDITPDMMVQERPLDVDCKRLSPDRCKCKKVKPTLATYLSKNYSYVIHAKIKAVQRSGCNEVTTVVDVKEIFKSSSPIPRTQVPLITNSSCQCPHILPHQDVLIMCYEWRSRMMLLENCLVEKWRDQLSKRSIQWEERLQEQRRTVQDKKKTAGRTSRSNPPKPKGKPPAPKPASPKKNIKTRSAQKRTNPKRV

SEQ ID NO: 8317 - protein, 317 aa, Homo sapiens
MRAAAAGGGVRTAALALLLGALHWAPARCEEYDYYGWQAEPLHGRSYSKPPQCLDIPADLPLCHTVGYKRMRLPNLLEHESLAEVKQQASSWLPLLAKRCHSDTQVFLCSLFAPVCLDRPIYPCRSLCEAVRAGCAPLMEAYGFPWPEMLHCHKFPLDNDLCIAVQFGHLPATAPPVTKICAQCEMEHSADGLMEQMCSSDFVVKMRIKEIKIENGDRKLIGAQKKKKLLKPGPLKRKDTKRLVLHMKNGAGCPCPQLDSLAGSFLVMGRKVDGQLLLMAVYRWDKKNKEMKFAVKFMFSYPCSLYYPFFYGAAEPH

SEQ ID NO: 8318 - protein, 300 aa, Homo sapiens
MRIAVICFCLLGITCAIPVKQADSGSSEEKQLYNKYPDAVATWLNPDPSQKQNLLAPQTLPSKSNESHDHMDDMDDEDDDDHVDSQDSIDSNDSDDVDDTDDSHQSDESHHSDESDELVTDFPTDLPATEVFTPVVPTVDTYDGRGDSVVYGLRSKSKKFRRPDIQYPDATDEDITSHMESEELNGAYKAIPVAQDLNAPSDWDSRGKDSYETSQLDDQSAETHSHKQSRLYKRKANDESNEHSDVIDSQELSKVSREFHSHEFHSHEDMLVVDPKSKEEDKHLKFRISHELDSASSEVN

SEQ ID NO: 8319 - protein, 292 aa, Homo sapiens
MRIAVICFCLLGITCAIPVKQADSGSSEEKQLYNKYPDAVATWLNPDPSQKQNLLAPQNAVSSEETNDFKQETLPSKSNESHDHMDDMDDEDDDDHQSDESHHSDESDELVTDFPTDLPATEVFTPVVPTVDTYDGRGDSVVYGLRSKSKKFRRPDIQYPDATDEDITSHMESEELNGAYKAIPVAQDLNAPSDWDSRGKDSYETSQLDDQSAETHSHKQSRLYKRKANDESNEHSDVIDSQELSKVSREFHSHEFHSHEDMLVVDPKSKEEDKHLKFRISHELDSASSEVN

SEQ ID NO: 8320 - protein, 287 aa, Homo sapiens
MRIAVICFCLLGITCAIPVKQADSGSSEEKQNAVSSEETNDFKQETLPSKSNESHDHMDDMDDEDDDDHVDSQDSIDSNDSDDVDDTDDSHQSDESHHSDESDELVTDFPTDLPATEVFTPVVPTVDTYDGRGDSVVYGLRSKSKKFRRPDIQYPDATDEDITSHMESEELNGAYKAIPVAQDLNAPSDWDSRGKDSYETSQLDDQSAETHSHKQSRLYKRKANDESNEHSDVIDSQELSKVSREFHSHEFHSHEDMLVVDPKSKEEDKHLKFRISHELDSASSEVN

SEQ ID NO: 8321 - protein, 314 aa, Homo sapiens
MRIAVICFCLLGITCAIPVKQADSGSSEEKQLYNKYPDAVATWLNPDPSQKQNLLAPQNAVSSEETNDFKQETLPSKSNESHDHMDDMDDEDDDDHVDSQDSIDSNDSDDVDDTDDSHQSDESHHSDESDELVTDFPTDLPATEVFTPVVPTVDTYDGRGDSVVYGLRSKSKKFRRPDIQYPDATDEDITSHMESEELNGAYKAIPVAQDLNAPSDWDSRGKDSYETSQLDDQSAETHSHKQSRLYKRKANDESNEHSDVIDSQELSKVSREFHSHEFHSHEDMLVVDPKSKEEDKHLKFRISHELDSASSEVN

SEQ ID NO: 8322 - protein, 273 aa, Homo sapiens
MRIAVICFCLLGITCAIPVKQADSGSSEEKQTLPSKSNESHDHMDDMDDEDDDDHVDSQDSIDSNDSDDVDDTDDSHQSDESHHSDESDELVTDFPTDLPATEVFTPVVPTVDTYDGRGDSVVYGLRSKSKKFRRPDIQYPDATDEDITSHMESEELNGAYKAIPVAQDLNAPSDWDSRGKDSYETSQLDDQSAETHSHKQSRLYKRKANDESNEHSDVIDSQELSKVSREFHSHEFHSHEDMLVVDPKSKEEDKHLKFRISHELDSASSEVN

SEQ ID NO: 8323 - protein, 303 aa, Homo sapiens
MRAWIFFLLCLAGRALAAPQQEALPDETEVVEETVAEVTEVSVGANPVQVEVGEFDDGAEETEEEVVAENPCQNHHCKHGKVCELDENNTPMCVCQDPTSCPAPIGEFEKVCSNDNKTFDSSCHFFATKCTLEGTKKGHKLHLDYIGPCKYIPPCLDSELTEFPLRMRDWLKNVLVTLYERDEDNNLLTEKQKLRVKKIHENEKRLEAGDHPVELLARDFEKNYNMYIFPVHWQFGQLDQHPIDGYLSHTELAPLRAPLIPMEHCTTRFFETCDLDNDKYIALDEWAGCFGIKQKDIDKDLVI

SEQ ID NO: 8324 - protein, 53 aa, Homo sapiens
MRAWIFFLLCLAGRALAAPQQEALPDETEVVEETVAEVTEVSVGANPVQVEVG

SEQ ID NO: 8325 - protein, 111 aa, Homo sapiens
MRAWIFFLLCLAGRALAAPQQEALPDETEVVEETVAEVTEVSVGANPVQVEVGEFDDGAEETEEEVVAENPCQNHHCKHGKVCELDENNTPMCVCQDPTSCPAPIGEFEKV

SEQ ID NO: 8326 - protein, 91 aa, Homo sapiens
MKLAVTLTLVTLALCCSSASAEICPSFQRVIETLLMDTPSSYEAAMELFSPDQDMREAGAQLKKLVDTLPQKPRESIIKLMEKIAQSSLCN

SEQ ID NO: 8327 - protein, 459 aa, Homo sapiens
MIKRFLEDTTDDGELSKFVKDFSGNASCHPPEAKTWASRPQVPEPRPQAPDLYDDDLEFRPPSRPQSSDNQQYFCAPAPLSPSARPRSPWGKLDPYDSSEDDKEYVGFATLPNQVHRKSVKKGFDFTLMVAGESGLGKSTLVNSLFLTDLYRDRKLLGAEERIMQTVEITKHAVDIEEKGVRLRLTIVDTPGFGDAVNNTECWKPVAEYIDQQFEQYFRDESGLNRKNIQDNRVHCCLYFISPFGHGLRPLDVEFMKALHQRVNIVPILAKADTLTPPEVDHKKRKIREEIEHFGIKIYQFPDCDSDEDEDFKLQDQALKESIPFAVIGSNTVVEARGRRVRGRLYPWGIVEVENPGHCDFVKLRTMLVRTHMQDLKDVTRETHYENYRAQCIQSMTRLVVKERNRNKLTRESGTDFPIPAVPPGTDPETEKLIREKDEELRRMQEMLHKIQKQMKENY

SEQ ID NO: 8328 - protein, 478 aa, Homo sapiens
MDRSLGWQGNSVPEDRTEAGIKRFLEDTTDDGELSKFVKDFSGNASCHPPEAKTWASRPQVPEPRPQAPDLYDDDLEFRPPSRPQSSDNQQYFCAPAPLSPSARPRSPWGKLDPYDSSEDDKEYVGFATLPNQVHRKSVKKGFDFTLMVAGESGLGKSTLVNSLFLTDLYRDRKLLGAEERIMQTVEITKHAVDIEEKGVRLRLTIVDTPGFGDAVNNTECWKPVAEYIDQQFEQYFRDESGLNRKNIQDNRVHCCLYFISPFGHGLRPLDVEFMKALHQRVNIVPILAKADTLTPPEVDHKKRKIREEIEHFGIKIYQFPDCDSDEDEDFKLQDQALKESIPFAVIGSNTVVEARGRRVRGRLYPWGIVEVENPGHCDFVKLRTMLVRTHMQDLKDVTRETHYENYRAQCIQSMTRLVVKERNRNKLTRESGTDFPIPAVPPGTDPETEKLIREKDEELRRMQEMLHKIQKQMKENY

SEQ ID NO: 8329 - protein, 459 aa, Homo sapiens; identical to SEQ ID NO: 8327

SEQ ID NO: 8330 - protein, 470 aa, Homo sapiens
MPGFYSVMTDEEIKRFLEDTTDDGELSKFVKDFSGNASCHPPEAKTWASRPQVPEPRPQAPDLYDDDLEFRPPSRPQSSDNQQYFCAPAPLSPSARPRSPWGKLDPYDSSEDDKEYVGFATLPNQVHRKSVKKGFDFTLMVAGESGLGKSTLVNSLFLTDLYRDRKLLGAEERIMQTVEITKHAVDIEEKGVRLRLTIVDTPGFGDAVNNTECWKPVAEYIDQQFEQYFRDESGLNRKNIQDNRVHCCLYFISPFGHGLRPLDVEFMKALHQRVNIVPILAKADTLTPPEVDHKKRKIREEIEHFGIKIYQFPDCDSDEDEDFKLQDQALKESIPFAVIGSNTVVEARGRRVRGRLYPWGIVEVENPGHCDFVKLRTMLVRTHMQDLKDVTRETHYENYRAQCIQSMTRLVVKERNRNKLTRESGTDFPIPAVPPGTDPETEKLIREKDEELRRMQEMLHKIQKQMKENY

SEQ ID NO: 8331 - protein, 274 aa, Homo sapiens
MIKRFLEDTTDDGELSKFVKDFSGNASCHPPEAKTWASRPQVPEPRPQAPDLYDDDLEFRPPSRPQSSDNQQYFCAPAPLSPSARPRSPWGKLDPYDSSEDDKEYVGFATLPNQVHRKSVKKGFDFTLMVAGESGLGKSTLVNSLFLTDLYRDRKLLGAEERIMQTVEITKHAVDIEEKGVRLRLTIVDTPGFGDAVNNTECWKPVAEYIDQQFEQYFRDESGLNRKNIQDNRVHCCLYFISPFGHGYGPSLRLLAPPGAVKGTGQEHQGQGCH

SEQ ID NO: 8332 - protein, 492 aa, Homo sapiens
YSSPALFSSRAAPQKPRKEGSQAAGLLVFSDSLEIKRFLEDTTDDGELSKFVKDFSGNASCHPPEAKTWASRPQVPEPRPQAPDLYDDDLEFRPPSRPQSSDNQQYFCAPAPLSPSARPRSPWGKLDPYDSSEDDKEYVGFATLPNQVHRKSVKKGFDFTLMVAGESGLGKSTLVNSLFLTDLYRDRKLLGAEERIMQTVEITKHAVDIEEKGVRLRLTIVDTPGFGDAVNNTECWKPVAEYIDQQFEQYFRDESGLNRKNIQDNRVHCCLYFISPFGHGLRPLDVEFMKALHQRVNIVPILAKADTLTPPEVDHKKRKIREEIEHFGIKIYQFPDCDSDEDEDFKLQDQALKESIPFAVIGSNTVVEARGRRVRGRLYPWGIVEVENPGHCDFVKLRTMLVRTHMQDLKDVTRETHYENYRAQCIQSMTRLVVKERNRNKLTRESGTDFPIPAVPPGTDPETEKLIREKDEELRRMQEMLHKIQKQMKENY

SEQ ID NO: 8333 - protein, 331 aa, Homo sapiens
MVAGESGLGKSTLVNSLFLTDLYRDRKLLGAEERIMQTVEITKHAVDIEEKGVRLRLTIVDTPGFGDAVNNTECWKPVAEYIDQQFEQYFRDESGLNRKNIQDNRVHCCLYFISPFGHGLRPLDVEFMKALHQRVNIVPILAKADTLTPPEVDHKKRKIREEIEHFGIKIYQFPDCDSDEDEDFKLQDQALKESIPFAVIGSNTVVEARGRRVRGRLYPWGIVEVENPGHCDFVKLRTMLVRTHMQDLKDVTRETHYENYRAQCIQSMTRLVVKERNRNKLTRESGTDFPIPAVPPGTDPETEKLIREKDEELRRMQEMLHKIQKQMKENY

SEQ ID NO: 8334 - protein, 436 aa, Homo sapiens
MSVSARSAAAEERSVNSSTMGQQKNLEGYVGFANLPNQVYRKSVKRGFEFTLMVVGESGLGKSTLINSLFLTDLYSPEYPGPSHRIKKTVQVEQSKVLIKEGGVQLLLTIVDTPGFGDAVDNSNCWQPVIDYIDSKFEDYLNAESRVNRRQMPDNRVQCCLYFIAPSGHGLKPLDIEFMKRLHEKVNIIPLIAKADTLTPEECQQFKKQIMKEIQEHKIKIYEFPETDDEEENKLVKKIKDRLPLAVVGSNTIIEVNGKRVRGRQYPWGVAEVENGEHCDFTILRNMLIRTHMQDLKDVTNNVHYENYRSRKLAAVTYNGVDNNKNKGQLTKSPLAQMEEERREHVAKMKKMEMEMEQVFEMKVKEKVQKLKDSEAELQRRHEQMKKNLEAQHKELEEKRRQFEDEKANWEAQQRILEQQNSSRTLEKNKKKGKIF

SEQ ID NO: 8335 - protein, 438 aa, Homo sapiens
MSVSARSAAAEERSVNSSTMEVAQQKNLEGYVGFANLPNQVYRKSVKRGFEFTLMVVGESGLGKSTLINSLFLTDLYSPEYPGPSHRIKKTVQVEQSKVLIKEGGVQLLLTIVDTPGFGDAVDNSNCWQPVIDYIDSKFEDYLNAESRVNRRQMPDNRVQCCLYFIAPSGHGLKPLDIEFMKRLHEKVNIIPLIAKADTLTPEECQQFKKQIMKEIQEHKIKIYEFPETDDEEENKLVKKIKDRLPLAVVGSNTIIEVNGKRVRGRQYPWGVAEVENGEHCDFTILRNMLIRTHMQDLKDVTNNVHYENYRSRKLAAVTYNGVDNNKNKGQLTKSPLAQMEEERREHVAKMKKMEMEMEQVFEMKVKEKVQKLKDSEAELQRRHEQMKKNLEAQHKELEEKRRQFEDEKANWEAQQRILEQQNSSRTLEKNKKKGKIF

SEQ ID NO: 8336 - protein, 436 aa, Homo sapiens
MSVSARSAAAEERSVNSSTMVQQKNLEGYVGFANLPNQVYRKSVKRGFEFTLMVVGESGLGKSTLINSLFLTDLYSPEYPGPSHRIKKTVQVEQSKVLIKEGGVQLLLTIVDTPGFGDAVDNSNCWQPVIDYIDSKFEDYLNAESRVNRRQMPDNRVQCCLYFIAPSGHGLKPLDIEFMKRLHEKVNIIPLIAKADTLTPEECQQFKKQIMKEIQEHKIKIYEFPETDDEEENKLVKKIKDRLPLAVVGSNTIIEVNGKRVRGRQYPWGVAEVENGEHCDFTILRNMLIRTHMQDLKDVTNNVHYENYRSRKLAAVTYNGVDNNKNKGQLTKSPLAQMEEERREHVAKMKKMEMEMEQVFEMKVKEKVQKLKDSEAELQRRHEQMKKNLEAQHKELEEKRRQFEDEKANWEAQQRILEQQNSSRTLEKNKKKGKIF

SEQ ID NO: 8337 - protein, 88 aa, Homo sapiens
MKKMEMEMEQVFEMKVKEKVQKLKDSEAELQRRHEQMKKNLEAQHKELEEKRRQFEDEKANWEAQQRILEQQNSSRTLEKNKKKGKIF

SEQ ID NO: 8338 - protein, 384 aa, Homo sapiens
MVVGESGLGKSTLINSLFLTDLYSPEYPGPSHRIKKTVQVEQSKVLIKEGGVQLLLTIVDTPGFGDAVDNSNCWQPVIDYIDSKFEDYLNAESRVNRRQMPDNRVQCCLYFIAPSGHGLKPLDIEFMKRLHEKVNIIPLIAKADTLTPEECQQFKKQIMKEIQEHKIKIYEFPETDDEEENKLVKKIKDRLPLAVVGSNTIIEVNGKRVRGRQYPWGVAEVENGEHCDFTILRNMLIRTHMQDLKDVTNNVHYENYRSRKLAAVTYNGVDNNKNKGQLTKSPLAQMEEERREHVAKMKKMEMEMEQVFEMKVKEKVQKLKDSEAELQRRHEQMKKNLEAQHKELEEKRRQFEDEKANWEAQQRILEQQNSSRTLEKNKKKGKIF

SEQ ID NO: 8339 - protein, 235 aa, Homo sapiens
MSVSARSAAAEERSVNSSTMGQQKNLEGYVGFANLPNQVYRKSVKRGFEFTLMVVGESGLGKSTLINSLFLTDLYSPEYPGPSHRIKKTVQVEQSKVLIKEGGVQLLLTIVDTPGFGDAVDNSNCWQPVIDYIDSKFEDYLNAESRVNRRQMPDNRVQCCLYFIAPSGHGLKPLDIEFMKRLHEKVNIIPLIAKADTLTPEECQQFKKQIMKEIQEHKIKIYEFPETAKKKKKKK

SEQ ID NO: 8340 - protein, 384 aa, Homo sapiens; identical to SEQ ID NO: 8338

SEQ ID NO: 8341 - protein, 381 aa, Homo sapiens
VTHETIVEQQKNLEGYVGFANLPNQVYRKSVKRGFEFTLMVVGESGLGKSTLINSLFLTDLYSPEYPGPSHRIKKTVQVEQSKVLIKEGGVQLLLTIVDTPGFGDAVDNSNCWQPVIDYIDSKFEDYLNAESRVNRRQMPDNRVQCCLYFIAPSGHGLKPLDIEFMKRLHEKVNIIPLIAKADTLTPEECQQFKKQIMKEIQEHKIKIYEFPETDDEEENKLVKKIKDRLPLAVVGSNTIIEVNGKRVRGRQYPWGVAEVENGEHCDFTILRNMLIRTHMQDLKDVTNNVHYENYRSRKLAAVTYNGVDNNKNKGQLTKSPLAQMEEERREHVAKMKKMEMEMEQVFEMKVKEKVQKLKDSEAEVISLISHLLADIVFLFK

SEQ ID NO: 8342 - protein, 382 aa, Homo sapiens
MGESGLGKSTLINSLFLTDLYSPEYPGPSHRIKKTVQVEQSKVLIKEGGVQLLLTIVDTPGFGDAVDNSNCWQPVIDYIDSKFEDYLNAESRVNRRQMPDNRVQCCLYFIAPSGHGLKPLDIEFMKRLHEKVNIIPLIAKADTLTPEECQQFKKQIMKEIQEHKIKIYEFPETDDEEENKLVKKIKDRLPLAVVGSNTIIEVNGKRVRGRQYPWGVAEVENGEHCDFTILRNMLIRTHMQDLKDVTNNVHYENYRSRKLAAVTYNGVDNNKNKGQLTKSPLAQMEEERREHVAKMKKMEMEMEQVFEMKVKEKVQKLKDSEAELQRRHEQMKKNLEAQHKELEEKRRQFEDEKANWEAQQRILEQQNSSRTLEKNKKKGKIF

SEQ ID NO: 8343 - protein, 433 aa, Homo sapiens
MEVVDPQQLGMFTEGELMSVGMDTFIHRIDSTEVIYQPRRKRAKLIGKYLMGDLLGEGSYGKVKEVLDSETLCRRAVKILKKKKLRRIPNGEANVKKEIQLLRRLRHKNVIQLVDVLYNEEKQKMYMVMEYCVCGMQEMLDSVPEKRFPVCQAHGYFCQLIDGLEYLHSQGIVHKDIKPGNLLLTTGGTLKISDLGVAEALHPFAADDTCRTSQGSPAFQPPEIANGLDTFSGFKVDIWSAGVTLYNITTGLYPFEGDNIYKLFENIGKGSYAIPGDCGPPLSDLLKGMLEYEPAKRFSIRQIRQHSWFRKKHPPAEAPVPIPPSPDTKDRWRSMTVVPYLEDLHGADEDEDLFDIEDDIIYTQDFTVPGQVPEEEASHNGQRRGLPKAVCMNGTEAAQLSTKSRAEGRAPNPARKACSASSKIRRLSACKQQ

SEQ ID NO: 8344 - protein, 432 aa, Homo sapiens
MEVVDPQQLGMFTEGELMSVGMDTFIHRIDSTEVIYQPRRKRAKLIGKYLMGDLLGEGSYGKVKEVLDSETLCRRAVKILKKKKLRRIPNGEANVKKEIQLLRRLRHKNVIQLVDVLYNEEKQKMYMVMEYCVCGMQEMLDSVPEKRFPVCQAHGYFCQLIDGLEYLHSQGIVHKDIKPGNLLLTTGGTLKISDLGVAEALHPFAADDTCRTSQGSPAFQPPEIANGLDTFSGFKVDIWSAGVTLYNITTGLYPFEGDNIYKLFENIGKGSYAIPGDCGPPLSDLLKGMLEYEPAKRFSIRQIRQHSWFRKKHPPAEAPVPIPPSPDTKDRWRSMTVVPYLEDLHGADEDEDLFDIEDDIIYTQDFTVPGQVPEEEASHNGQRRGLPKAVCMNGTEAAQLSTKSRAEAGPPTLPARPAASSKIRRLSACKQQ

SEQ ID NO: 8345 - protein, 415 aa, Homo sapiens
MEDLCVANTLFALNLFKHLAKASPTQNLFLSPWSISSTMAMVYMGSRGSTEDQMAKVLQFNEVGANAVTPMTPENFTSCGFMQQIQKGSYPDAILQAQAADKIHSSFRSLSSAINASTGNYLLESVNKLFGEKSASFREEYIRLCQKYYSSEPQAVDFLECAEEARKKINSWVKTQTKGKIPNLLPEGSVDGDTRMVLVNAVYFKGKWKTPFEKKLNGLYPFRVNSAQRTPVQMMYLREKLNIGYIEDLKAQILELPYAGDVSMFLLLPDEIADVSTGLELLESEITYDKLNKWTSKDKMAEDEVEVYIPQFKLEEHYELRSILRSMGMEDAFNKGRANFSGMSERNDLFLSEVFHQAMVDVNEEGTEAAAGTGGVMTGRTGHGGPQFVADHPFLFLIMHKITNCILFFGRFSSP

SEQ ID NO: 8346 - protein, 113 aa, Homo sapiens
MEDLCVANTLFALNLFKHLAKASPTQNLFLSPWSISSTMAMVYMGSRGSTEDQMAKVLQFNEVGANAVTPMTPENFTSCGFMQQIQKGSYPDAILQAQAADKIHSSFRSLSSA

SEQ ID NO: 8347 - protein, 161 aa, Homo sapiens
MEDLCVANTLFALNLFKHLAKASPTQNLFLSPWSISSTMAMVYMGSRGSTEDQMAKVLQFNEVGANAVTPMTPENFTSCGFMQQIQKGSYPDAILQAQAADKIHSSFRSLSSAINASTGNYLLESVNKLFGEKSASFREEYIRLCQKYYSSEPQAVDFLEC

SEQ ID NO: 8348 - protein, 132 aa, Homo sapiens
MEDLCVANTLFALNLFKHLAKASPTQNLFLSPWSISSTMAMVYMGSRGSTEDQMAKVLQFNEVGANAVTPMTPENFTSCGFMQQIQKGSYPDAILQAQAADKIHSSFRSLSSAINASTGNYLLESVNKLFGE

SEQ ID NO: 8349 - protein, 415 aa, Homo sapiens; identical to SEQ ID NO: 8345

SEQ ID NO: 8350 - protein, 402 aa, Homo sapiens [sequence omitted]

SEQ ID NO: 8351 - protein, 387 aa, Homo sapiens
MQMSPALTCLVLGLALVFGEGSAVHHPPSYVAQASKDRNVVFSPYGVASVLAMLQLTTGGETQQQIQAAMGFKIDDKGMAPALRHLYKELMGPWNKDEISTTDAIFVQRDLKLVQGFMPHFFRLFRSTVKQVDFSEVERARFIINDWVKTHTKGMISNLLGKGAVDQLTRLVLVNALYFNGQWKTPFPDSSTHRRLFHKSDGSTVSVPMMAQTNKFNYTEFTTPDGHYYDILELPYHGDTLSMFIAAPYEKEVPLSALTNILSAQLISHWKGNMTRLPRLLVLPKFSLETEVDLRKPLENLGMTDMFRQFQADFTSLSDQEPLHVAQALQKVKIEVNESGTVASSSTAVIVSARMAPEEIIMDRPFLFVVRHNPTGTVLFMGQVMEP

SEQ ID NO: 8352 - protein, 179 aa, Homo sapiens
MMAQTNKFNYTEFTTPDGHYYDILELPYHGDTLSMFIAAPYEKEVPLSALTNILSAQLISHWKGNMTRLPRLLVLPKFSLETEVDLRKPLENLGMTDMFRQFQADFTSLSDQEPLHVAQALQKVKIEVNESGTVASSSTAVIVSARMAPEEIIMDRPFLFVVRHNPTGTVLFMGQVMEP

SEQ ID NO: 8353 - protein, 236 aa, Homo sapiens [sequence omitted]

SEQ ID NO: 8354 - protein, 508 aa, Homo sapiens
MLPTQAGAAAALGRGSALGGSLNRTPTGRPGGGGGTRGANGGRVPGNGAGLGPGRLEREAAAAAATTPAPTAGALYSGSEGDSESGEEEELGAERRGLKRSLSEMEIGMVVGGPEASAAATGGYGPVSGAVSGAKPGKKTRGRVKIKMEFIDNKLRRYTTFSKRKTGIMKKAYELSTLTGTQVLLLVASETGHVYTFATRKLQPMITSETGKALIQTCLNSPDSPPRSDPTTDQRMSATGFEETDLTYQVSESDSSGETKDTLKPAFTVTNLPGTTSTIQTAPSTSTTMQVSSGPSFPITNYLAPVSASVSPSAVSSANGTVLKSTGSGPVSSGGLMQLPTSFTLMPGGAVAQQVPVQAIQVHQAPQQASPSRDSSTDLTQTSSSGTVTLPATIMTSSVPTTVGGHMMYPSPHAVMYAPTSGLGDGSLTVLNAFSQAPSTMQVSHSQVQEPGGVPQVFLTASSGTVQIPVSAVQLHQMAVIGQQAGSSSNLTELQVVNLDTAHSTKSE

SEQ ID NO: 8355 - protein, 304 aa, Homo sapiens
MITSETGKALIQTCLNSPDSPPRSDPTTDQRMSATGFEETDLTYQVSESDSSGETKDTLKPAFTVTNLPGTTSTIQTAPSTSTTMQVSSGPSFPITNYLAPVSASVSPSAVSSANGTVLKSTGSGPVSSGGLMQLPTSFTLMPGGAVAQQVPVQAIQVHQAPQQASPSRDSSTDLTQTSSSGTVTLPATIMTSSVPTTVGGHMMYPSPHAVMYAPTSGLGDGSLTVLNAFSQAPSTMQVSHSQVQEPGGVPQVFLTASSGTVQIPVSAVQLHQMAVIGQQAGSSSNLTELQVVNLDTAHSTKSE

SEQ ID NO: 8356 - protein, 277 aa, Homo sapiens
MSAPAAKVSKKELNSNHDGADETSEKEQQEAIEHIDEVQNEIDRLNEQASEEILKVEQKYNKLRQPFFQKRSELIAKIPNFWVTTFVNHPQVSALLGEEDEEALHYLTRVEVTEFEDIKSGYRIDFYFDENPYFENKVLSKEFHLNESGDPSSKSTEIKWKSGKDLTKRSSQTQNKASRKRQHEEPESFFTWFTDHSDAGADELGEVIKDDIWPNPLQYYLVPDMDDEEGEGEEDDDDDEEEEGLEDIDEEGDEDEGEEDEDDDEGEEGEEDEGEDD

SEQ ID NO: 8357 - protein, 265 aa, Homo sapiens
MPRSHQPPPPPHEKEQQEAIEHIDEVQNEIDRLNEQASEEILKVEQKYNKLRQPFFQKRSELIAKIPNFWVTTFVNHPQVSALLGEEDEEALHYLTRVEVTEFEDIKSGYRIDFYFDENPYFENKVLSKEFHLNESGDPSSKSTEIKWKSGKDLTKRSSQTQNKASRKRQHEEPESFFTWFTDHSDAGADELGEVIKDDIWPNPLQYYLVPDMDDEEGEGEEDDDDDEEEEGLEDIDEEGDEDEGEEDEDDDEGEEGEEDEGEDD

SEQ ID NO: 8358 - protein, 266 aa, Homo sapiens
MMPRSHQPPPPPHEKEQQEAIEHIDEVQNEIDRLNEQASEEILKVEQKYNKLRQPFFQKRSELIAKIPNFWVTTFVNHPQVSALLGEEDEEALHYLTRVEVTEFEDIKSGYRIDFYFDENPYFENKVLSKEFHLNESGDPSSKSTEIKWKSGKDLTKRSSQTQNKASRKRQHEEPESFFTWFTDHSDAGADELGEVIKDDIWPNPLQYYLVPDMDDEEGEGEEDDDDDEEEEGLEDIDEEGDEDEGEEDEDDDEGEEGEEDEGEDD

SEQ ID NO: 8359 - protein, 290 aa, Homo sapiens
MAPKRQSPLPPQKKKPRPPPALGPEETSASAGLPKKGEKEQQEAIEHIDEVQNEIDRLNEQASEEILKVEQKYNKLRQPFFQKRSELIAKIPNFWVTTFVNHPQVSALLGEEDEEALHYLTRVEVTEFEDIKSGYRIDFYFDENPYFENKVLSKEFHLNESGDPSSKSTEIKWKSGKDLTKRSSQTQNKASRKRQHEEPESFFTWFTDHSDAGADELGEVIKDDIWPNPLQYYLVPDMDDEEGEGEEDDDDDEEEEGLEDIDEEGDEDEGEEDEDDDEGEEGEEDEGEDD

SEQ ID NO: 8360 - protein, 268 aa, Homo sapiens
MGCRDLLPSLKPTLLEKEQQEAIEHIDEVQNEIDRLNEQASEEILKVEQKYNKLRQPFFQKRSELIAKIPNFWVTTFVNHPQVSALLGEEDEEALHYLTRVEVTEFEDIKSGYRIDFYFDENPYFENKVLSKEFHLNESGDPSSKSTEIKWKSGKDLTKRSSQTQNKASRKRQHEEPESFFTWFTDHSDAGADELGEVIKDDIWPNPLQYYLVPDMDDEEGEGEEDDDDDEEEEGLEDIDEEGDEDEGEEDEDDDEGEEGEEDEGEDD

SEQ ID NO: 8361 - protein, 32 aa, Homo sapiens
MAPKRQSPLPPQKKKPRPPPALGPEETSASAG

SEQ ID NO: 8362 - protein, 313 aa, Homo sapiens
MTGKATPPSLYSWRGVLFTCLPAARTRKRKEMSRQTATALPTGTSKCPPSQRVPALTGTTASNNDLASLFECPVCFDYVLPPILQCQSGHLVCSNCRPKLTCCPTCRGPLGSIRNLAMEKVANSVLFPCKYASSGCEITLPHTEKADHEELCEFRPYSCPCPGASCKWQGSLDAVMPHLMHQHKSITTLQGEDIVFLATDINLPGAVDWVMMQSCFGFHFMLVLEKQEKYDGHQQFFAIVQLIGTRKQAENFAYRLELNGHRRRLTWEATPRSIHEGIATAIMNSDCLVFDTSIAQLFAENGNLGINVTISMC

SEQ ID NO: 8363 - protein, 298 aa, Homo sapiens
MVIIIFLLPPYVFISEMSRQTATALPTGTSKCPPSQRVPALTGTTASNNDLASLFECPVCFDYVLPPILQCQSGHLVCSNCRPKLTCCPTCRGPLGSIRNLAMEKVANSVLFPCKYASSGCEITLPHTEKADHEELCEFRPYSCPCPGASCKWQGSLDAVMPHLMHQHKSITTLQGEDIVFLATDINLPGAVDWVMMQSCFGFHFMLVLEKQEKYDGHQQFFAIVQLIGTRKQAENFAYRLELNGHRRRLTWEATPRSIHEGIATAIMNSDCLVFDTSIAQLFAENGNLGINVTISMC

SEQ ID NO: 8364 - protein, 282 aa, Homo sapiens
MSRQTATALPTGTSKCPPSQRVPALTGTTASNNDLASLFECPVCFDYVLPPILQCQSGHLVCSNCRPKLTCCPTCRGPLGSIRNLAMEKVANSVLFPCKYASSGCEITLPHTEKADHEELCEFRPYSCPCPGASCKWQGSLDAVMPHLMHQHKSITTLQGEDIVFLATDINLPGAVDWVMMQSCFGFHFMLVLEKQEKYDGHQQFFAIVQLIGTRKQAENFAYRLELNGHRRRLTWEATPRSIHEGIATAIMNSDCLVFDTSIAQLFAENGNLGINVTISMC

SEQ ID NO: 8365 - protein, 235 aa, Homo sapiens
MTFDLTKITKTSSSFEVRTWDPEGVIFYGDTNPKDDWFMLGLRDGRPEIQLHNHWAQLTVGAGPRLDDGRWHQVEVKMEGDSVLLEVDGEEVLRLRQVSGPLTSKRHPIMRIALGGLLFPASNLRLPLVPALDGCLRRDSWLDKQAEISASAPTSLRSCDVESNPGIFLPPGTQAEFNLRDIPQPHAEPWAFSLDLGLKQAAGSGHLLALGTPENPSWLSLHLQDQEKTLPPLFA

SEQ ID NO: 8366 - protein, 402 aa, Homo sapiens
MESRGPLATSRLLLLLLLLLLRHTRQGWALRPVLPTQSAHDPPAVHLSNGPGQEPIAVMTFDLTKITKTSSSFEVRTWDPEGVIFYGDTNPKDDWFMLGLRDGRPEIQLHNHWAQLTVGAGPRLDDGRWHQVEVKMEGDSVLLEVDGEEVLRLRQVSGPLTSKRHPIMRIALGGLLFPASNLRLPLVPALDGCLRRDSWLDKQAEISASAPTSLRSCDVESNPGIFLPPGTQAEFNLRDIPQPHAEPWAFSLDLGLKQAAGSGHLLALGTPENPSWLSLHLQDQKVVLSSGSGPGLDLPLVLGLPLQLKLSMSRVVLSQGSKMKALALPPLGLAPLLNLWAKPQGRLFLGALPGEDSSTSFCLNGLWAQGQRLDVDQALNRSHEIWTHSCPQSPGNGTDASH

SEQ ID NO: 8367 - protein, 293 aa, Homo sapiens
MESRGPLATSRLLLLLLLLLLRHTRQGWALRPVLPTQSAHDPPAVHLSNGPGQEPIAVMTFDLTKITKTSSSFEVRTWDPEGVIFYGDTNPKDDWFMLGLRDGRPEIQLHNHWAQLTVGAGPRLDDGRWHQVEVKMEGDSVLLEVDGEEVLRLRQVSGPLTSKRHPIMRIALGGLLFPASNLRLPLVPALDGCLRRDSWLDKQAEISASAPTSLRSCDVESNPGIFLPPGTQAEFNLRDIPQPHAEPWAFSLDLGLKQAAGSGHLLALGTPENPSWLSLHLQDQEKTLPPLFA

SEQ ID NO: 8368 - protein, 239 aa, Homo sapiens
MESRGPLATSRLLLLLLLLLLRHTRQGWALRPVLPTQSAHDPPAVHLSNGPGQEPIAVMTFDLTKITKTSSSFEVRTWDPEGVIFYGDTNPKDDWFMLGLRDGRPEIQLHNHWAQLTVGAGPRLDDGRWHQLVPALDGCLRRDSWLDKQAEISASAPTSLRSCDVESNPGIFLPPGTQAEFNLRDIPQPHAEPWAFSLDLGLKQAAGSGHLLALGTPENPSWLSLHLQDQEKTLPPLFA

SEQ ID NO: 8369 - protein, 287 aa, Homo sapiens
MESRGPLATSRLLLLLLLLLLRHTRQGWALRPVLPTQSAHDPPAVHLSNGPGQEPIAVMTFDLTKITKTSSSFEVRTWDPEGVIFYGDTNPKDDWFMLGLRDGRPEIQLHNHWAQLTVGAGPRLDDGRWHQVEVKMEGDSVLLEVDGEEVLRLRQVSGPLTSKRHPIMRIALGGLLFPASNLRLPLVPALDGCLRRDSWLDKQAEISASAPTSLRSCDVESNPGIFLPPGTQAEFNLRGEDSSTSFCLNGLWAQGQRLDVDQALNRSHEIWTHSCPQSPGNGTDASH

SEQ ID NO: 8370 - protein, 140 aa, Homo sapiens
MESRGPLATSRLLLLLLLLLLRHTRQGWALRPVLPTQSAHDPPAVHLSNGPGQEPIAVMTFDLTKITKTSSSFEVRTWDPEGVIFYGDTNPKDDWFMLGLRDGRPEIQLHNHWAQLTVGAGPRLDDGRWHQEKTLPPLFA

SEQ ID NO: 8371 - protein, 384 aa, Homo sapiens
MESRGPLATSRLLLLLLLLLLRHTRQGWALRPVLPTQSAHDPPAVHLSNGPGQEPIAVMTFDLTKITKTSSSFEVRTWDPEGVIFYGDTNPKDDWFMLGLRDGRPEIQLHNHWAQLTVGAGPRLDDGRWHQVEVKMEGDSVLLEVDGEEVLRLRQVSGPLTSKRHPIMRIALGGLLFPASNLRLPAEISASAPTSLRSCDVESNPGIFLPPGTQAEFNLRDIPQPHAEPWAFSLDLGLKQAAGSGHLLALGTPENPSWLSLHLQDQKVVLSSGSGPGLDLPLVLGLPLQLKLSMSRVVLSQGSKMKALALPPLGLAPLLNLWAKPQGRLFLGALPGEDSSTSFCLNGLWAQGQRLDVDQALNRSHEIWTHSCPQSPGNGTDASH

SEQ ID NO: 8372 - protein, 371 aa, Homo sapiens
MSPSTFQITDMTRRSCQNLGYTAASPQAPEAASNTGNAERAEEVPGEGSLFLQAETRAWFQKTQAHWLLQHGAAPAWFHGFITRREAERLLEPKPQGCYLVRFSESAVTFVLTYRSRTCCRHFLLAQLRDGRHVVLGEDSAHARLQDLLLHYTAHPLSPYGETLTEPLARQTPEPAGLSLRTEESNFGSKSQDPNPQYSPIIKQGQAPVPMQKEGAGEKEPSQLLRPKPPIPAKPQLPPEVYTIPVPRHRPAPRPKPSNPIYNEPDEPIAFYAMGRGSPGEAPSNIYVEVEDEGLPATLGHPVLRKSWSRPVPGGQNTGGSQLHSENSVIGQGPPLPHQPPPAWRHTLPHNLSRQVLQDRGQAWLPLGPPQ

SEQ ID NO: 8373 - protein, 389 aa, Homo sapiens
MEFPLAQICPQGSHEAPIPTFSTFQITDMTRRSCQNLGYTAASPQAPEAASNTGNAERAEEVPGEGSLFLQAETRAWFQKTQAHWLLQHGAAPAWFHGFITRREAERLLEPKPQGCYLVRFSESAVTFVLTYRSRTCCRHFLLAQLRDGRHVVLGEDSAHARLQDLLLHYTAHPLSPYGETLTEPLARQTPEPAGLSLRTEESNFGSKSQDPNPQYSPIIKQGQAPVPMQKEGAGEKEPSQLLRPKPPIPAKPQLPPEVYTIPVPRHRPAPRPKPSNPIYNEPDEPIAFYAMGRGSPGEAPSNIYVEVEDEGLPATLGHPVLRKSWSRPVPGGQNTGGSQLHSENSVIGQGPPLPHQPPPAWRHTLPHNLSRQVLQDRGQAWLPLGPPQ

SEQ ID NO: 8374 - protein, 399 aa, Homo sapiens
MEFPLAQICPQGSHEAPIPTFSTFQITDMTRRSCQNLGYTAASPQAPEAASNTGNAERAEEVPGEGSLFLQAETRAWFQKTQAHWLLQHGAAPAWFHGFITRRVRPPLSVTHREAERLLEPKPQGCYLVRFSESAVTFVLTYRSRTCCRHFLLAQLRDGRHVVLGEDSAHARLQDLLLHYTAHPLSPYGETLTEPLARQTPEPAGLSLRTEESNFGSKSQDPNPQYSPIIKQGQAPVPMQKEGAGEKEPSQLLRPKPPIPAKPQLPPEVYTIPVPRHRPAPRPKPSNPIYNEPDEPIAFYAMGRGSPGEAPSNIYVEVEDEGLPATLGHPVLRKSWSRPVPGGQNTGGSQLHSENSVIGQGPPLPHQPPPAWRHTLPHNLSRQVLQDRGQAWLPLGPPQ

SEQ ID NO: 8375 - protein, 940 aa, Homo sapiens
MILEQYVVVSNYKKQENSELSLQAGEVVDVIEKNESGWWFVSTSEEQGWVPATYLEAQNGTRDDSDINTSKTGEEEKYVTVQPYTSQSKDEIGFEKGVTVEVIRKNLEGWWYIRYLGKEGWAPASYLKKAKDDLPTRKKNLAGPVEIIGNIMEISNLLNKKASGDKETPPAEGEGHEAPIAKKEISLPILCNASNGSAVGVPDRTVSRLAQGSPAVARIAPQRAQISSPNLRTRPPPRRESSLGFQLPKPPEPPSVEVEYYTIAEFQSCISDGISFRGGQKAEVIDKNSGGWWYVQIGEKEGWAPASYIDKRKKPNLSRRTSTLTRPKVPPPAPPSKPKEAEEGPTGASESQDSPRKLKYEEPEYDIPAFGFDSEPELSEEPVEDRASGERRPAQPHRPSPASSLQRARFKVGESSEDVALEEETIYENEGFRPYAEDTLSARGSSGDSDSPGSSSLSLTRKNSPKSGSPKSSSLLKLKAEKNAQAEMGKNHSSASFSSSITINTTCCSSSSSSSSSLSKTSGDLKPRSASDAGIRGTPKVRAKKDADANAGLTSCPRAKPSVRPKPFLNRAESQSQEKMDISTLRRQLRPTGQLRGGLKGSKSEDSELPPQTASEAPSEGSRRSSSDLITLPATTPPCPTKKEWEGPATSYMTCSAYQKVQDSEISFPAGVEVQVLEKQESGWWYVRFGELEGWAPSHYLVLDENEQPDPSGKELDTVPAKGRQNEGKSDSLEKIERRVQALNTVNQSKKATPPIPSKPPGGFGKTSGTPAVKMRNGVRQVAVRPQSVFVSPPPKDNNLSCALRRNESLTATDGLRGVRRNSSFSTARSAAAEAKGRLAERAASQGSDSPLLPAQRNSIPVSPVRPKPIEKSQFIHNNLKDVYVSIADYEGDEETAGFQEGVSMEVLERNPNGWWYCQILDGVKPFKGWVPSNYLEKKN

SEQ ID NO: 8376 - protein, 1105 aa, Homo sapiens
MLAYCVQDATVVDVEKRRNPSKHYVYIINVTWSDSTSQTIYRRYSKFFDLQMQLLDKFPIEGGQKDPKQRIIPFLPGKILFRRSHIRDVAVKRLKPIDEYCRALVRLPPHISQCDEVFRFFEARPEDVNPPKEDYGSSKRKSVWLSSWAESPKKDVTGADATAEPMILEQYVVVSNYKKQENSELSLQAGEVVDVIEKNESGWWFVSTSEEQGWVPATYLEAQNGTRDDSDINTSKTGEEEKYVTVQPYTSQSKDEIGFEKGVTVEVIRKNLEGWWYIRYLGKEGWAPASYLKKAKDDLPTRKKNLAGPVEIIGNIMEISNLLNKKASGDKETPPAEGEGHEAPIAKKEISLPILCNASNGSAVGVPDRTVSRLAQGSPAVARIAPQRAQISSPNLRTRPPPRRESSLGFQLPKPPEPPSVEVEYYTIAEFQSCISDGISFRGGQKAEVIDKNSGGWWYVQIGEKEGWAPASYIDKRKKPNLSRRTSTLTRPKVPPPAPPSKPKEAEEGPTGASESQDSPRKLKYEEPEYDIPAFGFDSEPELSEEPVEDRASGERRPAQPHRPSPASSLQRARFKVGESSEDVALEEETIYENEGFRPYAEDTLSARGSSGDSDSPGSSSLSLTRKNSPKSGSPKSSSLLKLKAEKNAQAEMGKNHSSASFSSSITINTTCCSSSSSSSSSLSKTSGDLKPRSASDAGIRGTPKVRAKKDADANAGLTSCPRAKPSVRPKPFLNRAESQSQEKMDISTLRRQLRPTGQLRGGLKGSKSEDSELPPQTASEAPSEGSRRSSSDLITLPATTPPCPTKKEWEGPATSYMTCSAYQKVQDSEISFPAGVEVQVLEKQESGWWYVRFGELEGWAPSHYLVLDENEQPDPSGKELDTVPAKGRQNEGKSDSLEKIERRVQALNTVNQSKKATPPIPSKPPGGFGKTSGTPAVKMRNGVRQVAVRPQSVFVSPPPKDNNLSCALRRNESLTATDGLRGVRRNSSFSTARSAAAEAKGRLAERAASQGSDSPLLPAQRNSIPVSPVRPKPIEKSQFIHNNLKDVYVSIADYEGDEETAGFQEGVSMEVLERNPNGWWYCQILDGVKPFKGWVPSNYLEKKN

SEQ ID NO: 8377 - protein, 1133 aa, Homo sapiens
MLAYCVQDATVVDVEKRRNPSKHYVYIINVTWSDSTSQTIYRRYSKFFDLQMQLLDKFPIEGGQKDPKQRIIPFLPGKILFRRSHIRDVAVKRLKPIDEYCRALVRLPPHISQCDEVFRFFEARPEDVNPPKEDYGSSKRKSVWLSSWAESPKKDVTGADATAEPMILEQYVVVSNYKKQENSELSLQAGEVVDVIEKNESGWWFVSTSEEQGWVPATYLEAQNGTRDDSDINTSKTGEVSKRRKAHLRRLDRRWTLGGMVNRQHSREEKYVTVQPYTSQSKDEIGFEKGVTVEVIRKNLEGWWYIRYLGKEGWAPASYLKKAKDDLPTRKKNLAGPVEIIGNIMEISNLLNKKASGDKETPPAEGEGHEAPIAKKEISLPILCNASNGSAVGVPDRTVSRLAQGSPAVARIAPQRAQISSPNLRTRPPPRRESSLGFQLPKPPEPPSVEVEYYTIAEFQSCISDGISFRGGQKAEVIDKNSGGWWYVQIGEKEGWAPASYIDKRKKPNLSRRTSTLTRPKVPPPAPPSKPKEAEEGPTGASESQDSPRKLKYEEPEYDIPAFGFDSEPELSEEPVEDRASGERRPAQPHRPSPASSLQRARFKVGESSEDVALEEETIYENEGFRPYAEDTLSARGSSGDSDSPGSSSLSLTRKNSPKSGSPKSSSLLKLKAEKNAQAEMGKNHSSASFSSSITINTTCCSSSSSSSSSLSKTSGDLKPRSASDAGIRGTPKVRAKKDADANAGLTSCPRAKPSVRPKPFLNRAESQSQEKMDISTLRRQLRPTGQLRGGLKGSKSEDSELPPQTASEAPSEGSRRSSSDLITLPATTPPCPTKKEWEGPATSYMTCSAYQKVQDSEISFPAGVEVQVLEKQESGWWYVRFGELEGWAPSHYLVLDENEQPDPSGKELDTVPAKGRQNEGKSDSLEKIERRVQALNTVNQSKKATPPIPSKPPGGFGKTSGTPAVKMRNGVRQVAVRPQSVFVSPPPKDNNLSCALRRNESLTATDGLRGVRRNSSFSTARSAAAEAKGRLAERAASQGSDSPLLPAQRNSIPVSPVRPKPIEKSQFIHNNLKDVYVSIADYEGDEETAGFQEGVSMEVLERNPNGWWYCQILDGVKPFKGWVPSNYLEKKN

SEQ ID NO: 8378 - protein, 1060 aa, Homo sapiens
  VARIANT 1: note = MOD_RES - Any amino acid
XFFDLQMQLLDKFPIEGGQKDPKQRIIPFLPGKILFRRSHIRDVAVKRLKPIDEYCRALVRLPPHISQCDEVFRFFEARPEDVNPPKEDYGSSKRKSVWLSSWAESPKKDVTGADATAEPMILEQYVVVSNYKKQENSELSLQAGEVVDVIEKNESGWWFVSTSEEQGWVPATYLEAQNGTRDDSDINTSKTGEEEKYVTVQPYTSQSKDEIGFEKGVTVEVIRKNLEGWWYIRYLGKEGWAPASYLKKAKDDLPTRKKNLAGPVEIIGNIMEISNLLNKKASGDKETPPAEGEGHEAPIAKKEISLPILCNASNGSAVGVPDRTVSRLAQGSPAVARIAPQRAQISSPNLRTRPPPRRESSLGFQLPKPPEPPSVEVEYYTIAEFQSCISDGISFRGGQKAEVIDKNSGGWWYVQIGEKEGWAPASYIDKRKKPNLSRRTSTLTRPKVPPPAPPSKPKEAEEGPTGASESQDSPRKLKYEEPEYDIPAFGFDSEPELSEEPVEDRASGERRPAQPHRPSPASSLQRARFKVGESSEDVALEEETIYENEGFRPYAEDTLSARGSSGDSDSPGSSSLSLTRKNSPKSGSPKSSSLLKLKAEKNAQAEMGKNHSSASFSSSITINTTCCSSSSSSSSSLSKTSGDLKPRSASDAGIRGTPKVRAKKDADANAGLTSCPRAKPSVRPKPFLNRAESQSQEKMDISTLRRQLRPTGQLRGGLKGSKSEDSELPPQTASEAPSEGSRRSSSDLITLPATTPPCPTKKEWEGPATSYMTCSAYQKVQDSEISFPAGVEVQVLEKQESGWWYVRFGELEGWAPSHYLVLDENEQPDPSGKELDTVPAKGRQNEGKSDSLEKIERRVQALNTVNQSKKATPPIPSKPPGGFGKTSGTPAVKMRNGVRQVAVRPQSVFVSPPPKDNNLSCALRRNESLTATDGLRGVRRNSSFSTARSAAAEAKGRLAERAASQGSDSPLLPAQRNSIPVSPVRPKPIEKSQFIHNNLKDVYVSIADYEGDEETAGFQEGVSMEVLERNPNGWWYCQILDGVKPFKGWVPSNYLEKKN

SEQ ID NO: 8379 - protein, 369 aa, Homo sapiens
MSICCCFFFRDYGSSKRKSGADATAEPMILEQYVVVSNYKKQENSELSLQAGEVVDVIEKNESGWWFVSTSEEQGWVPATYLEAQNGTRDDSDINTSKTGEVSKRRKAHLRRLDRRWTLGGMVNRQHSREEKYVTVQPYTSQSKDEIGFEKGVTVEVIRKNLEGWWYIRYLGKEGWAPASYLKKAKDDLPTRKKNLAGPVEIIGNIMEISNLLNKKASGDKETPPAEGEGHEAPIAKKEISLPILCNASNGSAVGVPDRTVSRLAQGSPAVARIAPQRAQISSPNLRTRPPPRRESSLTESRCRQAGVQWHDLGSLQSPHPRFKRFSCLSLLSSWDHRHMPPHPANFLIFLIETGFHHVGQDGLHLLTS

SEQ ID NO: 8380 - protein, 965 aa, Homo sapiens
MPVTATGKILFRRSHIRDVAVKRLKPIDEYCRALVRLPPHISQCDEVFRFFEARPEDVNPPKEDYGSSKRKSGADATAEPMILEQYVVVSNYKKQENSELSLQAGEVVDVIEKNESGWWFVSTSEEQGWVPATYLEAQNGTRDDSDINTSKTGEVSKRRKAHLRRLDRRWTLGGMVNRQHSREEKYVTVQPYTSQSKDEIGFEKGVTVEVIRKNLEGWWYIRYLGKEGWAPASYLKKAKDDLPTRKKNLAGPVEIIGNIMEISNLLNKKASGDKETPPAEGEGHEAPIAKKEISLPILCNASNGSAVGVPDRTVSRLAQGSPAVARIAPQRAQISSPNLRTRPPPRRESSLGFQLPKPPEPPSVEVEYYTIAEFQSCISDGISFRGGQKAEVIDKNSGGWWYVQIGEKEGWAPASYIDKRKKPNLSRRTSTLTRPKVPPPAPPSKPKEAEEGPTGASESQDSPRKLKYEEPEYDIPAFGFDSEPELSEEPVEDRASGERRPAQPHRPSPASSLQRARFKVGESSEDVALEEETIYENEGFRPYAEDTLSARGSSGDSDSPGSSSLSLTRKNSPKSGSPKSSSLLKLKAEKNAQAEMGKNHSSASFSSSITINTTCCSSSSSSSSSLSKTSGDLKPRSASDAGIRGTPKVRAKKDADANAGLTSCPRAKPSVRPKPFLNRAESQSQEKMDISTLRRQLRPTGQLRGGLKGSKSEDSELPPQTASEAPSEGSRRSSSDLITLPATTPPCPTKKEWEGPATSYMTCSAYQKVQDSEISFPAGVEVQVLEKQESGWWYVRFGELEGWAPSHYLVLDENEQPDPSGKELDTVPAKGRQNEGKSDSLEKIERRVQALNTVNQSKKATPPIPSKPPGGFGKTSGTPAVKMRNGVRQVAVRPIEKSQFIHNNLKDVYVSIADYEGDEETAGFQEGVSMEVLERNPNGWWYCQILDGVKPFKGWVPSNYLEKKN

SEQ ID NO: 8381 - protein, 968 aa, Homo sapiens
MILEQYVVVSNYKKQENSELSLQAGEVVDVIEKNESGWWFVSTSEEQGWVPATYLEAQNGTRDDSDINTSKTGEVSKRRKAHLRRLDRRWTLGGMVNRQHSREEKYVTVQPYTSQSKDEIGFEKGVTVEVIRKNLEGWWYIRYLGKEGWAPASYLKKAKDDLPTRKKNLAGPVEIIGNIMEISNLLNKKASGDKETPPAEGEGHEAPIAKKEISLPILCNASNGSAVGVPDRTVSRLAQGSPAVARIAPQRAQISSPNLRTRPPPRRESSLGFQLPKPPEPPSVEVEYYTIAEFQSCISDGISFRGGQKAEVIDKNSGGWWYVQIGEKEGWAPASYIDKRKKPNLSRRTSTLTRPKVPPPAPPSKPKEAEEGPTGASESQDSPRKLKYEEPEYDIPAFGFDSEPELSEEPVEDRASGERRPAQPHRPSPASSLQRARFKVGESSEDVALEEETIYENEGFRPYAEDTLSARGSSGDSDSPGSSSLSLTRKNSPKSGSPKSSSLLKLKAEKNAQAEMGKNHSSASFSSSITINTTCCSSSSSSSSSLSKTSGDLKPRSASDAGIRGTPKVRAKKDADANAGLTSCPRAKPSVRPKPFLNRAESQSQEKMDISTLRRQLRPTGQLRGGLKGSKSEDSELPPQTASEAPSEGSRRSSSDLITLPATTPPCPTKKEWEGPATSYMTCSAYQKVQDSEISFPAGVEVQVLEKQESGWWYVRFGELEGWAPSHYLVLDENEQPDPSGKELDTVPAKGRQNEGKSDSLEKIERRVQALNTVNQSKKATPPIPSKPPGGFGKTSGTPAVKMRNGVRQVAVRPQSVFVSPPPKDNNLSCALRRNESLTATDGLRGVRRNSSFSTARSAAAEAKGRLAERAASQGSDSPLLPAQRNSIPVSPVRPKPIEKSQFIHNNLKDVYVSIADYEGDEETAGFQEGVSMEVLERNPNGWWYCQILDGVKPFKGWVPSNYLEKKN

SEQ ID NO: 8382 - protein, 1000 aa, Homo sapiens
MNGSFLLRLLFPVASILPETVLLRGADATAEPMILEQYVVVSNYKKQENSELSLQAGEVVDVIEKNESGWWFVSTSEEQGWVPATYLEAQNGTRDDSDINTSKTGEVSKRRKAHLRRLDRRWTLGGMVNRQHSREEKYVTVQPYTSQSKDEIGFEKGVTVEVIRKNLEGWWYIRYLGKEGWAPASYLKKAKDDLPTRKKNLAGPVEIIGNIMEISNLLNKKASGDKETPPAEGEGHEAPIAKKEISLPILCNASNGSAVGVPDRTVSRLAQGSPAVARIAPQRAQISSPNLRTRPPPRRESSLGFQLPKPPEPPSVEVEYYTIAEFQSCISDGISFRGGQKAEVIDKNSGGWWYVQIGEKEGWAPASYIDKRKKPNLSRRTSTLTRPKVPPPAPPSKPKEAEEGPTGASESQDSPRKLKYEEPEYDIPAFGFDSEPELSEEPVEDRASGERRPAQPHRPSPASSLQRARFKVGESSEDVALEEETIYENEGFRPYAEDTLSARGSSGDSDSPGSSSLSLTRKNSPKSGSPKSSSLLKLKAEKNAQAEMGKNHSSASFSSSITINTTCCSSSSSSSSSLSKTSGDLKPRSASDAGIRGTPKVRAKKDADANAGLTSCPRAKPSVRPKPFLNRAESQSQEKMDISTLRRQLRPTGQLRGGLKGSKSEDSELPPQTASEAPSEGSRRSSSDLITLPATTPPCPTKKEWEGPATSYMTCSAYQKVQDSEISFPAGVEVQVLEKQESGWWYVRFGELEGWAPSHYLVLDENEQPDPSGKELDTVPAKGRQNEGKSDSLEKIERRVQALNTVNQSKKATPPIPSKPPGGFGKTSGTPAVKMRNGVRQVAVRPQSVFVSPPPKDNNLSCALRRNESLTATDGLRGVRRNSSFSTARSAAAEAKGRLAERAASQGSDSPLLPAQRNSIPVSPVRPKPIEKSQFIHNNLKDVYVSIADYEGDEETAGFQEGVSMEVLERNPNGWWYCQILDGVKPFKGWVPSNYLEKKN

SEQ ID NO: 8383 - protein, 137 aa, Homo sapiens
MNKLSGGGGRRTRVEGGQLGGEEWTRHGSFVNKPTRGWLHPNDKVMGPGVSYLVRYMGCVEVLQSMRALDFNTRTQVTREAISLVCEAVPGAKGATRRRKPCSRPLSSILGRSNLKFAGMPITLTVSTSSLNLMAAD

SEQ ID NO: 8384 - protein, 305 aa, Homo sapiens
MAGFDGSAWDEEEEEPPDHQYYNDFPGKEPPLGGVVDMRLREGAAPGAARPTAPNAQTPSHLGATLPVGQPVGGDPEVRKQMPPPPPCPGRELFDDPSYVNVQNLDKARQAVGGAGPPNPAINGSAPRDLFDMKPFEDALRVPPPPQSVSMAEQLRGEPWFHGKLSRREAEALLQLNGDFLVRESTTTPGQYVLTGLQSGQPKHLLLVDPEGVRWGFAMLPKLFLNSRAQVIRLPRPPRVLGLQARTTMPSLHIFFCTVYTLLRHANFLQVKKGVYSSQLHSFRADVAFAFSHFTDLSIPTTVSF

SEQ ID NO: 8385 - protein, 520 aa, Homo sapiens
MSNLRLANPAGGRPGSKGEPGRAADDGEGIVGAAMPDSGPLPLLQDMNKLSGGGGRRTRVEGGQLGGEEWTRHGSFVNKPTRGWLHPNDKVMGPGVSYLVRYMGCVEVLQSMRALDFNTRTQVTREAISLVCEAVPGAKGATRRRKPCSRPLSSILGRSNLKFAGMPITLTVSTSSLNLMAADCKQIIANHHMQSISFASGGDPDTAEYVAYVAKDPVNQRACHILECPEGLAQDVISTIGQAFELRFKQYLRNPPKLVTPHDRMAGFDGSAWDEEEEEPPDHQYYNDFPGKEPPLGGVVDMRLREGAAPGAARPTAPNAQTPSHLGATLPVGQPVGGDPEVRKQMPPPPPCPAGRELFDDPSYVNVQNLDKARQAVGGAGPPNPAINGSAPRDLFDMKPFEDALRVPPPPQSVSMAEQLRGEPWFHGKLSRREAEALLQLNGDFLVRESTTTPGQYVLTGLQSGQPKHLLLVDPEGVVRTKDHRFESVSHLISYHMDNHLPIISAGSELCLQQPVERKL

SEQ ID NO: 8386 - protein, 583 aa, Homo sapiens
MDLLPPKPKYNPLRNESLSSLEEGASGSTPPEELPSPSASSLGPILPPLPGDDSPTTLCSFFPRMSNLRLANPAGGRPGSKGEPGRAADDGEGIVGAAMPDSGPLPLLQDMNKLSGGGGRRTRVEGGQLGGEEWTRHGSFVNKPTRGWLHPNDKVMGPGVSYLVRYMGCVEVLQSMRALDFNTRTQVTREAISLVCEAVPGAKGATRRRKPCSRPLSSILGRSNLKFAGMPITLTVSTSSLNLMAADCKQIIANHHMQSISFASGGDPDTAEYVAYVAKDPVNQRACHILECPEGLAQDVISTIGQAFELRFKQYLRNPPKLVTPHDRMAGFDGSAWDEEEEEPPDHQYYNDFPGKEPPLGGVVDMRLREGAAPGAARPTAPNAQTPSHLGATLPVGQPVGGDPEVRKQMPPPPPCPGRELFDDPSYVNVQNLDKARQAVGGAGPPNPAINGSAPRDLFDMKPFEDALRVPPPPQSVSMAEQLRGEPWFHGKLSRREAEALLQLNGDFLVRESTTTPGQYVLTGLQSGQPKHLLLVDPEGVVRTKDHRFESVSHLISYHMDNHLPIISAGSELCLQQPVERKL

SEQ ID NO: 8387 - protein, 384 aa, Homo sapiens
MDLLPPKPKYNPLRNESLSILGRSNLKFAGMPITLTVSTSSLNLMAADCKQIIANHHMQSISFASGGDPDTAEYVAYVAKDPVNQRACHILECPEGLAQDVISTIGQAFELRFKQYLRNPPKLVTPHDRMAGFDGSAWDEEEEEPPDHQYYNDFPGKEPPLGGVVDMRLREGAAPGAARPTAPNAQTPSHLGATLPVGQPVGGDPEVRKQMPPPPPCPGRELFDDPSYVNVQNLDKARQAVGGAGPPNPAINGSAPRDLFDMKPFEDALRVPPPPQSVSMAEQLRGEPWFHGKLSRREAEALLQLNGDFLVRESTTTPGQYVLTGLQSGQPKHLLLVDPEGVVRTKDHRFESVSHLISYHMDNHLPIISAGSELCLQQPVERKL

SEQ ID NO: 8388 - protein, 473 aa, Homo sapiens
MNKLSGGGGRRTRVEGGQLGGEEWTRHGSFVNKPTRGWLHPNDKVMGPGVSYLVRYMGCVEVLQSMRALDFNTRTQVTREAISLVCEAVPGAKGATRRRKPCSRPLSSILGRSNLKFAGMPITLTVSTSSLNLMAADCKQIIANHHMQSISFASGGDPDTAEYVAYVAKDPVNQRACHILECPEGLAQDVISTIGQAFELRFKQYLRNPPKLVTPHDRMAGFDGSAWDEEEEEPPDHQYYNDFPGKEPPLGGVVDMRLREGAAPGAARPTAPNAQTPSHLGATLPVGQPVGGDPEVRKQMPPPPPCPGRELFDDPSYVNVQNLDKARQAVGGAGPPNPAINGSAPRDLFDMKPFEDALRVPPPPQSVSMAEQLRGEPWFHGKLSRREAEALLQLNGDFLVRESTTTPGQYVLTGLQSGQPKHLLLVDPEGVVRTKDHRFESVSHLISYHMDNHLPIISAGSELCLQQPVERKL

SEQ ID NO: 8389 - protein, 474 aa, Homo sapiens
MNKLSGGGGRRTRVEGGQLGGEEWTRHGSFVNKPTRGWLHPNDKVMGPGVSYLVRYMGCVEVLQSMRALDFNTRTQVTREAISLVCEAVPGAKGATRRRKPCSRPLSSILGRSNLKFAGMPITLTVSTSSLNLMAADCKQIIANHHMQSISFASGGDPDTAEYVAYVAKDPVNQRACHILECPEGLAQDVISTIGQAFELRFKQYLRNPPKLVTPHDRMAGFDGSAWDEEEEEPPDHQYYNDFPGKEPPLGGVVDMRLREGAAPGAARPTAPNAQTPSHLGATLPVGQPVGGDPEVRKQMPPPPPCPAGRELFDDPSYVNVQNLDKARQAVGGAGPPNPAINGSAPRDLFDMKPFEDALRVPPPPQSVSMAEQLRGEPWFHGKLSRREAEALLQLNGDFLVRESTTTPGQYVLTGLQSGQPKHLLLVDPEGVVRTKDHRFESVSHLISYHMDNHLPIISAGSELCLQQPVERKL

SEQ ID NO: 8390 - protein, 200 aa, Homo sapiens
MNKLSGGGGRRTRVEGGQLGGEEWTRHGSFVNKPTRGWLHPNDKVMGPGVSYLVRYMGCVEVLQSMRALDFNTRTQVTREAISLVCEAVPGAKGATRRRKPCSRPLSSILGRSNLKFAGMPITLTVSTSSLNLMAADCKQDTAEYVAYVAKDPVNQRACHILECPEGLAQDVISTIGQAFELRFKQYLRNPPKLVTPHDR

SEQ ID NO: 8391 - protein, 200 aa, Homo sapiens
MPITLTVSTSSLNLMAADCKQDTAEYVAYVAKDPVNQRACHILECPEGLAQDVISTIGQAFELRFKQYLRNPPKLVTPHDRMAGFDGSAWDEEEEEPPDHQYYNDFPGKEPPLGGVVDMRLREGAAPGAARPTAPNAQTPSHLGATLPVGQPVGGDPEVRKQMPPPPPCPAGRELFDDPSYVNVQNLDKARQAVGGAGPP

SEQ ID NO: 8392 - protein, 130 aa, Homo sapiens
MPITLTVSTSSLNLMAADCKQIIANHHMQSISFASGGDPDTAEYVAYVAKDPVNQRACHILECPEGLAQDVISTIGQAFELRFKQYLRNPPKLVTPHDRMAGFDGSAWDEEEEEPPDHQYYNDFPGKEPP

SEQ ID NO: 8393 - protein, 297 aa, Homo sapiens
  VARIANT 1: note = MOD_RES - Any amino acid
XDEEEEEPPDHQYYNDFPGKEPPLGGVVDMRLREGAAPGAARPTAPNAQTPSHLGATLPVGQPVGGDPEVRKQMPPPPPCPGRELFDDPSYVNVQNLDKARQAVGGAGPPNPAINGSAPRDLFDMKPFEDALRVPPPPQSVSMAEQLRGEPWFHGKLSRREAEALLQLNGDFLVRESTTTPGQYVLTGLQSGQPKHLLLVDPEGVRWGFAMLPKLFLNSRAQVIRLPRPPRVLGLQARTTMPSLHIFFCTVYTLLRHANFLQVKKGVYSSQLHSFRADVAFAFSHFTDLSIPTTVSF

SEQ ID NO: 8394 - protein, 584 aa, Homo sapiens
MDLLPPKPKYNPLRNESLSSLEEGASGSTPPEELPSPSASSLGPILPPLPGDDSPTTLCSFFPRMSNLRLANPAGGRPGSKGEPGRAADDGEGIVGAAMPDSGPLPLLQDMNKLSGGGGRRTRVEGGQLGGEEWTRHGSFVNKPTRGWLHPNDKVMGPGVSYLVRYMGCVEVLQSMRALDFNTRTQVTREAISLVCEAVPGAKGATRRRKPCSRPLSSILGRSNLKFAGMPITLTVSTSSLNLMAADCKQIIANHHMQSISFASGGDPDTAEYVAYVAKDPVNQRACHILECPEGLAQDVISTIGQAFELRFKQYLRNPPKLVTPHDRMAGFDGSAWDEEEEEPPDHQYYNDFPGKEPPLGGVVDMRLREGAAPGAARPTAPNAQTPSHLGATLPVGQPVGGDPEVRKQMPPPPPCPAGRELFDDPSYVNVQNLDKARQAVGGAGPPNPAINGSAPRDLFDMKPFEDALRVPPPPQSVSMAEQLRGEPWFHGKLSRREAEALLQLNGDFLVRESTTTPGQYVLTGLQSGQPKHLLLVDPEGVVRTKDHRFESVSHLISYHMDNHLPIISAGSELCLQQPVERKL

SEQ ID NO: 8395 - protein, 582 aa, Homo sapiens
MTQGPGGRAPPAPPAPPEPEAPTTFCALLPRMPQWKFAAPGGFLGRGPAAARAAGASGGADPQPEPAGPGGVPALAAAVLGACEPRCAAPCPLPALSRCRGAGSRGSRGGRGAAGSGDAAAAAEWIRKGSFIHKPAHGWLHPDARVLGPGVSYVVRYMGCIEVLRSMRSLDFNTRTQVTREAINRLHEAVPGVRGSWKKKAPNKALASVLGKSNLRFAGMSISIHISTDGLSLSVPATRQVIANHHMPSISFASGGDTDMTDYVAYVAKDPINQRACHILECCEGLAQSIISTVGQAFELRFKQYLHSPPKVALPPERLAGPEESAWGDEEDSLEHNYYNSIPGKEPPLGGLVDSRLALTQPCALTALDQGPSPSLRDACSLPWDVGSTGTAPPGDGYVQADARGPPDHEEHLYVNTQGLDAPEPEDSPKKDLFDMRPFEDALKLHECSVAAGVTAAPLPLEDQWPSPPTRRAPVAPTEEQLRQEPWYHGRMSRRAAERMLRADGDFLVRDSVTNPGQYVLTGMHAGQPKHLLLVDPEGVVRTKDVLFESISHLIDHHLQNGQPIVAAESELHLRGVVSREP

SEQ ID NO: 8396 - protein, 610 aa, Homo sapiens
MLDFFTIFSKGGLVLWCFQGVSDSCTGPVNALIRSVLLQVGFQKILTLTYVDKLIDDVHRLFRDKYRTEIQQQSALSLLNGTFDFQNDFLRLLREAEESSKIRAPTTMKKFEDSEKAKKPVRSMIETRGEKPKEKAKNSKKKGAKKEGSDGPLATSKPVPAEKSGLPVGPENGVELSKEELIRRKREEFIQKHGRGMEKSNKSTKSDAPKEKGKKAPRVWELGGCANKEVLDYSTPTTNGTPEAALSEDINLIRGTGSGGQLQDLDCSSSDDEGAAQNSTKPSATKGTLGGMFGMLKGLVGSKSLSREDMESVLDKMRDHLIAKNVAADIAVQLCESVANKLEGKVMGTFSTVTSTVKQALQESLVQILQPQRRVDMLRDIMDAQRRQRPYVVTFCGVNGVGKSTNLAKISFWLLENGFSVLIAACDTFRAGAVEQLRTHTRRLSALHPPEKHGGRTMVQLFEKGYGKDAAGIAMEAIAFARNQGFDVVLVDTAGRMQDNAPLMTALAKLITVNTPDLVLFVGEALVGNEAVDQLVKFNRALADHSMAQTPRLIDGIVLTKFDTIDDKVGAAISMTYITSKPIVFVGTGQTYCDLRSLNAKAVVAALMKA

SEQ ID NO: 8397 - protein, 750 aa, Homo sapiens
MSQWYELQQLDSKFLEQVHQLYDDSFPMEIRQYLAQWLEKQDWEHAANDVSFATIRFHDLLSQLDDQYSRFSLENNFLLQHNIRKSKRNLQDNFQEDPIQMSMIIYSCLKEERKILENAQRFNQAQSGNIQSTVMLDKQKELDSKVRNVKDKVMCIEHEIKSLEDLQDEYDFKCKTLQNREHETNGVAKSDQKQEQLLLKKMYLMLDNKRKEVVHKIIELLNVTELTQNALINDELVEWKRRQQSACIGGPPNACLDQLQNWFTIVAESLQQVRQQLKKLEELEQKYTYEHDPITKNKQVLWDRTFSLFQQLIQSSFVVERQPCMPTHPQRPLVLKTGVQFTVKLRLLVKLQELNYNLKVKVLFDKDVNERNTVKGFRKFNILGTHTKVMNMEESTNGSLAAEFRHLQLKEQKNAGTRTNEGPLIVTEELHSLSFETQLCQPGLVIDLETTSLPVVVISNVSQLPSGWASILWYNMLVAEPRNLSFFLTPPCARWAQLSEVLSWQFSSVTKRGLNVDQLNMLGEKLLGPNASPDGLIPWTRFCKENINDKNFPFWLWIESILELIKKHLLPLWNDGCIMGFISKERERALLKDQQPGTFLLRFSESSREGAITFTWVERSQNGGEPDFHAVEPYTKKELSAVTFPDIIRNYKVMAAENIPENPLKYLYPNIDKDHAFGKYYSRPKEAPEPMELDGPKGTGYIKTELISVSEVHPSRLQTTDNLLPMSPEEFDEVSRIVGSVEFDSMMNTV

SEQ ID NO: 8398 - protein, 712 aa, Homo sapiens
MSQWYELQQLDSKFLEQVHQLYDDSFPMEIRQYLAQWLEKQDWEHAANDVSFATIRFHDLLSQLDDQYSRFSLENNFLLQHNIRKSKRNLQDNFQEDPIQMSMIIYSCLKEERKILENAQRFNQAQSGNIQSTVMLDKQKELDSKVRNVKDKVMCIEHEIKSLEDLQDEYDFKCKTLQNREHETNGVAKSDQKQEQLLLKKMYLMLDNKRKEVVHKIIELLNVTELTQNALINDELVEWKRRQQSACIGGPPNACLDQLQNWFTIVAESLQQVRQQLKKLEELEQKYTYEHDPITKNKQVLWDRTFSLFQQLIQSSFVVERQPCMPTHPQRPLVLKTGVQFTVKLRLLVKLQELNYNLKVKVLFDKDVNERNTVKGFRKFNILGTHTKVMNMEESTNGSLAAEFRHLQLKEQKNAGTRTNEGPLIVTEELHSLSFETQLCQPGLVIDLETTSLPVVVISNVSQLPSGWASILWYNMLVAEPRNLSFFLTPPCARWAQLSEVLSWQFSSVTKRGLNVDQLNMLGEKLLGPNASPDGLIPWTRFCKENINDKNFPFWLWIESILELIKKHLLPLWNDGCIMGFISKERERALLKDQQPGTFLLRFSESSREGAITFTWVERSQNGGEPDFHAVEPYTKKELSAVTFPDIIRNYKVMAAENIPENPLKYLYPNIDKDHAFGKYYSRPKEAPEPMELDGPKGTGYIKTELISVSEV

SEQ ID NO: 8399 - protein, 714 aa, Homo sapiens
MWMSQWYELQQLDSKFLEQVHQLYDDSFPMEIRQYLAQWLEKQDWEHAANDVSFATIRFHDLLSQLDDQYSRFSLENNFLLQHNIRKSKRNLQDNFQEDPIQMSMIIYSCLKEERKILENAQRFNQAQSGNIQSTVMLDKQKELDSKVRNVKDKVMCIEHEIKSLEDLQDEYDFKCKTLQNREHETNGVAKSDQKQEQLLLKKMYLMLDNKRKEVVHKIIELLNVTELTQNALINDELVEWKRRQQSACIGGPPNACLDQLQNWFTIVAESLQQVRQQLKKLEELEQKYTYEHDPITKNKQVLWDRTFSLFQQLIQSSFVVERQPCMPTHPQRPLVLKTGVQFTVKLRLLVKLQELNYNLKVKVLFDKDVNERNTVKGFRKFNILGTHTKVMNMEESTNGSLAAEFRHLQLKEQKNAGTRTNEGPLIVTEELHSLSFETQLCQPGLVIDLETTSLPVVVISNVSQLPSGWASILWYNMLVAEPRNLSFFLTPPCARWAQLSEVLSWQFSSVTKRGLNVDQLNMLGEKLLGPNASPDGLIPWTRFCKENINDKNFPFWLWIESILELIKKHLLPLWNDGCIMGFISKERERALLKDQQPGTFLLRFSESSREGAITFTWVERSQNGGEPDFHAVEPYTKKELSAVTFPDIIRNYKVMAAENIPENPLKYLYPNIDKDHAFGKYYSRPKEAPEPMELDGPKGTGYIKTELISVSEV

SEQ ID NO: 8400 - protein, 750 aa, Homo sapiens; identical to SEQ ID NO: 8397

SEQ ID NO: 8401 - protein, 180 aa, Homo sapiens
MSQWYELQQLDSKFLEQVHQLYDDSFPMEIRQYLAQWLEKQDWEHAANDVSFATIRFHDLLSQLDDQYSRFSLENNFLLQHNIRKSKRNLQDNFQEDPIQMSMIIYSCLKEERKILENAQRFNQAQSGNIQSTVMLDKQKELDSKVRNVKDKVMCIEHEIKSLEDLQDEYDFKCKTLQNR

SEQ ID NO: 8402 - protein, 70 aa, Homo sapiens
MSQWYELQQLDSKFLEQVHQLYDDSFPMEIRQYLAQWLEKQDWEHAANDVSFATIRFHDLLSQLDDQYSR

SEQ ID NO: 8403 - protein, 193 aa, Homo sapiens
MSQWYELQQLDSKFLEQVHQLYDDSFPMEIRQYLAQWLEKQDWEHAANDVSFATIRFHDLLSQLDDQYSRFSLENNFLLQHNIRKSKRNLQDNFQEDPIQMSMIIYSCLKEERKILENAQRFNQAQSGNIQSTVMLDKQKELDSKVRNVKDKVMCIEHEIKSLEDLQDEYDFKCKTLQNRGSSSQNNRVAECH

SEQ ID NO: 8404 - protein, 150 aa, Homo sapiens
MSQWYELQQLDSKFLEQVHQLYDDSFPMEIRQYLAQWLEKQDWEHAANDVSFATIRFHDLLSQLDDQYSRFSLENNFLLQHNIRKSKRNLQDNFQEDPIQMSMIIYSCLKEERKILENAQRFNQAQSGNIQSTVMLDKQKELDSKVRNVK

SEQ ID NO: 8405 - protein, 193 aa, Homo sapiens; identical to SEQ ID NO: 8403

SEQ ID NO: 8406 - protein, 160 aa, Homo sapiens
ECHEDPIQMSMIIYSCLKEERKILENAQRFNQAQSGNIQSTVMLDKQKELDSKVRNVKDKVMCIEHEIKSLEDLQDEYDFKCKTLQNREHETNGVAKSDQKQEQLLLKKMYLMLDNKRKEVVHKIIELLNVTELTQNALINDELVEWKRRQQSACIGGPP

SEQ ID NO: 8407 - protein, 851 aa, Homo sapiens
MAQWEMLQNLDSPFQDQLHQLYSHSLLPVDIRQYLAVWIEDQNWQEAALGSDDSKATMLFFHFLDQLNYECGRCSQDPESLLLQHNLRKFCRDIQPFSQDPTQLAEMIFNLLLEEKRILIQAQRAQLEQGEPVLETPVESQQHEIESRILDLRAMMEKLVKSISQLKDQQDVFCFRYKIQAKGKTPSLDPHQTKEQKILQETLNELDKRRKEVLDASKALLGRLTTLIELLLPKLEEWKAQQQKACIRAPIDHGLEQLETWFTAGAKLLFHLRQLLKELKGLSCLVSYQDDPLTKGVDLRNAQVTELLQRLLHRAFVVETQPCMPQTPHRPLILKTGSKFTVRTRLLVRLQEGNESLTVEVSIDRNPPQLQGFRKFNILTSNQKTLTPEKGQSQGLIWDFGYLTLVEQRSGGSGKGSNKGPLGVTEELHIISFTVKYTYQGLKQELKTDTLPVVIISNMNQLSIAWASVLWFNLLSPNLQNQQFFSNPPKAPWSLLGPALSWQFSSYVGRGLNSDQLSMLRNKLFGQNCRTEDPLLSWADFTKRESPPGKLPFWTWLDKILELVHDHLKDLWNDGRIMGFVSRSQERRLLKKTMSGTFLLRFSESSEGGITCSWVEHQDDDKVLIYSVQPYTKEVLQSLPLTEIIRHYQLLTEENIPENPLRFLYPRIPRDEAFGCYYQEKVNLQERRKYLKHRLIVVSNRQVDELQQPLELKPEPELESLELELGLVPEPELSLDLEPLLKAGLDLGPELESVLESTLEPVIEPTLCMVSQTVPEPDQGPVSQPVPEPDLPCDLRHLNTEPMEIFRNCVKIEEIMPNGDPLLAGQNTVDEVYVSRPSHFYTDGPLMPSDF

SEQ ID NO: 8408 - protein, 460 aa, Homo sapiens
MAQWEMLQNLDSPFQDQLHQLYSHSLLPVDIRQYLAVWIEDQNWQEAALGSDDSKATMLFFHFLDQLNYECGRCSQDPESLLLQHNLRKFCRDIQDPTQLAEMIFNLLLEEKRILIQAQRAQLEQGEPVLETPVESQQHEIESRILDLRAMMEKLVKSISQLKDQQDVFCFRYKIQAKGKTPSLDPHQTKEQKILQETLNELDKRRKEVLDASKALLGRLTTLIELLLPKLEEWKAQQQKACIRAPIDHGLEQLETWFTAGAKLLFHLRQLLKELKGLSCLVSYQDDPLTKGVDLRNAQVTELLQRLLHRAFVVETQPCMPQTPHRPLILKTGSKFTVRTRLLVRLQEGNESLTVEVSIDRNPPQLQGFRKFNILTSNQKTLTPEKGQSQGLIWDFGYLTLVEQRSGGSGKGSNKGPLGVTEELHIISFTVKYTYQGLKQELKVSENGGQGERKQLWKKA

SEQ ID NO: 8409 - protein, 847 aa, Homo sapiens
MAQWEMLQNLDSPFQDQLHQLYSHSLLPVDIRQYLAVWIEDQNWQEAALGSDDSKATMLFFHFLDQLNYECGRCSQDPESLLLQHNLRKFCRDIQDPTQLAEMIFNLLLEEKRILIQAQRAQLEQGEPVLETPVESQQHEIESRILDLRAMMEKLVKSISQLKDQQDVFCFRYKIQAKGKTPSLDPHQTKEQKILQETLNELDKRRKEVLDASKALLGRLTTLIELLLPKLEEWKAQQQKACIRAPIDHGLEQLETWFTAGAKLLFHLRQLLKELKGLSCLVSYQDDPLTKGVDLRNAQVTELLQRLLHRAFVVETQPCMPQTPHRPLILKTGSKFTVRTRLLVRLQEGNESLTVEVSIDRNPPQLQGFRKFNILTSNQKTLTPEKGQSQGLIWDFGYLTLVEQRSGGSGKGSNKGPLGVTEELHIISFTVKYTYQGLKQELKTDTLPVVIISNMNQLSIAWASVLWFNLLSPNLQNQQFFSNPPKAPWSLLGPALSWQFSSYVGRGLNSDQLSMLRNKLFGQNCRTEDPLLSWADFTKRESPPGKLPFWTWLDKILELVHDHLKDLWNDGRIMGFVSRSQERRLLKKTMSGTFLLRFSESSEGGITCSWVEHQDDDKVLIYSVQPYTKEVLQSLPLTEIIRHYQLLTEENIPENPLRFLYPRIPRDEAFGCYYQEKVNLQERRKYLKHRLIVVSNRQVDELQQPLELKPEPELESLELELGLVPEPELSLDLEPLLKAGLDLGPELESVLESTLEPVIEPTLCMVSQTVPEPDQGPVSQPVPEPDLPCDLRHLNTEPMEIFRNCVKIEEIMPNGDPLLAGQNTVDEVYVSRPSHFYTDGPLMPSDF

SEQ ID NO: 8410 - protein, 770 aa, Homo sapiens
MAQWNQLQQLDTRYLEQLHQLYSDSFPMELRQFLAPWIESQDWAYAASKESHATLVFHNLLGEIDQQYSRFLQESNVLYQHNLRRIKQFLQSRYLEKPMEIARIVARCLWEESRLLQTAATAAQQGGQANHPTAAVVTEKQQMLEQHLQDVRKRVQDLEQKMKVVENLQDDFDFNYKTLKSQGDMQDLNGNNQSVTRQKMQQLEQMLTALDQMRRSIVSELAGLLSAMEYVQKTLTDEELADWKRRQQIACIGGPPNICLDRLENWITSLAESQLQTRQQIKKLEELQQKVSYKGDPIVQHRPMLEERIVELFRNLMKSAFVVERQPCMPMHPDRPLVIKTGVQFTTKVRLLVKFPELNYQLKIKVCIDKDSGDVAALRGSRKFNILGTNTKVMNMEESNNGSLSAEFKHLTLREQRCGNGGRANCDASLIVTEELHLITFETEVYHQGLKIDLETHSLPVVVISNICQMPNAWASILWYNMLTNNPKNVNFFTKPPIGTWDQVAEVLSWQFSSTTKRGLSIEQLTTLAEKLLGPGVNYSGCQITWAKFCKENMAGKGFSFWVWLDNIIDLVKKYILALWNEGYIMGFISKERERAILSTKPPGTFLLRFSESSKEGGVTFTWVEKDISGKTQIQSVEPYTKQQLNNMSFAEIIMGYKIMDATNILVSPLVYLYPDIPKEEAFGKYCRPESQEHPEADPGSAAPYLKTKFICVTPTTCSNTIDLPMSPRTLDSLMQFGNNGEGAEPSAGGQFESLTFDMELTSECATSPM

SEQ ID NO: 8411 - protein, 672 aa, Homo sapiens
MEIARIVARCLWEESRLLQTAATAAQQGGQANHPTAAVVTEKQQMLEQHLQDVRKRVQDLEQKMKVVENLQDDFDFNYKTLKSQGDMQDLNGNNQSVTRQKMQQLEQMLTALDQMRRSIVSELAGLLSAMEYVQKTLTDEELADWKRRQQIACIGGPPNICLDRLENWITSLAESQLQTRQQIKKLEELQQKVSYKGDPIVQHRPMLEERIVELFRNLMKSAFVVERQPCMPMHPDRPLVIKTGVQFTTKVRLLVKFPELNYQLKIKVCIDKDSGDVAALRGSRKFNILGTNTKVMNMEESNNGSLSAEFKHLTLREQRCGNGGRANCDASLIVTEELHLITFETEVYHQGLKIDLETHSLPVVVISNICQMPNAWASILWYNMLTNNPKNVNFFTKPPIGTWDQVAEVLSWQFSSTTKRGLSIEQLTTLAEKLLGPGVNYSGCQITWAKFCKENMAGKGFSFWVWLDNIIDLVKKYILALWNEGYIMGFISKERERAILSTKPPGTFLLRFSESSKEGGVTFTWVEKDISGKTQIQSVEPYTKQQLNNMSFAEIIMGYKIMDATNILVSPLVYLYPDIPKEEAFGKYCRPESQEHPEADPGSAAPYLKTKFICVTPTTCSNTIDLPMSPRTLDSLMQFGNNGEGAEPSAGGQFESLTFDMELTSECATSPM

SEQ ID NO: 8412 - protein, 769 aa, Homo sapiens
MAQWNQLQQLDTRYLEQLHQLYSDSFPMELRQFLAPWIESQDWAYAASKESHATLVFHNLLGEIDQQYSRFLQESNVLYQHNLRRIKQFLQSRYLEKPMEIARIVARCLWEESRLLQTAATAAQQGGQANHPTAAVVTEKQQMLEQHLQDVRKRVQDLEQKMKVVENLQDDFDFNYKTLKSQGDMQDLNGNNQSVTRQKMQQLEQMLTALDQMRRSIVSELAGLLSAMEYVQKTLTDEELADWKRRQQIACIGGPPNICLDRLENWITSLAESQLQTRQQIKKLEELQQKVSYKGDPIVQHRPMLEERIVELFRNLMKSAFVVERQPCMPMHPDRPLVIKTGVQFTTKVRLLVKFPELNYQLKIKVCIDKDSGDVAALRGSRKFNILGTNTKVMNMEESNNGSLSAEFKHLTLREQRCGNGGRANCDASLIVTEELHLITFETEVYHQGLKIDLETHSLPVVVISNICQMPNAWASILWYNMLTNNPKNVNFFTKPPIGTWDQVAEVLSWQFSSTTKRGLSIEQLTTLAEKLLGPGVNYSGCQITWAKFCKENMAGKGFSFWVWLDNIIDLVKKYILALWNEGYIMGFISKERERAILSTKPPGTFLLRFSESSKEGGVTFTWVEKDISGKTQIQSVEPYTKQQLNNMSFAEIIMGYKIMDATNILVSPLVYLYPDIPKEEAFGKYCRPESQEHPEADPGAAPYLKTKFICVTPTTCSNTIDLPMSPRTLDSLMQFGNNGEGAEPSAGGQFESLTFDMELTSECATSPM

SEQ ID NO: 8413 - protein, 722 aa, Homo sapiens
MAQWNQLQQLDTRYLEQLHQLYSDSFPMELRQFLAPWIESQDWAYAASKESHATLVFHNLLGEIDQQYSRFLQESNVLYQHNLRRIKQFLQSRYLEKPMEIARIVARCLWEESRLLQTAATAAQQGGQANHPTAAVVTEKQQMLEQHLQDVRKRVQDLEQKMKVVENLQDDFDFNYKTLKSQGDMQDLNGNNQSVTRQKMQQLEQMLTALDQMRRSIVSELAGLLSAMEYVQKTLTDEELADWKRRQQIACIGGPPNICLDRLENWITSLAESQLQTRQQIKKLEELQQKVSYKGDPIVQHRPMLEERIVELFRNLMKSAFVVERQPCMPMHPDRPLVIKTGVQFTTKVRLLVKFPELNYQLKIKVCIDKDSGDVAALRGSRKFNILGTNTKVMNMEESNNGSLSAEFKHLTLREQRCGNGGRANCDASLIVTEELHLITFETEVYHQGLKIDLETHSLPVVVISNICQMPNAWASILWYNMLTNNPKNVNFFTKPPIGTWDQVAEVLSWQFSSTTKRGLSIEQLTTLAEKLLGPGVNYSGCQITWAKFCKENMAGKGFSFWVWLDNIIDLVKKYILALWNEGYIMGFISKERERAILSTKPPGTFLLRFSESSKEGGVTFTWVEKDISGKTQIQSVEPYTKQQLNNMSFAEIIMGYKIMDATNILVSPLVYLYPDIPKEEAFGKYCRPESQEHPEADPGSAAPYLKTKFICVTPFIDAVWK

SEQ ID NO: 8414 - protein, 748 aa, Homo sapiens
MSQWNQVQQLEIKFLEQVDQFYDDNFPMEIRHLLAQWIENQDWEAASNNETMATILLQNLLIQLDEQLGRVSKEKNLLLIHNLKRIRKVLQGKFHGNPMHVAVVISNCLREERRILAAANMPVQGPLEKSLQSSSVSERQRNVEHKVAAIKNSVQMTEQDTKYLEDLQDEFDYRYKTIQTMDQSDKNSAMVNQEVLTLQEMLNSLDFKRKEALSKMTQIIHETDLLMNTMLIEELQDWKRRQQIACIGGPLHNGLDQLQNCFTLLAESLFQLRRQLEKLEEQSTKMTYEGDPIPMQRTHMLERVTFLIYNLFKNSFVVERQPCMPTHPQRPLVLKTLIQFTVKLRLLIKLPELNYQVKVKASIDKNVSTLSNRRFVLCGTNVKAMSIEESSNGSLSVEFRHLQPKEMKSSAGGKGNEGCHMVTEELHSITFETQICLYGLTIDLETSSLPVVMISNVSQLPNAWASIIWYNVSTNDSQNLVFFNNPPPATLSQLLEVMSWQFSSYVGRGLNSDQLHMLAEKLTVQSSYSDGHLTWAKFCKEHLPGKSFTFWTWLEAILDLIKKHILPLWIDGYVMGFVSKEKERLLLKDKMPGTFLLRFSESHLGGITFTWVDHSESGEVRFHSVEPYNKGRLSALPFADILRDYKVIMAENIPENPLKYLYPDIPKDKAFGKHYSSQPCEVSRPTERGDKGYVPSVFIPISTIRSDSTEPHSPSDLLPMSPSVYAVLRENLSPTTIETAMKSPYSAE

SEQ ID NO: 8415 - protein, 748 aa, Homo sapiens; identical to SEQ ID NO: 8414

SEQ ID NO: 8416 - protein, 117 aa, Homo sapiens
MSQWNQVQQLEIKFLEQVDQFYDDNFPMEIRHLLAQWIENQDWEAASNNETMATILLQNLLIQLDEQLGRVSKEKNLLLIHNLKRIRKVLQSPGLATAQLPLDRHGETCIQRSKSCP

SEQ ID NO: 8417 - protein, 25 aa, Homo sapiens
MSQWNQVQQLEIKFLEQVDQFYDDN

SEQ ID NO: 8418 - protein, 79 aa, Homo sapiens
MSQWNQVQQLEIKFLEQVDQFYDDNFPMEIRHLLAQWIENQDWEAASNNETMATILLQNLLIQLDEQLGRVSKEKNLLL

SEQ ID NO: 8419 - protein, 794 aa, Homo sapiens
MAGWIQAQQLQGDALRQMQVLYGQHFPIEVRHYLAQWIESQPWDAIDLDNPQDRAQATQLLEGLVQELQKKAEHQVGEDGFLLKIKLGHYATQLQKTYDRCPLELVRCIRHILYNEQRLVREANNCSSPAGILVDAMSQKHLQINQTFEELRLVTQDTENELKKLQQTQEYFIIQYQESLRIQAQFAQLAQLSPQERLSRETALQQKQVSLEAWLQREAQTLQQYRVELAEKHQKTLQLLRKQQTIILDDELIQWKRRQQLAGNGGPPEGSLDVLQSWCEKLAEIIWQNRQQIRRAEHLCQQLPIPGPVEEMLAEVNATITDIISALVTSTFIIEKQPPQVLKTQTKFAATVRLLVGGKLNVHMNPPQVKATIISEQQAKSLLKNENTRNECSGEILNNCCVMEYHQATGTLSAHFRNMSLKRIKRADRRGAESVTEEKFTVLFESQFSVGSNELVFQVKTLSLPVVVIVHGSQDHNATATVLWDNAFAEPGRVPFAVPDKVLWPQLCEALNMKFKAEVQSNRGLTKENLVFLAQKLFNNSSSHLEDYSGLSVSWSQFNRENLPGWNYTFWQWFDGVMEVLKKHHKPHWNDGAILGFVNKQQAHDLLINKPDGTFLLRFSDSEIGGITIAWKFDSPERNLWNLKPFTTRDFSIRSLADRLGDLSYLIYVFPDRPKDEVFSKYYTPVLAKAVDGYVKPQIKQVVPEFVNASADAGGSSATYMDQAPSPAVCPQAPYNMYPQNPDHVLDQDGEFDLDETMDVARHVEELLRRPMDSLDSRLSPPAGLFTSARGSLS

SEQ ID NO: 8420 - protein, 125 aa, Homo sapiens
MAGWIQAQQLQGDALRQMQVLYGQHFPIEVRHYLAQWIESQPWDAIDLDNPQDRAQATQLLEGLVQELQKKAEHQVGEDGFLLKIKLGHYATQLQKTYDRCPLELVRCIRHILYNEQRLVREANN

SEQ ID NO: 8421 - protein, 791 aa, Homo sapiens
MAGWIQAQQLQGDALRQMQVLYGQHFPIEVRHYLAQWIESQPWDAIDLDNPQDRAQATQLLEGLVQELQKKAEHQVGEDGFLLKIKLGHYATQLQKTYDRCPLELVRCIRHILYNEQRLVREANNCSSPAGILVDAMSQKHLQINQTFEELRLVTQDTENELKKLQQTQEYFIIQYQESLRIQAQFAQLAQLSPQERLSRETALQQKQVSLEAWLQREAQTLQQYRVELAEKHQKTLQLLRKQQTIILDDELIQWKRRQQLAGNGGPPEGSLDVLQSWCEKLAEIIWQNRQQIRRAEHLCQQLPIPGPVEEMLAEVNATITDIISALVTSTFIIEKQPPQVLKTQTKFAATVRLLVGGKLNVHMNPPQVKATIISEQQAKSLLKNENTRNECSGEILNNCCVMEYHQATGTLSAHFRNMSLKRIKRADRRGAESVTEEKFTVLFESQFSVGSNELVFQVKTLSLPVVVIVHGSQDHNATATVLWDNAFAEPGRVPFAVPDKVLWPQLCEALNMKFKAEVQSNRGLTKENLVFLAQKLFNNSSSHLEDYSGLSVSWSQFNRENLPGWNYTFWQWFDGVMEVLKKHHKPHWNDGGFVNKQQAHDLLINKPDGTFLLRFSDSEIGGITIAWKFDSPERNLWNLKPFTTRDFSIRSLADRLGDLSYLIYVFPDRPKDEVFSKYYTPVLAKAVDGYVKPQIKQVVPEFVNASADAGGSSATYMDQAPSPAVCPQAPYNMYPQNPDHVLDQDGEFDLDETMDVARHVEELLRRPMDSLDSRLSPPAGLFTSARGSLS

SEQ ID NO: 8422 - protein, 765 aa, Homo sapiens
TAMAGWIQAQQLQGDALRQMQVLYGQHFPIEVRHYLAQWIESQPWDAIDLDNPQDRAQATQLLEGLVQELQKKAEHQVGEDGFLLKIKLGHYATQLQKTYDRCPLELVRCIRHILYNEQRLVREANNCSSPAGILVDAMSQKHLQINQTFEELRLVTQDTENELKKLQQTQEYFIIQYQESLRIQAQFAQLAQLSPQERLSRETALQQKQVSLEAWLQREAQTLQQYRVELAEKHQKTLQLLRKQQTIILDDELIQWKRRQQLAGNGGPPEGSLDVLQSWCEKLAEIIWQNRQQIRRAEHLCQQLPIPGPVEEMLAEVNATITDIISALVTSTFIIEKQPPQVLKTQTKFAATVRLLVGGKLNVHMNPPQVKATIISEQQAKSLLKNENTRNECSGEILNNCCVMEYHQATGTLSAHFRNMSLKRIKRADRRGAESVTEEKFTVLFESQFSVGSNELVFQVKGRVPFAVPDKVLWPQLCEALNMKFKAEVQSNRGLTKENLVFLAQKLFNNSSSHLEDYSGLSVSWSQFNRENLPGWNYTFWQWFDGVMEVLKKHHKPHWNDGAILGFVNKQQAHDLLINKPDGTFLLRFSDSEIGGITIAWKFDSPERNLWNLKPFTTRDFSIRSLADRLGDLSYLIYVFPDRPKDEVFSKYYTPVLAKAVDGYVKPQIKQVVPEFVNASADAGGSSATYMDQAPSPAVCPQAPYNMYPQNPDHVLDQDGEFDLDETMDVARHVEELLRRPMDSLDSRLSPPAGLFTSARGSLS

SEQ ID NO: 8423 - protein, 764 aa, Homo sapiens
MAGWIQAQQLQGDALRQMQVLYGQHFPIEVRHYLAQWIESQPWDAIDLDNPQDRAQATQLLEGLVQELQKKAEHQVGEDGFLLKIKLGHYATQLQCSSPAGILVDAMSQKHLQINQTFEELRLVTQDTENELKKLQQTQEYFIIQYQESLRIQAQFAQLAQLSPQERLSRETALQQKQVSLEAWLQREAQTLQQYRVELAEKHQKTLQLLRKQQTIILDDELIQWKRRQQLAGNGGPPEGSLDVLQSWCEKLAEIIWQNRQQIRRAEHLCQQLPIPGPVEEMLAEVNATITDIISALVTSTFIIEKQPPQVLKTQTKFAATVRLLVGGKLNVHMNPPQVKATIISEQQAKSLLKNENTRNECSGEILNNCCVMEYHQATGTLSAHFRNMSLKRIKRADRRGAESVTEEKFTVLFESQFSVGSNELVFQVKTLSLPVVVIVHGSQDHNATATVLWDNAFAEPGRVPFAVPDKVLWPQLCEALNMKFKAEVQSNRGLTKENLVFLAQKLFNNSSSHLEDYSGLSVSWSQFNRENLPGWNYTFWQWFDGVMEVLKKHHKPHWNDGAILGFVNKQQAHDLLINKPDGTFLLRFSDSEIGGITIAWKFDSPERNLWNLKPFTTRDFSIRSLADRLGDLSYLIYVFPDRPKDEVFSKYYTPVLAKAVDGYVKPQIKQVVPEFVNASADAGGSSATYMDQAPSPAVCPQAPYNMYPQNPDHVLDQDGEFDLDETMDVARHVEELLRRPMDSLDSRLSPPAGLFTSARGSLS

SEQ ID NO: 8424 - protein, 764 aa, Homo sapiens; identical to SEQ ID NO: 8423

SEQ ID NO: 8425 - protein, 787 aa, Homo sapiens
MAVWIQAQQLQGEALHQMQALYGQHFPIEVRHYLSQWIESQAWDSVDLDNPQENIKATQLLEGLVQELQKKAEHQVGEDGFLLKIKLGHYATQLQNTYDRCPMELVRCIRHILYNEQRLVREANNGSSPAGSLADAMSQKHLQINQTFEELRLVTQDTENELKKLQQTQEYFIIQYQESLRIQAQFGPLAQLSPQERLSRETALQQKQVSLEAWLQREAQTLQQYRVELAEKHQKTLQLLRKQQTIILDDELIQWKRRQQLAGNGGPPEGSLDVLQSWCEKLAEIIWQNRQQIRRAEHLCQQLPIPGPVEEMLAEVNATITDIISALVTSTFIIEKQPPQVLKTQTKFAATVRLLVGGKLNVHMNPPQVKATIISEQQAKSLLKNENTRNDYSGEILNNCCVMEYHQATGTLSAHFRNMSLKRIKRSDRRGAESVTEEKFTILFESQFSVGGNELVFQVKTLSLPVVVIVHGSQDNNATATVLWDNAFAEPGRVPFAVPDKVLWPQLCEALNMKFKAEVQSNRGLTKENLVFLAQKLFNNSSSHLEDYSGLSVSWSQFNRENLPGRNYTFWQWFDGVMEVLKKHLKPHWNDGAILGFVNKQQAHDLLINKPDGTFLLRFSDSEIGGITIAWKFDSQERMFWNLMPFTTRDFSIRSLADRLGDLNYLIYVFPDRPKDEVYSKYYTPVPCESATAKAVDGYVKPQIKQVVPEFVNASADAGGGSATYMDQAPSPAVCPQAHYNMYPQNPDSVLDTDGDFDLEDTMDVARRVEELLGRPMDSQWIPHAQS

SEQ ID NO: 8426 - protein, 156 aa, Homo sapiens
MAVWIQAQQLQGEALHQMQALYGQHFPIEVRHYLSQWIESQAWDSVDLDNPQENIKATQLLEGLVQELQKKAEHQVGEDGFLLKIKLGHYATQLQNTYDRCPMELVRCIRHILYNEQRLVREANNGSSPAGSLADAMSQKHLQINQTFEELRLVTQ

SEQ ID NO: 8427 - protein, 177 aa, Homo sapiens
MPQAFLLGSIHEPAGALMEPQPCPGSLAESFLEEELRLNAELSQLQFSEPVGIIYNPVEYAWEPHRNYVTRYCQGPKEVLFLGMNPGPFGMAQTGVPFGEVSMVRDWLGIVGPVLTPPQEHPKRPVLGLECPQSEGPRQSMGHEIKSELLMGGCSWIRGKIQCDRVQVRRPGFSSQL

SEQ ID NO: 8428 - protein, 270 aa, Homo sapiens
MPQAFLLGSIHEPAGALMEPQPCPGSLAESFLEEELRLNAELSQLQFSEPVGIIYNPVEYAWEPHRNYVTRYCQGPKEVLFLGMNPGPFGMAQTGVPFGEVSMVRDWLGIVGPVLTPPQEHPKRPVLGLECPQSEVSGARFWGFFRNLCGQPEVFFHHCFVHNLCPLLFLAPSGRNLTPAELPAKQREQLLGICDAALCRQVQLLGVRLVVGVGRLAEQRARRALAGLMPEVQVEGLLHPSPRNPQANKGWEAVAKERLNELGLLPLLLK

SEQ ID NO: 8429 - protein, 270 aa, Homo sapiens; identical to SEQ ID NO: 8428

SEQ ID NO: 8430 - protein, 82 aa, Homo sapiens
MPQAFLLGSIHEPAGALMEPQPCPGSLAESFLEEELRLNAELSQLQFSEPVGIIYNPVEYAWEPHRNYVTRYCQGPKEVLFL

SEQ ID NO: 8431 - protein, 172 aa, Homo sapiens
MPQAFLLGSIHEPAGALMEPQPCPGSLAESFLEEELRLNAELSQLQFSEPVGIIYNPVEYAWEPHRNYVTRYCQGPKEVLFLGMNPGPFGMAQTGVPFGEVSMVRDWLGIVGPVLTPPQEHPKRPVLGLECPQSEVSGARFWGFFRNLCGQPEVFFHHCFVHNLCPLLFLAP

SEQ ID NO: 8432 - protein, 96 aa, Homo sapiens
MPQAFLLGSIHEPAGALMEPQPCPGSLAESFLEEELRLNAELSQLQFSEPVGIIYNPVEYAWEPHRNYVTRYCQGPKEVLFLGMNPGPFGMAQTGV

SEQ ID NO: 8433 - protein, 90 aa, Homo sapiens
MPQAFLLGSIHEPAGALMEPQPCPGSLAESFLEEELRLNAELSQLQFSEPVGIIYNPVEYAWEPHRNYVTRYCQGPKEVLFLGMNPGPFG

SEQ ID NO: 8434 - protein, 177 aa, Homo sapiens; identical to SEQ ID NO: 8427

SEQ ID NO: 8435 - protein, 108 aa, Homo sapiens
MPQAFLLGSIHEPAGALMEPQPCPGSLAESFLEEELRLNAELSQLQFSEPVGIIYNPVEYAWEPHRNYVTRYCQGPKEVLFLGMNPGPFGMAQTGVPFGEVSMVRDWL

SEQ ID NO: 8436 - protein, 270 aa, Homo sapiens; identical to SEQ ID NO: 8428

SEQ ID NO: 8437 - protein, 177 aa, Homo sapiens; identical to SEQ ID NO: 8427

SEQ ID NO: 8438 - protein, 177 aa, Homo sapiens; identical to SEQ ID NO: 8427

SEQ ID NO: 8439 - protein, 389 aa, Homo sapiens
MAEPDPSHPLETQAGKVQEAQDSDSDSEGGAAGGEADMDFLRNLFSQTLSLGSQKERLLDELTLEGVARYMQSERCRRVICLVGAGISTSAGIPDFRSPSTGLYDNLEKYHLPYPEAIFEISYFKKHPEPFFALAKELYPGQFKPTICHYFMRLLKDKGLLLRCYTQNIDTLERIAGLEQEDLVEAHGTFYTSHCVSASCRHEYPLSWMKEKIFSEVTPKCEDCQSLVKPDIVFFGESLPARFFSCMQSDFLKVDLLLVMGTSLQVQPFASLISKAPLSTPRLLINKEKAGQSDPFLGMIMGLGGGMDFDSKKAYRDVAWLGECDQGCLALAELLGWKKELEDLVRREHASIDAQSGAGVPNPSTSASPKKSPPPAKDEARTTEREKPQ

SEQ ID NO: 8440 - protein, 271 aa, Homo sapiens
MAEPDPSHPLETQAGKVQEAQDSDSDSEGGAAGGEADMDFLRNLFSQTLSLGSQKERLLDELTLEGVARYMQSERCRRVICLVGAGISTSAGIPDFRSPSTGLYDNLEKYHLPYPEAIFEISYFKKHPEPFFALAKELYPGQFKPTICHYFMRLLKDKGLLLRCYTQNIDTLERIAGLEQEDLVEAHGTFYTSHCVSASCRHEYPLSWMKEKIFSEVTPKCEDCQSLVKPDIVFFGESLPARFFSCMQSDFLKVDLLLVMGTSLQGRGLAG

SEQ ID NO: 8441 - protein, 130 aa, Homo sapiens
MDFLRNLFSQTLSLGSQKERLLDELTLEGVARYMQSERCRRVICLVGAGISTSAGIPDFRSPSTGLYDNLEKYHLPYPEAIFEISYFKKHPEPFFALAKELYPGQFKPTICHYFMRLLKDKGLLLRCYTQ

SEQ ID NO: 8442 - protein, 352 aa, Homo sapiens
MDFLRNLFSQTLSLGSQKERLLDELTLEGVARYMQSERCRRVICLVGAGISTSAGIPDFRSPSTGLYDNLEKYHLPYPEAIFEISYFKKHPEPFFALAKELYPGQFKPTICHYFMRLLKDKGLLLRCYTQNIDTLERIAGLEQEDLVEAHGTFYTSHCVSASCRHEYPLSWMKEKIFSEVTPKCEDCQSLVKPDIVFFGESLPARFFSCMQSDFLKVDLLLVMGTSLQVQPFASLISKAPLSTPRLLINKEKAGQSDPFLGMIMGLGGGMDFDSKKAYRDVAWLGECDQGCLALAELLGWKKELEDLVRREHASIDAQSGAGVPNPSTSASPKKSPPPAKDEARTTEREKPQ

SEQ ID NO: 8443 - protein, 169 aa, Homo sapiens
MDFLRNLFSQTLSLGSQKERLLDELTLEGVARYMQSERCRRVICLVGAGISTSAGIPDFRSPSTGLYDNLEKYHLPYPEAIFEISYFKKHPEPFFALAKELYPGQFKPTICHYFMRLLKDKGLLLRCYTQNIDTLERIAGLEQEDLVEAHGTFYTSHCVSASCRHEYPL

SEQ ID NO: 8444 - protein, 237 aa, Homo sapiens
MDFLRNLFSQTLSLGSQKERLLDELTLEGVARYMQSERCRRVICLVGAGISTSAGIPDFRSPSTGLYDNLEKYHLPYPEAIFEISYFKKHPEPFFALAKELYPGQFKPTICHYFMRLLKDKGLLLRCYTQNIDTLERIAGLEQEDLVEAHGTFYTSHCVSASCRHEYPLSWMKEKIFSEVTPKCEDCQSLVKPDIVFFGESLPARFFSCMQSDFLKVDLLLVMGTSLQVQPFASLIS

SEQ ID NO: 8445 - protein, 78 aa, Homo sapiens
MDFLRNLFSQTLSLGSQKERLLDELTLEGVARYMQSERCRRVICLVGAGISTSAGIPDFRSPSTGLYDNLEKYHLPYP

SEQ ID NO: 8446 - protein, 73 aa, Homo sapiens
MDFLRNLFSQTLSLGSQKERLLDELTLEGVARYMQSERCRRVICLVGAGISTSAGIPDFRSPSTGLYDNLEKY

SEQ ID NO: 8447 - protein, 389 aa, Homo sapiens
MSDEAEDSDSDSEGGAAGGEADMDFLRNLFSQTLSLGSQKERLLDELTLEGVARYMQSERCRRVICLVGAGISTSAGIPDFRSPSTGLYDNLEKYHLPYPEAIFEISYFKKHPEPFFALAKELYPGQFKPTICHYFMRLLKDKGLLLRCYTQNIDTLERIAGLEQEDLVEAHGTFYTSHCVSASCRHEYPLSWMKEKIFSEVTPKCEDCQSLVKPDIVFFGESLPARFFSCMQSDFLKVDLLLVMGTSLQVQPFASLISKAPLSTPRLLINKEKAGQSDPFLGMIMGLGGGMDFDSKKAYRDVAWLGECDQGCLALAELLGWKKELEDLVRREHASIDAQGGGGPQPQHFSFPQEVPATCQGRGQDNREGETPVTAASPRRDAELLRDS

SEQ ID NO: 8448 - protein, 408 aa, Homo sapiens
MAENGDNEKMAALEAKICHQIEYYFGDFNLPRDKFLKEQIKLDEGWVPLEIMIKFNRLNRLTTDFNVIVEALSKSKAELMEISEDKTKIRRSPSKPLPEVTDEYKNDVKNRSVYIKGFPTDATLDDIKEWLEDKGQVLNIQMRRTLHKAFKGSIFVVFDSIESAKKFVETPGQKYKETDLLILFKDDYFAKKNEERKQNKVEAKLRAKQEQEAKQKLEEDAEMKSLEEKIGCLLKFSGDLDDQTCREDLHILFSNHGEIKWIDFVRGAKEGIILFKEKAKEALGKAKDANNGNLQLRNKEVTWEVLEGEVEKEALKKIIEDQQESLNKWKSKGRRFKGKGKGNKAAQPGSGKGKVQFQGKKTKFASDDEHDEHDENGATGPVKRAREETDKEEPASKQQKTENGAGDQ

SEQ ID NO: 8449 - protein, 361 aa, Homo sapiens
MAENGDNEKMAALEAKICHQIEYYFGDFNLPRDKFLKEQIKLDEGWVPLEIMIKFNRLNRLTTDFNVIVEALSKSKAELMEISEDKTKIRRSPSKPLPEVTDEYKNDVKNRSVYIKGFPTDATLDDIKEWLEDKGQVLNIQMRRTLHKAFKGSIFVVFDSIESAKKFVETPGQKYKETDLLILFKDDYFAKKNEERKQNKVEAKLRAKQEQEAKQKLEEDAEMKSLEEKIGCLLKFSGDLDDQTCREDLHILFSNHGEIKWIDFVRGAKEGIILFKEKAKEALGKAKDANNGNLQLRNKEVTWEVLEGEVEKEALKKIIEDQQESLNKWKSKGPVKRAREETDKEEPASKQQKTENGAGDQ

SEQ ID NO: 8450 - protein, 408 aa, Homo sapiens; identical to SEQ ID NO: 8448

SEQ ID NO: 8451 - protein, 134 aa, Homo sapiens
MAENGDNEKMAALEAKICHQIEYYFGDFNLPRDKFLKEQIKLDEGWVPLEIMIKFNRLNRLTTDFNVIVEALSKSKAELMEISEDKTKIRRSPSKPLPEVTDEYKNDVKNRSVYISHPVAHVGVQWCDHGPLQS

SEQ ID NO: 8452 - protein, 120 aa, Homo sapiens
MIKFNRLNRLTTDFNVIVEALSKSKAELMEISEDKTKIRRSPSKPLPEVTDEYKNDVKNRSVYIKGFPTDATLDDIKEWLEDKGQVLNIQMRRTLHKAFKGSIFVVFDSIESAKKFVETP

SEQ ID NO: 8453 - protein, 184 aa, Homo sapiens
MAENGDNEKMAALEAKICHQIEYYFGDFNLPRDKFLKEQIKLDEGWVPLEIMIKFNRLNRLTTDFNVIVEALSKSKAELMEISEDKTKIRRSPSKPLPEVTDEYKNDVKNRSVYIKGFPTDATLDDIKEWLEDKGQVLNIQMRRTLHKAFKGSIFVVFDSIESAKKFVETPGQKYKETDLLILF

SEQ ID NO: 8454 - protein, 83 aa, Homo sapiens
MRRTLHKAFKGSIFVVFDSIESAKKFVETPGQKYKETDLLILFKDDYFAKKNEERKQNKVEAKLRAKQEQEAKQKLEEDAEMK

SEQ ID NO: 8455 - protein, 1834 aa, Homo sapiens
MKLSVNEAQLGFYLGSLSHLSACPGIDPRSSEDQPESLKTGQMMDESDEDFKELCASFFQRVKKHGIKEVSGERKTQKAASNGTQIRSKLKRTKQTATKTKTLQGPAEKKPPSGSQAPRTKKQRVTKWQASEPAHSVNGEGGVLASAPDPPVLRETAQNTQTGNQQEPSPNLSREKTRENVPNSDSQPPPSCLTTAVPSPSKPRTAQLVLQRMQQFKRADPERLRHASEECSLEAAREENVPKDPQEEMMAGNVYGLGPPAPESDAAVALTLQQEFARVGASAHDDSLEEKGLFFCQICQKNLSAMNVTRREQHVNRCLDEAEKTLRPSVPQIPECPICGKPFLTLKSRTSHLKQCAVKMEVGPQLLLQAVRLQTAQPEGSSSPPMFSFSDHSRGLKRRGPTSKKEPRKRRKVDEAPSEDLLVAMALSRSEMEPGAAVPALRLESAFSERIRPEAENKSRKKKPPVSPPLLLVQDSETTGRQIEDRVALLLSEEVELSSTPPLPASRILKEGWERAGQCPPPPERKQSFLWEGSALTGAWAMEDFYTARLVPPLVPQRPAQGLMQEPVPPLVPPEHSELSERRSPALHGTPTAGCGSRGPSPSASQREHQALQDLVDLAREGLSASPWPGSGGLAGSEGTAGLDVVPGGLPLTGFVVPSQDKHPDRGGRTLLSLGLLVADFGAMVNNPHLSDVQFQTDSGEVLYAHKFVLYARCPLLIQYVNNEGFSAVEDGVLTQRVLLGDVSTEAARTFLHYLYTADTGLPPGLSSELSSLAHRFGVSELVHLCEQVPIATDSEGKPWEEKEAENCESRAENFQELLRSMWADEEEEAETLLKSKDHEEDQENVNEAEMEEIYEFAATQRKLLQEERAAGAGEDADWLEGGSPVSGQLLAGVQVQKQWDKVEEMEPLEPGRDEAATTWEKMGQCALPPPQGQHSGARGAEAPEQEAPEEALGHSSCSSPSRDCQAERKEGSLPHSDDAGDYEQLFSSTQGEISEPSQITSEPEEQSGAVRERGLEVSHRLAPWQASPPHPCRFLLGPPQGGSPRGSHHTSGSSLSTPRSRGGTSQVGSPTLLSPAVPSKQKRDRSILTLSKEPGHQKGKERRSVLECRNKGVLMFPEKSPSIDLTQSNPDHSSSRSQKSSSKLNEEDEVILLLDSDEELELEQTKMKSISSDPLEEKKALEISPRSCELFSIIDVDADQEPSQSPPRSEAVLQQEDEGALPENRGSLGRRGAPWLFCDRESSPSEASTTDTSWLVPATPLASRSRDCSSQTQISSLRSGLAVQAVTQHTPRASVGNREGNEVAQKFSVIRPQTPPPQTPSSCLTPVSPGTSDGRRQGHRSPSRPHPGGHPHSSPLAPHPISGDRAHFSRRFLKHSPPGPSFLNQTPAGEVVEVGDSDDEQEVASHQANRSPPLDSDPPIPIDDCCWHMEPLSPIPIDHWNLERTGPLSTSSPSRRMNEAADSRDCRSPGLLDTTPIRGSCTTQRKLQEKSSGAGSLGNSRPSFLNSALWDVWDGEEQRPPETPPPAQMPSAGGAQKPEGLETPKGANRKKNLPPKVPITPMPQYSIMETPVLKKELDRFGVRPLPKRQMVLKLKEIFQYTHQTLDSDSEDESQSSQPLLQAPHCQTLASQTYKPSRAGVHAQQEATTGPGAHRPKGPAKTKGPRHQRKHHESITPPSRSPTKEAPPGLNDDAQIPASQESVATSVDGSDSSLSSQSSSSCEFGAAFESAGEEEGEGEVSASQAAVQAADTDEALRCYIRSKPALYQKVLLYQPFELRELQAELRQNGLRVSSRRLLDFLDTHCITFTTAATRREKLQGRRRQPRGKKKVERN

SEQ ID NO: 8456 - protein, 467 aa, Homo sapiens
MSSILPFTPPVVKRLLGWKKSAGGSGGAGGGEQNGQEEKWCEKAVKSLVKKLKKTGRLDELEKAITTQNCNTKCVTIPSTCSEIWGLSTPNTIDQWDTTGLYSFSEQTRSLDGRLQVSHRKGLPHVIYCRLWRWPDLHSHHELKAIENCEYAFNLKKDEVCVNPYHYQRVETPVLPPVLVPRHTEILTELPPLDDYTHSIPENTNFPAGIEPQSNYIPETPPPGYISEDGETSDQQLNQSMDTGSPAELSPTTLSPVNHSLDLQPVTYSEPAFWCSIAYYELNQRVGETFHASQPSLTVDGFTDPSNSERFCLGLLSNVNRNATVEMTRRHIGRGVRLYYIGGEVFAECLSDSAIFVQSPNCNQRYGWHPATVCKIPPGCNLKIFNNQEFAALLAQSVNQGFEAVYQLTRMCTIRMSFVKGWGAEYRRQTVTSTPCWIELHLNGPLQWLDKVLTQMGSPSVRCSSMS

SEQ ID NO: 8457 - protein, 437 aa, Homo sapiens
MSSILPFTPPVVKRLLGWKKSAGGSGGAGGGEQNGQEEKWCEKAVKSLVKKLKKTGRLDELEKAITTQNCNTKCVTIPRSLDGRLQVSHRKGLPHVIYCRLWRWPDLHSHHELKAIENCEYAFNLKKDEVCVNPYHYQRVETPVLPPVLVPRHTEILTELPPLDDYTHSIPENTNFPAGIEPQSNYIPETPPPGYISEDGETSDQQLNQSMDTGSPAELSPTTLSPVNHSLDLQPVTYSEPAFWCSIAYYELNQRVGETFHASQPSLTVDGFTDPSNSERFCLGLLSNVNRNATVEMTRRHIGRGVRLYYIGGEVFAECLSDSAIFVQSPNCNQRYGWHPATVCKIPPGCNLKIFNNQEFAALLAQSVNQGFEAVYQLTRMCTIRMSFVKGWGAEYRRQTVTSTPCWIELHLNGPLQWLDKVLTQMGSPSVRCSSMS

SEQ ID NO: 8458 - protein, 467 aa, Homo sapiens; identical to SEQ ID NO: 8456

SEQ ID NO: 8459 - protein, 425 aa, Homo sapiens
MSSILPFTPPIVKRLLGWKKGEQNGQEEKWCEKAVKSLVKKLKKTGQLDELEKAITTQNVNTKCITIPRSLDGRLQVSHRKGLPHVIYCRLWRWPDLHSHHELRAMELCEFAFNMKKDEVCVNPYHYQRVETPVLPPVLVPRHTEIPAEFPPLDDYSHSIPENTNFPAGIEPQSNIPETPPPGYLSEDGETSDHQMNHSMDAGSPNLSPNPMSPAHNNLDLQPVTYCEPAFWCSISYYELNQRVGETFHASQPSMTVDGFTDPSNSERFCLGLLSNVNRNAAVELTRRHIGRGVRLYYIGGEVFAECLSDSAIFVQSPNCNQRYGWHPATVCKIPPGCNLKIFNNQEFAALLAQSVNQGFEAVYQLTRMCTIRMSFVKGWGAEYRRQTVTSTPCWIELHLNGPLQWLDKVLTQMGSPSIRCSSVS

SEQ ID NO: 8460 - protein, 381 aa, Homo sapiens
MSCLHPRQTWKGAALVHRKAWWMGRSLDGRLQVSHRKGLPHVIYCRLWRWPDLHSHHELRAMELCEFAFNMKKDEVCVNPYHYQRVETPVLPPVLVPRHTEIPAEFPPLDDYSHSIPENTNFPAGIEPQSNIPETPPPGYLSEDGETSDHQMNHSMDAGSPNLSPNPMSPAHNNLDLQPVTYCEPAFWCSISYYELNQRVGETFHASQPSMTVDGFTDPSNSERFCLGLLSNVNRNAAVELTRRHIGRGVRLYYIGGEVFAECLSDSAIFVQSPNCNQRYGWHPATVCKIPPGCNLKIFNNQEFAALLAQSVNQGFEAVYQLTRMCTIRMSFVKGWGAEYRRQTVTSTPCWIELHLNGPLQWLDKVLTQMGSPSIRCSSVS

SEQ ID NO: 8461 - protein, 425 aa, Homo sapiens; identical to SEQ ID NO: 8459

SEQ ID NO: 8462 - protein, 230 aa, Homo sapiens
MNHSMDAGSPNLSPNPMSPAHNNLDLQPVTYCEPAFWCSISYYELNQRVGETFHASQPSMTVDGFTDPSNSERFCLGLLSNVNRNAAVELTRRHIGRGVRLYYIGGEVFAECLSDSAIFVQSPNCNQRYGWHPATVCKIPPGCNLKIFNNQEFAALLAQSVNQGFEAVYQLTRMCTIRMSFVKGWGAEYRRQTVTSTPCWIELHLNGPLQWLDKVLTQMGSPSIRCSSVS

SEQ ID NO: 8463 - protein, 320 aa, Homo sapiens
MELCEFAFNMKKDEVCVNPYHYQRVETPVLPPVLVPRHTEIPAEFPPLDDYSHSIPENTNFPAGIEPQSNIPETPPPGYLSEDGETSDHQMNHSMDAGSPNLSPNPMSPAHNNLDLQPVTYCEPAFWCSISYYELNQRVGETFHASQPSMTVDGFTDPSNSERFCLGLLSNVNRNAAVELTRRHIGRGVRLYYIGGEVFAECLSDSAIFVQSPNCNQRYGWHPATVCKIPPGCNLKIFNNQEFAALLAQSVNQGFEAVYQLTRMCTIRMSFVKGWGAEYRRQTVTSTPCWIELHLNGPLQWLDKVLTQMGSPSIRCSSVS

SEQ ID NO: 8464 - protein, 426 aa, Homo sapiens
MFRTKRSALVRRLWRSRAPGGEDEEEGAGGGGGGGELRGEGATDSRAHGAGGGGPGRAGCCLGKAVRGAKGHHHPHPPAAGAGAAGGAEADLKALTHSVLKKLKERQLELLLQAVESRGGTRTACLLLPGRLDCRLGPGAPAGAQPAQPPSSYSLPLLLCKVFRWPDLRHSSEVKRLCCCESYGKINPELVCCNPHHLSRLCELESPPPPYSRYPMDFLKPTADCPDAVPSSAETGGTNYLAPGGLSDSQLLLEPGDRSHWCVVAYWEEKTRVGRLYCVQEPSLDIFYDLPQGNGFCLGQLNSDNKSQLVQKVRSKIGCGIQLTREVDGVWVYNRSSYPIFIKSATLDNPDSRTLLVHKVFPGFSIKAFDYEKAYSLQRPNDHEFMQQPWTGFTVQISFVKGWGQCYTRQFISSCPCWLEVIFNSR

SEQ ID NO: 8465 - protein, 211 aa, Homo sapiens
MDFLKPTADCPDAVPSSAETGGTNYLAPGGLSDSQLLLEPGDRSHWCVVAYWEEKTRVGRLYCVQEPSLDIFYDLPQGNGFCLGQLNSDNKSQLVQKVRSKIGCGIQLTREVDGVWVYNRSSYPIFIKSATLDNPDSRTLLVHKVFPGFSIKAFDYEKAYSLQRPNDHEFMQQPWTGFTVQISFVKGWGQCYTRQFISSCPCWLEVIFNSR

SEQ ID NO: 8466 - protein, 211 aa, Homo sapiens; identical to SEQ ID NO: 8465

SEQ ID NO: 8467 - protein, 89 aa, Homo sapiens
MNSQQQKQPCTPPPQPQQQQVKQPCQPPPQEPCIPKTKEPCHPKVPEPCHPKVPEPCQPKVPEPCQPKVPEPCPSTVTPAPAQQKTKQK

SEQ ID NO: 8468 - protein, 89 aa, Homo sapiens; identical to SEQ ID NO: 8467

SEQ ID NO: 8469 - protein, 1419 aa, Homo sapiens
MAEGLERVRISASELRGILATLAPQAGSRENMKELKEARPRKDNRRPDLEIYKPGLSRLRNKPKIKEPPGSEEFKDEIVNDRDCSAVENGTQPVKDVCKELNNQEQNGPIDPENNRGQESFPRTAGQEDRSLKIIKRTKKPDLQIYQPGRRLQTVSKESASRVEEEEVLNQVEQLRVEEDECRGNVAKEEVANKPDRAEIEKSPGGGRVGAAKGEKGKRMGKGEGVRETHDDPARGRPGSAKRYSRSDKRRNRYRTRSTSSAGSNNSAEGAGLTDNGCRRRRQDRTKERPRLKKQVSVSSTDSLDEDRIDEPDGLGPRRSSERKRHLERNWSGRGEGEQKNSAKEYRGTLRVTFDAEAMNKESPMVRSARDDMDRGKPDKGLSSGGKGSEKQESKNPKQELRGRGRGILILPAHTTLSVNSAGSPESAPLGPRLLFGSGSKGSRSWGRGGTTRRLWDPNNPDQKPALKTQTPQLHFLDTDDEVSPTSWGDSRQAQASYYKFQNSDNPYYYPRTPGPASQYPYTGYNPLQYPVGPTNGVYPGPYYPGYPTPSGQYVCSPLPTSTMSPEEVEQHMRNLQQQELHRLLRVADNQELQLSNLLSRDRISPEGLEKMAQLRAELLQLYERCILLDIEFSDNQNVDQILWKNAFYQVIEKFRQLVKDPNVENPEQIRNRLLELLDEGSDFFDSLLQKLQVTYKFKLEDYMDGLAIRSKPLRKTVKYALISAQRCMICQGDIARYREQASDTANYGKARSWYLKAQHIAPKNGRPYNQLALLAVYTRRKLDAVYYYMRSLAASNPILTAKESLMSLFEETKRKAEQMEKKQHEEFDLSPDQWRKGKKSTFRHVGDDTTRLEIWIHPSHPRSSQGTESGKDSEQENGLGSLSPSDLNKRFILSFLHAHGKLFTRIGMETFPAVAEKVLKEFQVLLQHSPSPIGSTRMLQLMTINMFAVHNSQLKDCFSEECRSVIQEQAAALGLAMFSLLVRRCTCLLKESAKAQLSSPEDQDDQDDIKVSSFVPDLKELLPSVKVWSDWMLGYPDTWNPPPTSLDLPSHVAVDVWSTLADFCNILTAVNQSEVPLYKDPDDDLTLLILEEDRLLSGFVPLLAAPQDPCYVEKTSDKVIAADCKRVTVLKYFLEALCGQEEPLLAFKGGKYVSVAPVPDTMGKEMGSQEGTRLEDEEEDVVIEDFEEDSEAEGSGGEDDIRELRAKKLALARKIAEQQRRQEKIQAVLEDHSQMRQMELEIRPLFLVPDTNGFIDHLASLARLLESRKYILVVPLIVINELDGLAKGQETDHRAGGYARVVQEKARKSIEFLEQRFESRDSCLRALTSRGNELESIAFRSEDITGQLGNNDDLILSCCLHYCKDKAKDFMPASKEEPIRLLREVVLLTDDRNLRVKALTRNVPVRDIPAFLTWAQVG

SEQ ID NO: 8470 - protein, 330 aa, Homo sapiens
MRFRLCHQRGCCPHERENTCTCKMIISSLQVIAADCKRVTVLKYFLEALCGQEEPLLAFKGGKYVSVAPVPDTMGKEMGSQEGTRLEDEEEDVVIEDFEEDSEAEGSGGEDDIRELRAKKLALARKIAEQQRRQEKIQAVLEDHSQMRQMELEIRPLFLVPDTNGFIDHLASLARLLESRKYILVVPLIVINELDGLAKGQETDHRAGGYARVVQEKARKSIEFLEQRFESRDSCLRALTSRGNELESIAFRSEDITGQLGNNDDLILSCCLHYCKDKAKDFMPASKEEPIRLLREVVLLTDDRNLRVKALTRNVPVRDIPAFLTWAQVG

SEQ ID NO: 8471 - protein, 511 aa, Homo sapiens
METFPAVAEKVLKEFQVLLQHSPSPIGSTRMLQLMTINMFAVHNSQLKDCFSEECRSVIQEQAAALGLAMFSLLVRRCTCLLKESAKAQLSSPEDQDDQDDIKVSSFVPDLKELLPSVKVWSDWMLGYPDTWNPPPTSLDLPSHVAVDVWSTLADFCNILTAVNQSEVPLYKDPDDDLTLLILEEDRLLSGFVPLLAAPQDPCYVEKTSDKVIAADCKRVTVLKYFLEALCGQEEPLLAFKGGKYVSVAPVPDTMGKEMGSQEGTRLEDEEEDVVIEDFEEDSEAEGSGGEDDIRELRAKKLALARKIAEQQRRQEKIQAVLEDHSQMRQMELEIRPLFLVPDTNGFIDHLASLARLLESRKYILVVPLIVINELDGLAKGQETDHRAGGYARVVQEKARKSIEFLEQRFESRDSCLRALTSRGNELESIAFRSEDITGQLGNNDDLILSCCLHYCKDKAKDFMPASKEEPIRLLREVVLLTDDRNLRVKALTRNVPVRDIPAFLTWAQVG

SEQ ID NO: 8472 - protein, 1388 aa, Homo sapiens
MKELKEARPRKDNRRPDLEIYKPGLSRLRNKPKIKEPPGSEEFKDEIVNDRDCSAVENGTQPVKDVCKELNNQEQNGPIDPENNRGQESFPRTAGQEDRSLKIIKRTKKPDLQIYQPGRRLQTVSKESASRVEEEEVLNQVEQLRVEEDECRGNVAKEEVANKPDRAEIEKSPGGGRVGAAKGEKGKRMGKGEGVRETHDDPARGRPGSAKRYSRSDKRRNRYRTRSTSSAGSNNSAEGAGLTDNGCRRRRQDRTKERPRLKKQVSVSSTDSLDEDRIDEPDGLGPRRSSERKRHLERNWSGRGEGEQKNSAKEYRGTLRVTFDAEAMNKESPMVRSARDDMDRGKPDKGLSSGGKGSEKQESKNPKQELRGRGRGILILPAHTTLSVNSAGSPESAPLGPRLLFGSGSKGSRSWGRGGTTRRLWDPNNPDQKPALKTQTPQLHFLDTDDEVSPTSWGDSRQAQASYYKFQNSDNPYYYPRTPGPASQYPYTGYNPLQYPVGPTNGVYPGPYYPGYPTPSGQYVCSPLPTSTMSPEEVEQHMRNLQQQELHRLLRVADNQELQLSNLLSRDRISPEGLEKMAQLRAELLQLYERCILLDIEFSDNQNVDQILWKNAFYQVIEKFRQLVKDPNVENPEQIRNRLLELLDEGSDFFDSLLQKLQVTYKFKLEDYMDGLAIRSKPLRKTVKYALISAQRCMICQGDIARYREQASDTANYGKARSWYLKAQHIAPKNGRPYNQLALLAVYTRRKLDAVYYYMRSLAASNPILTAKESLMSLFEETKRKAEQMEKKQHEEFDLSPDQWRKGKKSTFRHVGDDTTRLEIWIHPSHPRSSQGTESGKDSEQENGLGSLSPSDLNKRFILSFLHAHGKLFTRIGMETFPAVAEKVLKEFQVLLQHSPSPIGSTRMLQLMTINMFAVHNSQLKDCFSEECRSVIQEQAAALGLAMFSLLVRRCTCLLKESAKAQLSSPEDQDDQDDIKVSSFVPDLKELLPSVKVWSDWMLGYPDTWNPPPTSLDLPSHVAVDVWSTLADFCNILTAVNQSEVPLYKDPDDDLTLLILEEDRLLSGFVPLLAAPQDPCYVEKTSDKVIAADCKRVTVLKYFLEALCGQEEPLLAFKGGKYVSVAPVPDTMGKEMGSQEGTRLEDEEEDVVIEDFEEDSEAEGSGGEDDIRELRAKKLALARKIAEQQRRQEKIQAVLEDHSQMRQMELEIRPLFLVPDTNGFIDHLASLARLLESRKYILVVPLIVINELDGLAKGQETDHRAGGYARVVQEKARKSIEFLEQRFESRDSCLRALTSRGNELESIAFRSEDITGQLGNNDDLILSCCLHYCKDKAKDFMPASKEEPIRLLREVVLLTDDRNLRVKALTRNVPVRDIPAFLTWAQVG

SEQ ID NO: 8473 - protein, 787 aa, Homo sapiens
MAAARPARGPELPLLGLLLLLLLGDPGRGAASSGNATGPGPRSAGGSARRSAAVTGPPPPLSHCGRAAPCEPLRYNVCLGSVLPYGATSTLLAGDSDSQEEAHGKLVLWSGLRNAPRCWAVIQPLLCAVYMPKCENDRVELPSRTLCQATRGPCAIVERERGWPDFLRCTPDRFPEGCTNEVQNIKFNSSGQCEVPLVRTDNPKSWYEDVEGCGIQCQNPLFTEAEHQDMHSYIAAFGAVTGLCTLFTLATFVADWRNSNRYPAVILFYVNACFFVGSIGWLAQFMDGARREIVCRADGTMRLGEPTSNETLSCVIIFVIVYYALMAGVVWFVVLTYAWHTSFKALGTTYQPLSGKTSYFHLLTWSLPFVLTVAILAVAQVDGDSVSGICFVGYKNYRYRAGFVLAPIGLVLIVGGYFLIRGVMTLFSIKSNHPGLLSEKAASKINETMLRLGIFGFLAFGFVLITFSCHFYDFFNQAEWERSFRDYVLCQANVTIGLPTKQPIPDCEIKNRPSLLVEKINLFAMFGTGIAMSTWVWTKATLLIWRRTWCRLTGQSDDEPKRIKKSKMIAKAFSKRHELLQNPGQELSFSMHTVSHDGPVAGLAFDLNEPSADVSSAWAQHVTKMVARRGAILPQDISVTPVATPVPPEEQANLWLVEAEISPELQKRLGRKKKRRKRKKEVCPLAPPPELHPPAPAPSTIPRLPQLPRQKCLVAAGAWGAGDSCRQGAWTLVSNPFCPEPSPPQDPFLPSAPAPVAWAHGRRQGLGPIHSRTNLMDTELMDADSDF

SEQ ID NO: 8474 - protein, 76 aa, Homo sapiens
MSDQDSSEIHFKVKMTTHLKKLKESYCQRQGVPMNSLRFLFEGQRIADNHTPKELGMEEEDVIEVYQEQTGGHSTV

SEQ ID NO: 8475 - protein, 101 aa, Homo sapiens
MSDQEAKPSTEDLGDKKEGEYIKLKVIGQDSSEIHFKVKMTTHLKKLKESYCQRQGVPMNSLRFLFEGQRIADNHTPKELGMEEEDVIEVYQEQTGGHSTV

SEQ ID NO: 8476 - protein, 101 aa, Homo sapiens; identical to SEQ ID NO: 8475

SEQ ID NO: 8477 - protein, 62 aa, Homo sapiens
MTTHLKKLKESYCQRQGVPMNSLRFLFEGQRIADNHTPKELGMEEEDVIEVYQEQTGGHSTV

SEQ ID NO: 8478 - protein, 62 aa, Homo sapiens; identical to SEQ ID NO: 8477

SEQ ID NO: 8479 - protein, 264 aa, Homo sapiens
MPRSFLVRKPSDPNRKPNYSELQDSNPEFTFQQPYDQAHLLAAIPPPEILNPTASLPMLIWDSVLAPQAQPIAWASLRLQESPRVAELTSLSDEDSGKGSQPPSPPSPAPSSFSSTSVSSLEAEAYAAFPGLGQVPKQLAQLSEAKDLQARKAFNCKYCNKEYLSLGALKMHIRSHTLPCVCGTCGKAFSRPWLLQGHVRTHTGEKPFSCPHCSRAFADRSNLRAHLQTHSDVKKYQCQACARTFSRMSLLHKHQESGCSGCPR

SEQ ID NO: 8480 - protein, 268 aa, Homo sapiens
MPRSFLVKKHFNASKKPNYSELDTHTVIISPYLYESYSMPVIPQPEILSSGAYSPITVWTTAAPFHAQLPNGLSPLSGYSSSLGRVSPPPPSDTSSKDHSGSESPISDEEERLQSKLSDPHAIEAEKFQCNLCNKTYSTFSGLAKHKQLHCDAQSRKSFSCKYCDKEYVSLGALKMHIRTHTLPCVCKICGKAFSRPWLLQGHIRTHTGEKPFSCPHCNRAFADRSNLRAHLQTHSDVKKYQCKNCSKTFSRMSLLHKHEESGCCVAH

SEQ ID NO: 8481 - protein, 268 aa, Homo sapiens; identical to SEQ ID NO: 8480

SEQ ID NO: 8482 - protein, 292 aa, Homo sapiens
MPRSFLVKTHSSHRVPNYRRLETQREINGACSACGGLVVPLLPRDKEAPSVPGDLPQPWDRSSAVACISLPLLPRIEEALGASGLDALEVSEVDPRASRAAIVPLKDSLNHLNLPPLLVLPTRWSPTLGPDRHGAPEKLLGAERMPRAPGGFECFHCHKPYHTLAGLARHRQLHCHLQVGRVFTCKYCDKEYTSLGALKMHIRTHTLPCTCKICGKAFSRPWLLQGHVRTHTGEKPYACSHCSRAFADRSNLRAHLQTHSDAKKYRCRRCTKTFSRMSLLARHEESGCCPGP

SEQ ID NO: 8483 - protein, 465 aa, Homo sapiens
MGGAVVDEGPTGVKAPDGGWGWAVLFGCFVITGFSYAFPKAVSVFFKELIQEFGIGYSDTAWISSILLAMLYGTGPLCSVCVNRFGCRPVMLVGGLFASLGMVAASFCRSIIQVYLTTGVITGLGLALNFQPSLIMLNRYFSKRRPMANGLAAAGSPVFLCALSPLGQLLQDRYGWRGGFLILGGLLLNCCVCAALMRPLVVTAQPGSGPPRPSRRLLDLSVFRDRGFVLYAVAASVMVLGLFVPPVFVVSYAKDLGVPDTKAAFLLTILGFIDIFARPAAGFVAGLGKVRPYSVYLFSFSMFFNGLADLAGSTAGDYGGLVVFCIFFGISYGMVGALQFEVLMAIVGTHKFSSAIGLVLLMEAVAVLVGPPSGGKLLDATHVYMYVFILAGAEVLTSSLILLLGNFFCIRKKPKEPQPEVAAAEEEKLHKPPADSGVDLREVEHFLKAEPEKNGEVVHTPETSV

SEQ ID NO: 8484 - protein, 465 aa, Homo sapiens; identical to SEQ ID NO: 8483

SEQ ID NO: 8485 - protein, 465 aa, Homo sapiens; identical to SEQ ID NO: 8483

SEQ ID NO: 8486 - protein, 465 aa, Homo sapiens; identical to SEQ ID NO: 8483

SEQ ID NO: 8487 - protein, 489 aa, Homo sapiens
MVPSSPAVEKQVPVEPGPDPELRSWRHLVCYLCFYGFMAQIRPGESFITPYLLGPDKNFTREQVTNEITPVLSYSYLAVLVPVFLLTDYLRYTPVLLLQGLSFVSVWLLLLLGHSVAHMQLMELFYSVTMAARIAYSSYIFSLVRPARYQRVAGYSRAAVLLGVFTSSVLGQLLVTVGRVSFSTLNYISLAFLTFSVVLALFLKRPKRSLFFNRDDRGRCETSASELERMNPGPGGKLGHALRVACGDSVLARMLRELGDSLRRPQLRLWSLWWVFNSAGYYLVVYYVHILWNEVDPTTNSARVYNGAADAASTLLGAITSFAAGFVKIRWARWSKLLIAGVTATQAGLVFLLAHTRHPSSIWLCYAAFVLFRGSYQFLVPIATFQIASSLSKELCALVFGVNTFFATIVKTIITFIVSDVRGLGLPVRKQNEELHVASLSLWKSHLRLAADTLSSEGSSGSGPRSWFLSPTLRAALHGPVCPSEVCPS

SEQ ID NO: 8488 - protein, 591 aa, Homo sapiens
MVPSSPAVEKQVPVEPGPDPELRSWRHLVCYLCFYGFMAQIRPGESFITPYLLGPDKNFTREQVTNEITPVLSYSYLAVLVPVFLLTDYLRYTPVLLLQGLSFVSVWLLLLLGHSVAHMQLMELFYSVTMAARIAYSSYIFSLVRPARYQRVAGYSRAAVLLGVFTSSVLGQLLVTVGRVSFSTLNYISLAFLTFSVVLALFLKRPKRSLFFNRDDRGRCETSASELERMNPGPGGKLGHALRVACGDSVLARMLRELGDSLRRPQLRLWSLWWVFNSAGYYLVVYYVHILWNEVDPTTNSARVYNGAADAASTLLGAITSFAAGFVKIRWARWSKLLIAGVTATQAGLVFLLAHTRHPSSIWLCYAAFVLFRGSYQFLVPIATFQIASSLSKELCALVFGVNTFFATIVKTIITFIVSDVRGLGLPVRKQFQLYSVYFLILSIIYFLGAMLDGLRHCQRGHHPRQPPAQGLRSAAEEKAAQALSVQDKGLGGLQPAQSPPLSPEDSLGAVGPASLEQRQSDPYLAQAPAPQAAEFLSPVTTPSPCTLCSAQASGPEAADETCPQLAVHPPGVSKLGLQCLPSDGVQNVNQ

SEQ ID NO: 8489 - protein, 281 aa, Homo sapiens
MLRELGDSLRRPQLRLWSLWWVFNSAGYYLVVYYVHILWNEVDPTTNSARVYNGAADAASTLLGAITSFAAGFVKIRWARWSKLLIAGVTATQAGLVFLLAHTRHPSSIWLCYAAFVLFRGSYQFLVPIATFQIASSLSKELCALVFGVNTFFATIVKTIITFIVSDVRGLGLPVRKQALRMSRPRLGLCLPGPFPPQSAAPARAGMAASSAEDPGSERGPWRRAGTVAARGDPGGERGPWRREGTLAARGDPGGERGPWWREGTLAAKPRMQWVTRATAP

SEQ ID NO: 8490 - protein, 269 aa, Homo sapiens
  VARIANT 1: note = MOD_RES - Any amino acid
XLRLWSLWWVFNSAGYYLVVYYVHILWNEVDPTTNSARVYNGAADAASTLLGAITSFAAGFVKIRWARWSKLLIAGVTATQAGLVFLLAHTRHPSSIWLCYAAFVLFRGSYQFLVPIATFQIASSLSKELCALVFGVNTFFATIVKTIITFIVSDVRGLGLPVRKQALRMSRPRLGLCLPGPFPPQSAAPARAGMAASSAEDPGSERGPWRRAGTVAARGDPGGERGPWRREGTLAARGDPGGERGPWWREGTLAAKPRMQWVTRATAP

SEQ ID NO: 8491 - protein, 182 aa, Homo sapiens
MVPSSPAVEKQVPVEPGPDPELRSWRHLVCYLCFYGFMAQIRPGESFITPYLLGPDKNFTREQVTNEITPVLSYSYLAVLVPVFLLTDYLRYTPVLLLQGLSFVSVWLLLLLGHSVAHMQLMELFYSVTMAARIAYSSYIFSLVRPARYQRVAGYSRAAVLLGVFTSSVLGQLLVTVGRVSF

SEQ ID NO: 8492 - protein, 154 aa, Homo sapiens
MVPSSPAVEKQVPVEPGPDPELRSWRHLVCYLCFYGFMAQIRPGESFITPYLLGPDKNFTREQVTNEITPVLSYSYLAVLVPVFLLTDYLRYTPVLLLQGLSFVSVWLLLLLGHSVAHMQLMELFYSVTMAARIAYSSYIFSLVRPARYQRVAG

SEQ ID NO: 8493 - protein, 551 aa, Homo sapiens
MRPQPAEPAPGGRGNEACSIHSEVTNEITPVLSYSYLAVLVPVFLLTDYLRYTPVLLLQGLSFVSVWLLLLLGHSVAHMQLMELFYSVTMAARIAYSSYIFSLVRPARYQRVAGYSRAAVLLGVFTSSVLGQLLVTVGRVSFSTLNYISLAFLTFSVVLALFLKRPKRSLFFNRDDRGRCETSASELERMNPGPGGKLGHALRVACGDSVLARMLRELGDSLRRPQLRLWSLWWVFNSAGYYLVVYYVHILWNEVDPTTNSARVYNGAADAASTLLGAITSFAAGFVKIRWARWSKLLIAGVTATQAGLVFLLAHTRHPSSIWLCYAAFVLFRGSYQFLVPIATFQIASSLSKELCALVFGVNTFFATIVKTIITFIVSDVRGLGLPVRKQFQLYSVYFLILSIIYFLGAMLDGLRHCQRGHHPRQPPAQGLRSAAEEKAAQALSVQDKGLGGLQPAQSPPLSPEDSLGAVGPASLEQRQSDPYLAQAPAPQAAEFLSPVTTPSPCTLCSAQASGPEAADETCPQLAVHPPGVSKLGLQCLPSDGVQNVNQ

SEQ ID NO: 8494 - protein, 61 aa, Homo sapiens
MVPSSPAVEKQVPVEPGPDPELRSWRHLVCYLCFYGFMAQIRPGESFITPYLLGPDKNFTR

SEQ ID NO: 8495 - protein, 234 aa, Homo sapiens
MEPSSKKLTGRLMLAVGGAVLGSLQFGYNTGVINAPQKVIEEFYNQTWVHRYGESILPTTLTTLWSLSVAIFSVGGMIGSFSVGLFVNRFGRRNSMLMMNLLAFVSAVLMGFSKLGKSFEMLILGRFIIGVYCGLTTGFVPMYVGEVSPTALRGALGTLHQLGIVVGILIAQVSWGRIYLPGTAPAHSFSGSRICAQQGRVSLPPSPHSLAEDNYGTQVQRTQHHGLPVDSKMT

SEQ ID NO: 8496 - protein, 458 aa, Homo sapiens
MEPSSKKLTGRLMLAVGGAVLGSLQFGYNTGVINAPQKVIEEFYNQTWVHRYGESILPTTLTTLWSLSVAIFSVGGMIGSFSVGLFVNRFGRRNSMLMMNLLAFVSAVLMGFSKLGKSFEMLILGRFIIGVYCGLTTGFVPMYVGEVSPTALRGALGTLHQLGIVVGILIAQVFGLDSIMGNKDLWPLLLSIIFIPALLQCIVLPFCPESPRFLLINRNEENRAKSVLKKLRGTADVTHDLQEMKEESRQMMREKKVTILELFRSPAYRQPILIAVVLQLSQQLSGINAVFYYSTSIFEKAGVQQPVYATIGSGIVNTAFTVVSLFVVERAGRRTLHLIGLAGMAGCAILMTIALALLEQLPWMSYLSIVAIFGFVAFFEVGPGPIPWFIVAELFSQGPRPAAIAVAGFSNWTSNFIVGMCFQYVEQLCGPYVFIIFTVLLVLFFIFTLNGSMPEGGD

SEQ ID NO: 8497 - protein, 434 aa, Homo sapiens
MEPSSKKLTGRLMLAVGGAVLGSLQFGYNTGVINAPQKVIEEFYNQTWVHRYGESILPTTLTTLWSLSVAIFSVGGMIGSFSVGLFVNRFGRRNSMLMMNLLAFVPMYVGEVSPTALRGALGTLHQLGIVVGIIIFIPALLQCIVLPFCPESPRFLLINRNEENRAKSVLKKLRGTADVTHDLQEMKEESRQMMREKKVTILELFRSPAYRQPILIAVVLQLSQQLSGINAVFYYSTSIFEKAGVQQPVYATIGSGIVNTAFTVVSLFVVERAGRRTLHLIGLAGMAGCAILMTIALALLEQLPWMSYLSIVAIFGFVAFFEVGPGPIPWFIVAELFSQGPRPAAIAVAGFSNWTSNFIVGMCFQYVEQLCGPYVFIIFTVLLVLFFIFTYFKVPETKGRTFDEIASGFRQGGASQSDKTPEELFHPLGADSQV

SEQ ID NO: 8498 - protein, 175 aa, Homo sapiens
MEPSSKKLTGRLMLAVGGAVLGSLQFGYNTGVINAPQKVIEEFYNQTWVHRYGESILPTTLTTLWSLSVAIFSVGGMIGSFSVGLFVNRFGRRNSMLMMNLLAFVSAVLMGFSKLGNPKLETTDTPLPKKFPFRPQARKVTAVQCPFCLSICPLHSLLILGPTSTATEAGKGHNV

SEQ ID NO: 8499 - protein, 492 aa, Homo sapiens
MEPSSKKLTGRLMLAVGGAVLGSLQFGYNTGVINAPQKVIEEFYNQTWVHRYGESILPTTLTTLWSLSVAIFSVGGMIGSFSVGLFVNRFGRRNSMLMMNLLAFVSAVLMGFSKLGKSFEMLILGRFIIGVYCGLTTGFVPMYVGEVSPTALRGALGTLHQLGIVVGILIAQVFGLDSIMGNKDLWPLLLSIIFIPALLQCIVLPFCPESPRFLLINRNEENRAKSVLKKLRGTADVTHDLQEMKEESRQMMREKKVTILELFRSPAYRQPILIAVVLQLSQQLSGINAVFYYSTSIFEKAGVQQPVYATIGSGIVNTAFTVVSLFVVERAGRRTLHLIGLAGMAGCAILMTIALALLEQLPWMSYLSIVAIFGFVAFFEVGPGPIPWFIVAELFSQGPRPAAIAVAGFSNWTSNFIVGMCFQYVEQLCGPYVFIIFTVLLVLFFIFTYFKVPETKGRTFDEIASGFRQGGASQSDKTPEELFHPLGADSQV

SEQ ID NO: 8500 - protein, 250 aa, Homo sapiens
MLMMNLLAFVSAVLMGFSKLGKSFEMLILGRFIIGVYCGLTTGFVPMYVGEVSPTALRGALGTLHQLGIVVGILIAQVFGLDSIMGNKDLWPLLLSIIFIPALLQCIVLPFCPESPRFLLINRNEENRAKSVLKKLRGTADVTHDLQEMKEESRQMMREKKVTILELFRSPAYRQPILIAVVLQLSQQLSGINAVFYYSTSIFEKAGVQQPVYATIGSGIVNTAFTVVSVSLCLLAPPAKPQGGGSAIFP

SEQ ID NO: 8501 - protein, 556 aa, Homo sapiens
MPSFDEALQRVGEFGRFQRRVFLLLCLTGVTFAFLFVGVVFLGTQPDHYWCRGPSAAALAERCGWSPEEEWNRTAPASRGPEPPERRGRCQRYLLEAANDSASATSALSCADPLAAFPNRSAPLVPCRGGWRYAQAHSTIVSEFDLVCVNAWMLDLTQAILNLGFLTGAFTLGYAADRYGRIVIYLLSCLGVGVTGVVVAFAPNFPVFVIFRFLQGVFGKGTWMTCYVIVTEIVGSKQRRIVGIVIQMFFTLGIIILPGIAYFIPNWQGIQLAITLPSFLFLLYYWVVPESPRWLITRKKGDKALQILRRIAKCNGKYLSSNYSEITVTDEEVSNPSFLDLVRTPQMRKCTLILMFAWFTSAVVYQGLVMRLGIIGGNLYIDFFISGVVELPGALLILLTIERLGRRLPFAASNIVAGVACLVTAFLPEGIAWLRTTVATLGRLGITMAFEIVYLVNSELYPTTLRNFGVSLCSGLCDFGGIIAPFLLFRLAAVWLELPLIIFGILASICGGLVMLLPETKGIALPETVDDVEKLGSPHSCKCGRNKKTPVSRSHL

SEQ ID NO: 8502 - protein, 557 aa, Homo sapiens [sequence omitted]

SEQ ID NO: 8503 - protein, 338 aa, Homo sapiens
MELRSGSVGSQAVARRMDGDSRDGGGGKDATGSEDYENLPTSASVSTHMTAGAMAGILEHSVMYPVDSVKTRMQSLSPDPKAQYTSIYGALKKIMRTEGFWRPLRGVNVMIMGAGPAHAMYFACYENMKRTLNDVFHHQGNSHLANGIAGSMATLLHDAVMNPAEVVKQRLQMYNSQHRSAISCIRTVWRTEGLGAFYRSYTTQLTMNIPFQSIHFITYEFLQEQVNPHRTYNPQSHIISGGLAGALAAAATTPLDVCKTLLNTQENVALSLANISGRLSGMANAFRTVYQLNGLAGYFKGIQARVIYQMPSTAISWSVYEFFKYFLTKRQLENRAPY

SEQ ID NO: 8504 - protein, 755 aa, Homo sapiens
MARKLSVILILTFALSVTNPLHELKAAAFPQTTEKISPNWESGINVDLAISTRQYHLQQLFYRYGENNSLSVEGFRKLLQNIGIDKIKRIHIHHDHDHHSDHEHHSDHERHSDHEHHSEHEHHSDHDHHSHHNHAASGKNKRKALCPDHDSDSSGKDPRNSQGKGAHRPEHASGRRNVKDSVSASEVTSTVYNTVSEGTHFLETIETPRPGKLFPKDVSSSTPPSVTSKSRVSRLAGRKTNESVSEPRKGFMYSRNTNENPQECFNASKLLTSHGMGIQVPLNATEFNYLCPAIINQIDARSCLIHTSEKKAEIPPKTYSLQIAWVGGFIAISIISFLSLLGVILVPLMNRVFFKFLLSFLVALAVGTLSGDAFLHLLPHSHASHHHSHSHEEPAMEMKRGPLFSHLSSQNIEESAYFDSTWKGLTALGGLYFMFLVEHVLTLIKQFKDKKKKNQKKPENDDDVEIKKQLSKYESQLSTNEEKVDTDDRTEGYLRADSQEPSHFDSQQPAVLEEEEVMIAHAHPQEVYNEYVPRGCKNKCHSHFHDTLGQSDDLIHHHHDYHHILHHHHHQNHHPHSHSQRYSREELKDAGVATLAWMVIMGDGLHNFSDGLAIGAAFTEGLSSGLSTSVAVFCHELPHELGDFAVLLKAGMTVKQAVLYNALSAMLAYLGMATGIFIGHYAENVSMWIFALTAGLFMYVALVDMVPEMLHNDASDHGCSRWGYFFLQNAGMLLGFGIMLLISIFEHKIVFRINF

SEQ ID NO: 8505 - protein, 433 aa, Homo sapiens
MGIQVPLNATEFNYLCPAIINQIDARSCLIHTSEKKAEIPPKTYSLQIAWVGGFIAISIISFLSLLGVILVPLMNRVFFKFLLSFLVALAVGTLSGDAFLHLLPHSHASHHHSHSHEEPAMEMKRGPLFSHLSSQNIEESAYFDSTWKGLTALGGLYFMFLVEHVLTLIKQFKDKKKKNQKKPENDDDVEIKKQLSKYESQLSTNEEKVDTDDRTEGYLRADSQEPSHFDSQQPAVLEEEEVMIAHAHPQEVYNEYVPRGCKNKCHSHFHDTLGQSDDLIHHHHDYHHILHHHHHQNHHPHSHSQRYSREELKDAGVATLAWMVIMGDGLHNFSDGLAIGAAFTEGLSSGLSTSVAVFCHELPHELGDFAVLLKAGMTVKQAVLYNALSAMLAYLGMATGIFIGHYAENVSMWIFALTAGLFMYVALVDMVSF

SEQ ID NO: 8506 - protein, 410 aa, Homo sapiens
MGIQVPLNATEFNYLCPAIINQIDARSCLIHTSEKKAEIPPKTYSLQIAWVGGFIAISIISFLSLLGVILVPLMNRVFFKFLLSFLVALAVGTLSGDAFLHLLPHSHASHHHSHSHEEPAMEMKRGPLFSHLSSQNIEESAYFDSTWKGLTALGGLYFMFLVEHVLTLIKQFKDKKKKNQKKPENDDDVEIKKQLSKYESQLSTNEEKVDTDDRTEGYLRADSQEPSHFDSQQPAVLEEEEVMIAHAHPQEVYNEYVPRGCKNKCHSHFHDTLGQSDDLIHHHHDYHHILHHHHHQNHHPHSHSQRYSREELKDAGVATLAWMVIMGDGLHNFSDGLAIGAAFTEGLSSGLSTSVALVDMVPEMLHNDASDHGCSRWGYFFLQNAGMLLGFGIMLLISIFEHKIVFRINF

SEQ ID NO: 8507 - protein, 610 aa, Homo sapiens
MDTPRGIGTFVVWDYVVFAGMLVISAAIGIYYAFAGGGQQTSKDFLMGGRRMTAVPVALSLTASFMSAVTVLGTPSEVYRFGAIFSIFAFTYFFVVVISAEVFLPVFYKLGITSTYEYLELRFNKCVRLCGTVLFIVQTILYTGIVIYAPALALNQVTGFDLWGAVVATGVVCTFYCTLGGLKAVIWTDVFQVGIMVAGFASVIIQAVVMQGGISTILNDAYDGGRLNFWNFNPNPLQRHTFWTIIIGGTFTWTSIYGVNQSQVQRYISCKSRFQAKLSLYINLVGLWAILTCSVFCGLALYSRYHDCDPWTAKKVSAPDQLMPYLVLDILQDYPGLPGLFVACAYSGTLSTVSSSINALAAVTVEDLIKPYFRSLSERSLSWISQGMSVVYGALCIGMAALASLMGALLQAALSVFGMVGGPLMGLFALGILVPFANSIGALVGLMAGFAISLWVGIGAQIYPPLPERTLPLHLDIQGCNSTYNETNLMTTTEMPFTTSVFQIYNVQRTPLMDNWYSLSYLYFSTVGTLVTLLVGILVSLSTGGRKQNLDPRYILTKEDFLSNFDIFKKKKHVLSYKSHPVEDGGTDNPAFNHIELNSDQSGKSNGTRL

SEQ ID NO: 8508 - protein, 356 aa, Homo sapiens
MDMADEPLNGSHTWLSIPFDLNGSVVSTNTSNQTEPYYDLTSNAVLTFIYFVVCIIGLCGNTLVIYVILRYAKMKTITNIYILNLAIADELFMLGLPFLAMQVALVHWPFGKAICRVVMTVDGINQFTSIFCLTVMSIDRYLAVVHPIKSAKWRRPRTAKMITMAVWGVSLLVILPIMIYAGLRSNQWGRSSCTINWPGESGAWYTGFIIYTFILGFLVPLTIICLCYLFIIIKVKSSGIRVGSSKRKKSEKKVTRMVSIVVAVFIFCWLPFYIFNVSSVSMAISPTPALKGMFDFVVVLTYANSCANPILYAFLSDNFKKSFQNVLCLVKVDNSKSGEEGSCLDMIFRNNKNRKK

SEQ ID NO: 8509 - protein, 369 aa, Homo sapiens
MDMADEPLNGSHTWLSIPFDLNGSVVSTNTSNQTEPYYDLTSNAVLTFIYFVVCIIGLCGNTLVIYVILRYAKMKTITNIYILNLAIADELFMLGLPFLAMQVALVHWPFGKAICRVVMTVDGINQFTSIFCLTVMSIDRYLAVVHPIKSAKWRRPRTAKMITMAVWGVSLLVILPIMIYAGLRSNQWGRSSCTINWPGESGAWYTGFIIYTFILGFLVPLTIICLCYLFIIIKVKSSGIRVGSSKRKKSEKKVTRMVSIVVAVFIFCWLPFYIFNVSSVSMAISPTPALKGMFDFVVVLTYANSCANPILYAFLSDNFKKSFQNVLCLVKVSGTDDGERSDSKQDKSRLNETTETQRTLLNGDLQTSI

SEQ ID NO: 8510 - protein, 1104 aa, Homo sapiens
MQAQQLPYEFFSEENAPKWRGLLVPALKKVQGQVHPTLESNDDALQYVEELILQLLNMLCQAQPRSASDVEERVQKSFPHPIDKWAIADAQSAIEKRKRRNPLSLPVEKIHPLLKEVLGYKIDHQVSVYIVAVLEYISADILKLVGNYVRNIRHYEITKQDIKVAMCADKVLMDMFHQDVEDINILSLTDEEPSTSGEQTYYDLVKAFMAEIRQYIRELNLIIKVFREPFVSNSKLFSANDVENIFSRIVDIHELSVKLLGHIEDTVEMTDEGSPHPLVGSCFEDLAEELAFDPYESYARDILRPGFHDRFLSQLSKPGAALYLQSIGEGFKEAVQYVLPRLLLAPVYHCLHYFELLKQLEEKSEDQEDKECLKQAITALLNVQSGMEKICSKSLAKRRLSESACRFYSQQMKGKQLAIKKMNEIQKNIDGWEGKDIGQCCNEFIMEGTLTRVGAKHERHIFLFDGLMICCKSNHGQPRLPGASNAEYRLKEKFFMRKVQINDKDDTNEYKHAFEIILKDENSVIFSAKSAEEKNNWMAALISLQYRSTLERMLDVTMLQEEKEEQMRLPSADVYRFAEPDSEENIIFEENMQPKAGIPIIKAGTVIKLIERLTYHMYADPNFVRTFLTTYRSFCKPQELLSLIIERFEIPEPEPTEADRIAIENGDQPLSAELKRFRKEYIQPVQLRVLNVCRHWVEHHFYDFERDAYLLQRMEEFIGTVRGKAMKKWVESITKIIQRKKIARDNGPGHNITFQSSPPTVEWHISRPGHIETFDLLTLHPIEIARQLTLLESDLYRAVQPSELVGSVWTKEDKEINSPNLLKMIRHTTNLTLWFEKCIVETENLEERVAVVSRIIEILQVFQELNNFNGVLEVVSAMNSSPVYRLDHTFEQIPSRQKKILEEAHELSEDHYKKYLAKLRSINPPCVPFFGIYLTNILKTEEGNPEVLKRHGKELINFSKRRKVAEITGEIQQYQNQPYCLRVESDIKRFFENLNPMGNSMEKEFTDYLFNKSLEIEPRNPKPLPRFPKKYSYPLKSPGVRPSNPRPGTMRHPTPLQQEPRKISYSRIPESETESTASAPNSPNTVNTSACFWCFQYHRCLQCI

SEQ ID NO: 8511 - protein, 1318 aa, Homo sapiens
MQAQQLPYEFFSEENAPKWRGLLVPALKKVQGQVHPTLESNDDALQYVEELILQLLNMLCQAQPRSASDVEERVQKSFPHPIDKWAIADAQSAIEKRKRRNPLSLPVEKIHPLLKEVLGYKIDHQVSVYIVAVLEYISADILKLVGNYVRNIRHYEITKQDIKVAMCADKVLMDMFHQDVEDINILSLTDEEPSTSGEQTYYDLVKAFMAEIRQYIRELNLIIKVFREPFVSNSKLFSANDVENIFSRIVDIHELSVKLLGHIEDTVEMTDEGSPHPLVGSCFEDLAEELAFDPYESYARDILRPGFHDRFLSQLSKPGAALYLQSIGEGFKEAVQYVLPRLLLAPVYHCLHYFELLKQLEEKSEDQEDKECLKQAITALLNVQSGMEKICSKSLAKRRLSESACRFYSQQMKGKQLAIKKMNEIQKNIDGWEGKDIGQCCNEFIMEGTLTRVGAKHERHIFLFDGLMICCKSNHGQPRLPGASNAEYRLKEKFFMRKVQINDKDDTNEYKHAFEIILKDENSVIFSAKSAEEKNNWMAALISLQYRSTLERMLDVTMLQEEKEEQMRLPSADVYRFAEPDSEENIIFEENMQPKAGIPIIKAGTVIKLIERLTYHMYADPNFVRTFLTTYRSFCKPQELLSLIIERFEIPEPEPTEADRIAIENGDQPLSAELKRFRKEYIQPVQLRVLNVCRHWVEHHFYDFERDAYLLQRMEEFIGTVRGKAMKKWVESITKIIQRKKIARDNGPGHNITFQSSPPTVEWHISRPGHIETFDLLTLHPIEIARQLTLLESDLYRAVQPSELVGSVWTKEDKEINSPNLLKMIRHTTNLTLWFEKCIVETENLEERVAVVSRIIEILQVFQELNNFNGVLEVVSAMNSSPVYRLDHTFEQIPSRQKKILEEAHELSEDHYKKYLAKLRSINPPCVPFFGIYLTNILKTEEGNPEVLKRHGKELINFSKRRKVAEITGEIQQYQNQPYCLRVESDIKRFFENLNPMGNSMEKEFTDYLFNKSLEIEPRNPKPLPRFPKKYSYPLKSPGVRPSNPRPGTMRHPTPLQQEPRKISYSRIPESETESTASAPNSPRTPLTPPPASGASSTTDVCSVFDSDHSSPFHSRSASVSSISLTKGTDEVPVPPPVPPRRRPESAPAESSPSKIMSKHLDSPPAIPPRQPTSKAYSPRYSISDRTSISDPPESPPLLPPREPVRTPDVFSSSPLHLQPPPLGKKSDHGNAFFPNSPSPFTPPPPQTPSPHGTRRHLPSPPLTQEVDLHSIAGPPVPPRQSTSQHIPKLPPKTYKREHTHPSMHRDGPPLLENAHSS

SEQ ID NO: 8512 - protein, 1333 aa, Homo sapiens [sequence omitted]

SEQ ID NO: 8513 - protein, 1333 aa, Homo sapiens [sequence omitted]

SEQ ID NO: 8514 - protein, 314 aa, Homo sapiens
MLCQAQPRSASDVEERVQKSFPHPIDKWAIADAQSAIEKRKRRNPLSLPVEKIHPLLKEVLGYKIDHQVSVYIVAVLEYISADILKLVGNYVRNIRHYEITKQDIKVAMCADKVLMDMFHQDVEDINILSLTDEEPSTSGEQTYYDLVKAFMAEIRQYIRELNLIIKVFREPFVSNSKLFSANDVENIFSRIVDIHELSVKLLGHIEDTVEMTDEGSPHPLVGSCFEDLAEELAFDPYESYARDILRPGFHDRFLSQLSKPGAALYLQSIGEGFKEAVQYVLPRLLLAPVYHCLHYFELLKFPFGDLSRLRDSV

SEQ ID NO: 8515 - protein, 1050 aa, Homo sapiens
MTDEGSPHPLVGSCFEDLAEELAFDPYESYARDILRPGFHDRFLSQLSKPGAALYLQSIGEGFKEAVQYVLPRLLLAPVYHCLHYFELLKQLEEKSEDQEDKECLKQAITALLNVQSGMEKICSKSLAKRRLSESACRFYSQQMKGKQLAIKKMNEIQKNIDGWEGKDIGQCCNEFIMEGTLTRVGAKHERHIFLFDGLMICCKSNHGQPRLPGASNAEYRLKEKFFMRKVQINDKDDTNEYKHAFEIILKDENSVIFSAKSAEEKNNWMAALISLQYRSTLERMLDVTMLQEEKEEQMRLPSADVYRFAEPDSEENIIFEENMQPKAGIPIIKAGTVIKLIERLTYHMYADPNFVRTFLTTYRSFCKPQELLSLIIERFEIPEPEPTEADRIAIENGDQPLSAELKRFRKEYIQPVQLRVLNVCRHWVEHHFYDFERDAYLLQRMEEFIGTVRGKAMKKWVESITKIIQRKKIARDNGPGHNITFQSSPPTVEWHISRPGHIETFDLLTLHPIEIARQLTLLESDLYRAVQPSELVGSVWTKEDKEINSPNLLKMIRHTTNLTLWFEKCIVETENLEERVAVVSRIIEILQVFQELNNFNGVLEVVSAMNSSPVYRLDHTFEQIPSRQKKILEEAHELSEDHYKKYLAKLRSINPPCVPFFGIYLTNILKTEEGNPEVLKRHGKELINFSKRRKVAEITGEIQQYQNQPYCLRVESDIKRFFENLNPMGNSMEKEFTDYLFNKSLEIEPRNPKPLPRFPKKYSYPLKSPGVRPSNPRPGTMRHPTPLQQEPRKISYSRIPESETESTASAPNSPRTPLTPPPASGASSTTDVCSVFDSDHSSPFHSRSASVSSISLTKGTDEVPVPPPVPPRRRPESAPAESSPSKIMSKHLDSPPAIPPRQPTSKAYSPRYSISDRTSISDPPESPPLLPPREPVRTPDVFSSSPLHLQPPPLGKKSDHGNAFFPNSPSPFTPPPPQTPSPHGTRRHLPSPPLTQEVDLHSIAGPPVPPRQSTSQHIPKLPPKTYKREHTHPSMHRDGPPLLENAHSS

SEQ ID NO: 8516 - protein, 785 aa, Homo sapiens
MSDQDHSMDEMTAVVKIEKGVGGNNGGNGNGGGAFSQARSSSTGSSSSTGGGGQESQPSPLALLAATCSRIESPNENSNNSQGPSQSGGTGELDLTATQLSQGANGWQIISSSSGATPTSKEQSGSSTNGSNGSESSKNRTVSGGQYVVAAAPNLQNQQVLTGLPGVMPNIQYQVIPQFQTVDGQQLQFAATGAQVQQDGSGQIQIIPGANQQIITNRGSGGNIIAAMPNLLQQAVPLQGLANNVLSGQTQYVTNVPVALNGNITLLPVNSVSAATLTPSSQAVTISSSGSQESGSQPVTSGTTISSASLVSSQASSSSFFTNANSYSTTTTTSNMGIMNFTTSGSSGTNSQGQTPQRVSGLQGSDALNIQQNQTSGGSLQAGQQKEGEQNQQTQQQQILIQPQLVQGGQALQALQAAPLSGQTFTTQAISQETLQNLQLQAVPNSGPIIIRTPTVGPNGQVSWQTLQLQNLQVQNPQAQTITLAPMQGVSLGQTSSSNTTLTPIASAASIPAGTVTVNAAQLSSMPGLQTINLSALGTSGIQVHPIQGLPLAIANAPGDHGAQLGLHGAGGDGIHDDTAGGEEGENSPDAQPQAGRRTRREACTCPYCKDSEGRGSGDPGKKKQHICHIQGCGKVYGKTSHLRAHLRWHTGERPFMCTWSYCGKRFTRSDELQRHKRTHTGEKKFACPECPKRFMRSDHLSKHIKTHQNKKGGPGVALSVGTLPLDSGAGSEGSGTATPSALITTNMVAMEAICPEGIARLANSGINVMQVADLQSINISGNGF

SEQ ID NO: 8517 - protein, 778 aa, Homo sapiens
MDEMTAVVKIEKGVGGNNGGNGNGGGAFSQARSSSTGSSSSTGGGGQESQPSPLALLAATCSRIESPNENSNNSQGPSQSGGTGELDLTATQLSQGANGWQIISSSSGATPTSKEQSGSSTNGSNGSESSKNRTVSGGQYVVAAAPNLQNQQVLTGLPGVMPNIQYQVIPQFQTVDGQQLQFAATGAQVQQDGSGQIQIIPGANQQIITNRGSGGNIIAAMPNLLQQAVPLQGLANNVLSGQTQYVTNVPVALNGNITLLPVNSVSAATLTPSSQAVTISSSGSQESGSQPVTSGTTISSASLVSSQASSSSFFTNANSYSTTTTTSNMGIMNFTTSGSSGTNSQGQTPQRVSGLQGSDALNIQQNQTSGGSLQAGQQKEGEQNQQTQQQQILIQPQLVQGGQALQALQAAPLSGQTFTTQAISQETLQNLQLQAVPNSGPIIIRTPTVGPNGQVSWQTLQLQNLQVQNPQAQTITLAPMQGVSLGQTSSSNTTLTPIASAASIPAGTVTVNAAQLSSMPGLQTINLSALGTSGIQVHPIQGLPLAIANAPGDHGAQLGLHGAGGDGIHDDTAGGEEGENSPDAQPQAGRRTRREACTCPYCKDSEGRGSGDPGKKKQHICHIQGCGKVYGKTSHLRAHLRWHTGERPFMCTWSYCGKRFTRSDELQRHKRTHTGEKKFACPECPKRFMRSDHLSKHIKTHQNKKGGPGVALSVGTLPLDSGAGSEGSGTATPSALITTNMVAMEAICPEGIARLANSGINVMQVADLQSINISGNGF

SEQ ID NO: 8518 - protein, 470 aa, Homo sapiens
MSAQVLGFLRSWTPLPLAAPRGPAAAGNDAGAPAATAPGGEGEPHSRPCDARLGSTDKELKAGAAATGSAPTAPGTPWQREPRVEVMDPAGGPRGVLPRPCRVLVLLNPRGGKGKALQLFRSHVQPLLAEAEISFTLMLTERRNHARELVRSEELGRWDALVVMSGDGLMHEVVNGLMERPDWETAIQKPLCSLPAGSGNALAASLNHYAGYEQVTNEDLLTNCTLLLCRRLLSPMNLLSLHTASGLRLFSVLSLAWGFIADVDLESEKYRRLGEMRFTLGTFLRLAALRTYRGRLAYLPVGRVGSKTPASPVVVQQGPVDAHLVPLEEPVPSHWTVVPDEDFVLVLALLHSHLGSEMFAAPMGRCAAGVMHLFYVRAGVSRAMLLRLFLAMEKGRHMEYECPYLVYVPVVAFRLEPKDGKGVFAVDGELMVSEAVQGQVHPNYFWMVSGCVEPPPSWKPQQMPPPEEPL

SEQ ID NO: 8519 - protein, 384 aa, Homo sapiens
MDPAGGPRGVLPRPCRVLVLLNPRGGKGKALQLFRSHVQPLLAEAEISFTLMLTERRNHARELVRSEELGRWDALVVMSGDGLMHEVVNGLMERPDWETAIQKPLCSLPAGSGNALAASLNHYAGYEQVTNEDLLTNCTLLLCRRLLSPMNLLSLHTASGLRLFSVLSLAWGFIADVDLESEKYRRLGEMRFTLGTFLRLAALRTYRGRLAYLPVGRVGSKTPASPVVVQQGPVDAHLVPLEEPVPSHWTVVPDEDFVLVLALLHSHLGSEMFAAPMGRCAAGVMHLFYVRAGVSRAMLLRLFLAMEKGRHMEYECPYLVYVPVVAFRLEPKDGKGVFAVDGELMVSEAVQGQVHPNYFWMVSGCVEPPPSWKPQQMPPPEEPL

SEQ ID NO: 8520 - protein, 383 aa, Homo sapiens
EPTGGPRGVLPRPCRVLVLLNPRGGKGKALQLFRSHVQPLLAEAEISFTLMLTERRNHARELVRSEELGRWDALVVMSGDGLMHEVVNGLMERPDWETAIQKPLCSLPAGSGNALAASLNHYAGYEQVTNEDLLTNCTLLLCRRLLSPMNLLSLHTASGLRLFSVLSLAWGFIADVDLESEKYRRLGEMRFTLGTFLRLAALRTYRGRLAYLPVGRVGSKTPASPVVVQQGPVDAHLVPLEEPVPSHWTVVPDEDFVLVLALLHSHLGSEMFAAPMGRCAAGVMHLFYVRAGVSRAMLLRLFLAMEKGRHMEYECPYLVYVPVVAFRLEPKDGKGVFAVDGELMVSEAVQGQVHPNYFWMVSGCVEPPPSWKPQQMPPPEEPL

SEQ ID NO: 8521 - protein, 384 aa, Homo sapiens; identical to SEQ ID NO: 8519

SEQ ID NO: 8522 - protein, 398 aa, Homo sapiens
MDPVVGCGRGLFGFVFSAGGPRGVLPRPCRVLVLLNPRGGKGKALQLFRSHVQPLLAEAEISFTLMLTERRNHARELVRSEELGRWDALVVMSGDGLMHEVVNGLMERPDWETAIQKPLCSLPAGSGNALAASLNHYAGYEQVTNEDLLTNCTLLLCRRLLSPMNLLSLHTASGLRLFSVLSLAWGFIADVDLESEKYRRLGEMRFTLGTFLRLAALRTYRGRLAYLPVGRVGSKTPASPVVVQQGPVDAHLVPLEEPVPSHWTVVPDEDFVLVLALLHSHLGSEMFAAPMGRCAAGVMHLFYVRAGVSRAMLLRLFLAMEKGRHMEYECPYLVYVPVVAFRLEPKDGKGVFAVDGELMVSEAVQGQVHPNYFWMVSGCVEPPPSWKPQQMPPPEEPL

SEQ ID NO: 8523 - protein, 384 aa, Homo sapiens; identical to SEQ ID NO: 8519

SEQ ID NO: 8524 - protein, 654 aa, Homo sapiens
MNGHLEAEEQQDQRPDQELTGSWGHGPRSTLVRAKAMAPPPPPLAASTPLLHGEFGSYPARGPRFALTLTSQALHIQRLRPKPEARPRGGLVPLAEVSGCCTLRSRSPSDSAAYFCIYTYPRGRRGARRRATRTFRADGAATYEENRAEAQRWATALTCLLRGLPLPGDGEITPDLLPRPPRLLLLVNPFGGRGLAWQWCKNHVLPMISEAGLSFNLIQTERQNHARELVQGLSLSEWDGIVTVSGDGLLHEVLNGLLDRPDWEEAVKMPVGILPCGSGNALAGAVNQHGGFEPALGLDLLLNCSLLLCRGGGHPLDLLSVTLASGSRCFSFLSVAWGFVSDVDIQSERFRALGSARFTLGTVLGLATLHTYRGRLSYLPATVEPASPTPAHSLPRAKSELTLTPDPAPPMAHSPLHRSVSDLPLPLPQPALASPGSPEPLPILSLNGGGPELAGDWGGAGDAPLSPDPLLSSPPGSPKAALHSPVSEGAPVIPPSSGLPLPTPDARVGASTCGPPDHLLPPLGTPLPPDWVTLEGDFVLMLAISPSHLGADLVAAPHARFDDGLVHLCWVRSGISRAALLRLFLAMERGSHFSLGCPQLGYAAARAFRLEPLTPRGVLTVDGEQVEYGPLQAQMHPGIGTLLTGPPGCPGREP

SEQ ID NO: 8525 - protein, 616 aa, Homo sapiens
MAPPPPPLAASTPLLHGEFGSYPARGPRFALTLTSQALHIQRLRPKPEARPRGGLVPLAEVSGCCTLRSRSPSDSAAYFCIYTYPRGRRGARRRATRTFRADGAATYEENRAEAQRWATALTCLLRGLPLPGDGEITPDLLPRPPRLLLLVNPFGGRGLAWQWCKNHVLPMISEAGLSFNLIQTERQNHARELVQGLSLSEWDGIVTVSGDGLLHEVLNGLLDRPDWEEAVKMPVGILPCGSGNALAGAVNQHGGPSWGDRDPYISHSAKPTVSQVNQPACGMLTPSSWTFLPACFPAVSRAPRTLPGMGGTQALGSARFTLGTVLGLATLHTYRGRLSYLPATVEPASPTPAHSLPRAKSELTLTPDPAPPMAHSPLHRSVSDLPLPLPQPALASPGSPEPLPILSLNGGGPELAGDWGGAGDAPLSPDPLLSSPPGSPKAALHSPVSEGAPVIPPSSGLPLPTPDARVGASTCGPPDHLLPPLGTPLPPDWVTLEGDFVLMLAISPSHLGADLVAAPHARFDDGLVHLCWVRSGISRAALLRLFLAMERGSHFSLGCPQLGYAAARAFRLEPLTPRGVLTVDGEQVEYGPLQAQMHPGIGTLLTGPPGCPGREP

SEQ ID NO: 8526 - protein, 627 aa, Homo sapiens
MNGHLEAEEQQDQRPDQELTGSWGHGPRSTLVRAKAMAPPPPPLAASTPLLHGEFGSYPARGPRFALTLTSQALHIQRLRPKHSAAYFCIYTYPRGRRGARRRATRTFRADGAATYEENRAEAQRWATALTCLLRGLPLPGDGEITPDLLPRPPRLLLLVNPFGGRGLAWQWCKNHVLPMISEAGLSFNLIQTERQNHARELVQGLSLSEWDGIVTVSGDGLLHEVLNGLLDRPDWEEAVKMPVGILPCGSGNALAGAVNQHGGFEPALGLDLLLNCSLLLCRGGGHPLDLLSVTLASGSRCFSFLSVAWGFVSDVDIQSERFRALGSARFTLGTVLGLATLHTYRGRLSYLPATVEPASPTPAHSLPRAKSELTLTPDPAPPMAHSPLHRSVSDLPLPLPQPALASPGSPEPLPILSLNGGGPELAGDWGGAGDAPLSPDPLLSSPPGSPKAALHSPVSEGAPVIPPSSGLPLPTPDARVGASTCGPPDHLLPPLGTPLPPDWVTLEGDFVLMLAISPSHLGADLVAAPHARFDDGLVHLCWVRSGISRAALLRLFLAMERGSHFSLGCPQLGYAAARAFRLEPLTPRGVLTVDGEQVEYGPLQAQMHPGIGTLLTGPPGCPGREP

SEQ ID NO: 8527 - protein, 49 aa, Homo sapiens
MNGHLEAEEQQDQRSPLTCYLGRPGCFYWSIPLGVGAWPGSGVRTTCFP

SEQ ID NO: 8528 - protein, 761 aa, Homo sapiens
MIGCLHARVSGPLWDAGLCPASSRSAHTCLSLSVSDAPVSPATAPHCLLLSTAPAPPCPCHGVLNSHPFSPPFPQRPDQELTGSWGHGPRSTLVRAKAMAPPPPPLAASTPLLHGEFGSYPARGPRFALTLTSQALHIQRLRPKPEARPRGGLVPLAEVSGCCTLRSRSPSDSAAYFCIYTYPRGRRGARRRATRTFRADGAATYEENRAEAQRWATALTCLLRGLPLPGDGEITPDLLPRPPRLLLLVNPFGGRGLAWQWCKNHVLPMISEAGLSFNLIQTERQNHARELVQGLSLSEWDGIVTVSGDGLLHEVLNGLLDRPDWEEAVKMPVGILPCGSGNALAGAVNQHGGFEPALGLDLLLNCSLLLCRGGGHPLDLLSVTLASGSRCFSFLSVAWGFVSDVDIQSERFRALGSARFTLGTVLGLATLHTYRGRLSYLPATVEPASPTPAHSLPRAKSELTLTPDPAPPMAHSPLHRSVSDLPLPLPQPALASPGSPEPLPILSLNGGGPELAGDWGGAGDAPLSPDPLLSSPPGSPKAALHSPVSEGAPVIPPSSGLPLPTPDARVGASTCGPPDHLLPPLGTPLPPDWVTLEGDFVLMLAISPSHLGADLVAAPHARFDDGLVHLCWVRSGISRAALLRLFLAMERGSHFSLGCPQLGYAAARAFRLEPLTPRGVLTVDGEQVEYGPLQAQMHPGIARGRTQTPALPAAPALYGRQPGAAHGLQPVCQGAALFFHNSWLWGSQDLFRIVLTEAVGG

SEQ ID NO: 8529 - protein, 654 aa, Homo sapiens; identical to SEQ ID NO: 8524

SEQ ID NO: 8530 - protein, 618 aa, Homo sapiens
MAPPPPPLAASTPLLHGEFGSYPARGPRFALTLTSQALHIQRLRPKPEARPRGGLVPLAEVSGCCTLRSRSPSDSAAYFCIYTYPRGRRGARRRATRTFRADGAATYEENRAEAQRWATALTCLLRGLPLPGDGEITPDLLPRPPRLLLLVNPFGGRGLAWQWCKNHVLPMISEAGLSFNLIQTERQNHARELVQGLSLSEWDGIVTVSGDGLLHEVLNGLLDRPDWEEAVKMPVGILPCGSGNALAGAVNQHGGFEPALGLDLLLNCSLLLCRGGGHPLDLLSVTLASGSRCFSFLSVAWGFVSDVDIQSERFRALGSARFTLGTVLGLATLHTYRGRLSYLPATVEPASPTPAHSLPRAKSELTLTPDPAPPMAHSPLHRSVSDLPLPLPQPALASPGSPEPLPILSLNGGGPELAGDWGGAGDAPLSPDPLLSSPPGSPKAALHSPVSEGAPVIPPSSGLPLPTPDARVGASTCGPPDHLLPPLGTPLPPDWVTLEGDFVLMLAISPSHLGADLVAAPHARFDDGLVHLCWVRSGISRAALLRLFLAMERGSHFSLGCPQLGYAAARAFRLEPLTPRGVLTVDGEQVEYGPLQAQMHPGIGTLLTGPPGCPGREP

SEQ ID NO: 8531 - protein, 382 aa, Homo sapiens
MGPTSVPLVKAHRSSVSDYVNYDIIVRHYNYTGKLNISADKENSIKLTSVVFILICCFIILENIFVLLTIWKTKKFHRPMYYFIGNLALSDLLAGVAYTANLLLSGATTYKLTPAQWFLREGSMFVALSASVFSLLAIAIERYITMLKMKLHNGSNNFRLFLLISACWVISLILGGLPIMGWNCISALSSCSTVLPLYHKHYILFCTTVFTLLLLSIVILYCRIYSLVRTRSRRLTFRKNISKASRSSEKSLALLKTVIIVLSVFIACWAPLFILLLLDVGCKVKTCDILFRAEYFLVLAVLNSGTNPIIYTLTNKEMRRAFIRIMSCCKCPSGDSAGKFKRPIIAGMEFSRSKSDNSSHPQKDEGDNPETIMSSGNVNSSS

SEQ ID NO: 8532 - protein, 450 aa, Homo sapiens
MGPTSVPLVKAHRSSVSDYVNYDIIVRHYNYTGKLNISADKENSIKLTSVVFILICCFIILENIFVLLTIWKTKKFHRPMYYFIGNLALSDLLAGVAYTANLLLSGATTYKLTPAQWFLREGSMFVALSASVFSLLAIAIERYITMLKMKLHNGSNNFRLFLLISACWVISLILGGLPIMGWNCISALSSCSTVLPLYHKHYILFCTTVFTLLLLSIVILYCRIYSLVRTRSRRLTFRKNISKASRSSEKSLALLKTVIIVLSVFIACWAPLFILLLLDVGCKVKTCDILFRAEYFLVLAVLNSGTNPIIYTLTNKETLLANSSDPSSPAWNSAAANRTIPPTPRKTKGTTQRPLCLLETSTLLPRTGSCPPTGSALYLVAGHPSVWKKISGLRLLPGRSCCKPEGGRGRIRTAWWCRVLVGRVSSCEQCTGKGGDQVPAWNIFSTPLEL

SEQ ID NO: 8533 - protein, 271 aa, Homo sapiens
MLQACKMEGFPLVPPQPSEDLVPYDTDLYQRQTHEYYPYLSSDGESHSDHYWDFHPHHVHSEFESFAENNFTELQSVQPPQLQQLYRHMELEQMHVLDTPMVPPHPSLGHQVSYLPRMCLQYPSLSPAQPSSDEEEGERQSPPLEVSDGEADGLEPGPGLLPGETGSKKKIRLYQFLLDLLRSGDMKDSIWWVDKDKGTFQFSSKHKEALAHRWGIQKGNRKKMTYQKMARALRNYGKTGEVKKVKKKLTYQFSGEVLGRGGLAERRHPPH

SEQ ID NO: 8534 - protein, 270 aa, Homo sapiens
MLQACKMEGFPLVPPPSEDLVPYDTDLYQRQTHEYYPYLSSDGESHSDHYWDFHPHHVHSEFESFAENNFTELQSVQPPQLQQLYRHMELEQMHVLDTPMVPPHPSLGHQVSYLPRMCLQYPSLSPAQPSSDEEEGERQSPPLEVSDGEADGLEPGPGLLPGETGSKKKIRLYQFLLDLLRSGDMKDSIWWVDKDKGTFQFSSKHKEALAHRWGIQKGNRKKMTYQKMARALRNYGKTGEVKKVKKKLTYQFSGEVLGRGGLAERRHPPH

SEQ ID NO: 8535 - protein, 800 aa, Homo sapiens
MGSSKKHRGEKEAAGTTAAAGTGGATEQPPRHREHKKHKHRSGGSGGSGGERRKRSRERGGERGSGRRGAEAEARSSTHGRERSQAEPSERRVKREKRDDGYEAAASSKTSSGDASSLSIEETNKLRAKLGLKPLEVNAIKKEAGTKEEPVTADVINPMALRQREELREKLAAAKEKRLLNQKLGKIKTLGEDDPWLDDTAAWIERSRQLQKEKDLAEKRAKLLEEMDQEFGVSTLVEEEFGQRRQDLYSARDLQGLTVEHAIDSFREGETMILTLKDKGVLQEEEDVLVNVNLVDKERAEKNVELRKKKPDYLPYAEDESVDDLAQQKPRSILSKYDEELEGERPHSFRLEQGGTADGLRERELEEIRAKLRLQAQSLSTVGPRLASEYLTPEEMVTFKKTKRRVKKIRKKEKEVVVRADDLLPLGDQTQDGDFGSRLRGRGRRRVSEVEEEKEPVPQPLPSDDTRVENMDISDEEEGGAPPPGSPQVLEEDEAELELQKQLEKGRRLRQLQQLQQLRDSGEKVVEIVKKLESRQRGWEEDEDPERKGAIVFNATSEFCRTLGEIPTYGLAGNREEQEELMDFERDEERSANGGSESDGEENIGWSTVNLDEEKQQQDFSASSTTILDEEPIVNRGLAAALLLCQNKGLLETTVQKVARVKAPNKSLPSAVYCIEDKMAIDDKYSRREEYRGFTQDFKEKDGYKPDVKIEYVDETGRKLTPKEAFRQLSHRFHGKGSGKMKTERRMKKLDEEALLKKMSSSDTPLGTVALLQEKQKAQKTPYIVLSGSGKSMNANTITK

SEQ ID NO: 8536 - protein, 642 aa, Homo sapiens
MALRQREELREKLAAAKEKRLLNQKLGKIKTLGEDDPWLDDTAAWIERSRQLQKEKDLAEKRAKLLEEMDQEFGVSTLVEEEFGQRRQDLYSARDLQGLTVEHAIDSFREGETMILTLKDKGVLQEEEDVLVNVNLVDKERAEKNVELRKKKPDYLPYAEDESVDDLAQQKPRSILSKYDEELEGERPHSFRLEQGGTADGLRERELEEIRAKLRLQAQSLSTVGPRLASEYLTPEEMVTFKKTKRRVKKIRKKEKEVVVRADDLLPLGDQTQDGDFGSRLRGRGRRRVSEVEEEKEPVPQPLPSDDTRVENMDISDEEEGGAPPPGSPQVLEEDEAELELQKQLEKGRRLRQLQQLQQLRDSGEKVVEIVKKLESRQRGWEEDEDPERKGAIVFNATSEFCRTLGEIPTYGLAGNREEQEELMDFERDEERSANGGSESDGEENIGWSTVNLDEEKQQQDFSASSTTILDEEPIVNRGLAAALLLCQNKGLLETTVQKVARVKAPNKSLPSAVYCIEDKMAIDDKYSRREEYRGFTQDFKEKDGYKPDVKIEYVDETGRKLTPKEAFRQLSHRFHGKGSGKMKTERRMKKLDEEALLKKMSSSDTPLGTVALLQEKQKAQKTPYIVLSGSGKSMNANTITK

SEQ ID NO: 8537 - protein, 1463 aa, Homo sapiens
MKKKTVCTLNMGDKKYEDMEGEENGDNTISTGLLYSEADRCPICLNCLLEKEVGFPESCNHVFCMTCILKWAETLASCPIDRKPFQAVFKFSALEGYVKVQVKKQLRETKDKKNENSFEKQVSCHENSKSCIRRKAIVREDLLSAKVCDLKWIHRNSLYSETGGKKNAAIKINKPQRSNWSTNQCFRNFFSNMFSSVSHSGESSFTYRAYCTEFIEASEISALIRQKRHELELSWFPDTLPGIGRIGFIPWNVETEVLPLISSVLPRTIFPTSTISFEHFGTSCKGYALAHTQEGEEKKQTSGTSNTRGSRRKPAMTTPTRRSTRNTRAETASQSQRSPISDNSGCDAPGNSNPSLSVPSSAESEKQTRQAPKRKSVRRGRKPPLLKKKLRSSVAAPEKSSSNDSVDEETAESDTSPVLEKEHQPDVDSSNICTVQTHVENQSANCLKSCNEQIEESEKHTANYDTEERVGSSSSESCAQDLPVLVGEEGEVKKLENTGIEANVLCLESEISENILEKGGDPLEKQDQISGLSQSEVKTDVCTVHLPNDFPTCLTSESKVYQPVSCPLSDLSENVESVVNEEKITESSLVEITEHKDFTLKTEELIESPKLESSEGEIIQTVDRQSVKSPEVQLLGHVETEDVEIIATCDTFGNEDFNNIQDSENNLLKNNLLNTKLEKSLEEKNESLTEHPRSTELPKTHIEQIQKHFSEDNNEMIPMECDSFCSDQNESEVEPSVNADLKQMNENSVTHCSENNMPSSDLADEKVETVSQPSESPKDTIDKTKKPRTRRSRFHSPSTTWSPNKDTPQEKKRPQSPSPRRETGKESRKSQSPSPKNESARGRKKSRSQSPKKDIARERRQSQSRSPKRDTTRESRRSESLSPRRETSRENKRSQPRVKDSSPGEKSRSQSRERESDRDGQRRERERRTRKWSRSRSHSRSPSRCRTKSKSSSFGRIDRDSYSPRWKGRWANDGWRCPRGNDRYRKNDPEKQNENTRKEKNDIHLDADDPNSADKHRNDCPNWITEKINSGPDPRTRNPEKLKESHWEENRNENSGNSWNKNFGSGWVSNRGRGRGNRGRGTYRSSFAYKDQNENRWQNRKPLSGNSNSSGSESFKFVEQQSYKRKSEQEFSFDTPADRSGWTSASSWAVRKTLPADVQNYYSRRGRNSSGPQSGWMKQEEETSGQDSSLKDQTNQQVDGSQLPINMMQPQMNVMQQQMNAQHQPMNIFPYPVGVHAPLMNIQRNPFNIHPQLPLHLHTGVPLMQVATPTSVSQGLPPPPPPPPPSQQVNYIASQPDGKQLQGIPSSSHVSNNMSTPVLPAPTAAPGNTGMVQGPSSGNTSSSSHSKASNAAVKLAESKVSVAVEASADSSKTDKKLQIQEKAAQEVKLAIKPFYQNKDITKEEYKEIVRKAVDKVCHSKSGEVNSTKVANLVKAYVDKYKYSRKGSQKKTLEEPVSTEKNIG

SEQ ID NO: 8538 - protein, 1463 aa, Homo sapiens; identical to SEQ ID NO: 8537

SEQ ID NO: 8539 - protein, 1148 aa, Homo sapiens
MTTPTRRSTRNTRAETASQSQRSPISDNSGCDAPGNSNPSLSVPSSAESEKQTRQAPKRKSVRRGRKPPLLKKKLRSSVAAPEKSSSNDSVDEETAESDTSPVLEKEHQPDVDSSNICTVQTHVENQSANCLKSCNEQIEESEKHTANYDTEERVGSSSSESCAQDLPVLVGEEGEVKKLENTGIEANVLCLESEISENILEKGGDPLEKQDQISGLSQSEVKTDVCTVHLPNDFPTCLTSESKVYQPVSCPLSDLSENVESVVNEEKITESSLVEITEHKDFTLKTEELIESPKLESSEGEIIQTVDRQSVKSPEVQLLGHVETEDVEIIATCDTFGNEDFNNIQDSENNLLKNNLLNTKLEKSLEEKNESLTEHPRSTELPKTHIEQIQKHFSEDNNEMIPMECDSFCSDQNESEVEPSVNADLKQMNENSVTHCSENNMPSSDLADEKVETVSQPSESPKDTIDKTKKPRTRRSRFHSPSTTWSPNKDTPQEKKRPQSPSPRRETGKESRKSQSPSPKNESARGRKKSRSQSPKKDIARERRQSQSRSPKRDTTRESRRSESLSPRRETSRENKRSQPRVKDSSPGEKSRSQSRERESDRDGQRRERERRTRKWSRSRSHSRSPSRCRTKSKSSSFGRIDRDSYSPRWKGRWANDGWRCPRGNDRYRKNDPEKQNENTRKEKNDIHLDADDPNSADKHRNDCPNWITEKINSGPDPRTRNPEKLKESHWEENRNENSGNSWNKNFGSGWVSNRGRGRGNRGRGTYRSSFAYKDQNENRWQNRKPLSGNSNSSGSESFKFVEQQSYKRKSEQEFSFDTPADRSGWTSASSWAVRKTLPADVQNYYSRRGRNSSGPQSGWMKQEEETSGQDSSLKDQTNQQVDGSQLPINMMQPQMNVMQQQMNAQHQPMNIFPYPVGVHAPLMNIQRNPFNIHPQLPLHLHTGVPLMQVATPTSVSQGLPPPPPPPPPSQQVNYIASQPDGKQLQGIPSSSHVSNNMSTPVLPAPTAAPGNTGMVQGPSSGNTSSSSHSKASNAAVKLAESKVSVAVEASADSSKTDKKLQIQEKAAQEVKLAIKPFYQNKDITKEEYKEIVRKAVDKVCHSKSGEVNSTKVANLVKAYVDKYKYSRKGSQKKTLEEPVSTEKNIG

SEQ ID NO: 8540 - protein, 466 aa, Homo sapiens
MAEEQDLSEVELSPVGSEEPRCLSPGSAPSLGPDGGGGGSGLRASPGPGELGKVKKEQQDGEADDDKFPVCIREAVSQVLSGYDWTLVPMPVRVNGASKSKPHVKRPMNAFMVWAQAARRKLADQYPHLHNAELSKTLGKLWRLLNESDKRPFIEEAERLRMQHKKDHPDYKYQPRRRKNGKAAQGEAECPGGEAEQGGTAAIQAHYKSAHLDHRHPGEGSPMSDGNPEHPSGQSHGPPTPPTTPKTELQSGKADPKRDGRSMGEGGKPHIDFGNVDIGEISHEVMSNMETFDVAELDQYLPPNGHPGHVSSYSAAGYGLGSALAVASGHSAWISKPPGVALPTVSPPGVDAKAQVKTETAGPQGPPHYTDQPSTSQIAYTSLSLPHYGSAFPSISRPQFDYSDHQPSGPYYGHSGQASGLYSAFSYMGPSQRPLYTAISDPSPSGPQSHSPTHWEQPVYTTLSRP

SEQ ID NO: 8541 - protein, 466 aa, Homo sapiens; identical to SEQ ID NO: 8540

SEQ ID NO: 8542 - protein, 286 aa, Homo sapiens
MAEEQDLSEVELSPVGSEEPRCLSPGSAPSLGPDGGGGGSGLRASPGPGELGKVKKEQQDGEADDDKFPVCIREAVSQVLSGYDWTLVPMPVRVNGASKSKPHVKRPMNAFMVWAQAARRKLADQYPHLHNAELSKTLGKLWRLLNESDKRPFIEEAERLRMQHKKDHPDYKYQPRRRKNGKAAQGEAECPGGEAEQGGTAAIQAHYKSAHLDHRHPGEGSPMSDGNPEHPSGQSHGPPTPPTTPKTELQSGKADPKRDGRPSPSGPQSHSPTHWEQPVYTTLSRP

SEQ ID NO: 8543 - protein, 213 aa, Homo sapiens
MAEEQDLSEVELSPVGSEEPRCLSPGSAPSLGPDGGGGGSGLRASPGPGELGKVKKEQQDGEADDDKFPVCIREAVSQVLSGYDWTLVPMPVRVNGASKSKPHVKRPMNAFMVWAQAARRKLADQYPHLHNAELSKTLGKLWRLLNESDKRPFIEEAERLRMQHKKDHPDYKYQPRRRKNGKAAQGEAECPGGEAEQGGTAAIQAHYKSAHLD

SEQ ID NO: 8544 - protein, 474 aa, Homo sapiens
MVQQTNNAENTEALLAGESSDSGAGLELGIASSPTPGSTASTGGKADDPSWCKTPSGHIKRPMNAFMVWSQIERRKIMEQSPDMHNAEISKRLGKRWKLLKDSDKIPFIREAERLRLKHMADYPDYKYRPRKKVKSGNANSSSSAAASSKPGEKGDKVGGSGGGGHGGGGGGGSSNAGGGGGGASGGGANSKPAQKKSCGSKVAGGAGGGVSKPHAKLILAGGGGGGKAAAAAAASFAAEQAGAAALLPLGAAADHHSLYKARTPSASASASSAASASAALAAPGKHLAEKKVKRVYLFGGLGTSSSPVGGVGAGADPSDPLGLYEEEGAGCSPDAPSLSGRSSAASSPAAGRSPADHRGYASLRAASPAPSSAPSHASSSASSHSSSSSSSGSSSSDDEFEDDLLDLNPSSNFESMSLGSFSSSSALDRDLDFNFEPGSGSHFEFPDYCTPEVSEMISGDWLESSISNLVFTY

SEQ ID NO: 8545 - protein, 474 aa, Homo sapiens; identical to SEQ ID NO: 8544

SEQ ID NO: 8546 - protein, 1105 aa, Homo sapiens
MLEPSSVLHANVNQAPLWCLVLRWCRECKDTVCGGKQKSRVNHTFQRREIEAKEACDWLRAAGFPQYAQLYEDSQFPINIVAVKNDHDFLEKDLVEPLCRRLNTLNKCASMKLDVNFQRKKGDDSDEEDLCISNKWTFQRTSRRWSRVDDLYTLLPRGDRNGSPGGTGMRNTTSSESVLTDLSEPEVCSIHSESSGGSDSRSQPGQCCTDNPVMLDAPLVSSSLPQPPRDVLNHPFHPKNEKPTRARAKSFLKRMETLRGKGAHGRHKGSGRTGGLVISGPMLQQEPESFKAMQCIQIPNGDLQNSPPPACRKGLPCSGKSSGESSPSEHSSSGVSTPCLKERKCHEANKRGGMYLEDLDVLAGTALPDAGDQSRMHEFHSQENLVVHIPKDHKPGTFPKALSIESLSPTDSSNGVNWRTGSISLGREQVPGAREPRLMASCHRASRVSIYDNVPGSHLYASTGDLLDLEKDDLFPHLDDILQHVNGLQEVVDDWSKDVLPELQTHDTLVGEPGLSTFPSPNQITLDFEGNSVSEGRTTPSDVERDVTSLNESEPPGVRDRRDSGVGASLTRPNRRLRWNSFQLSHQPRPAPASPHISSQTASQLSLLQRFSLLRLTAIMEKHSMSNKHGWTWSVPKFMKRMKVPDYKDKAVFGVPLIVHVQRTGQPLPQSIQQALRYLRSNCLDQVGLFRKSGVKSRIHALRQMNENFPENVNYEDQSAYDVADMVKQFFRDLPEPLFTNKLSETFLHIYQYVSKEQRLQAVQAAILLLADENREVLQTLLCFLNDVVNLVEENQMTPMNLAVCLAPSLFHLNLLKKESSPRVIQKKYATGKPDQKDLNENLAAAQGLAHMIMECDRLFEVPHELVAQSRNSYVEAEIHVPTLEELGTQLEESGATFHTYLNHLIQGLQKEAKEKFKGWVTCSSTDNTDLAFKKVGDGNPLKLWKASVEVEAPPSVVLNRVLRERHLWDEDFVQWKVVETLDRQTEIYQYVLNSMAPHPSRDFVVLRTWKTDLPKGMCTLVSLSVEHEEAQLLGGVRAVVMDSQYLIEPCGSGKSRLTHICRIDLKGHSPEWYSKGFGHLCAAEVARIRNSFQPLIAEGPETKI

SEQ ID NO: 8547 - protein, 1113 aa, Homo sapiens
MFSQVPRTPASGCYYLNSMTPEGQEMYLRFDQTTRRSPYRMSRILARHQLVTKIQQEIEAKEACDWLRAAGFPQYAQLYEDSQFPINIVAVKNDHDFLEKDLVEPLCRRLNTLNKCASMKLDVNFQRKKGDDSDEEDLCISNKWTFQRTSRRWSRVDDLYTLLPRGDRNGSPGGTGMRNTTSSESVLTDLSEPEVCSIHSESSGGSDSRSQPGQCCTDNPVMLDAPLVSSSLPQPPRDVLNHPFHPKNEKPTRARAKSFLKRMETLRGKGAHGRHKGSGRTGGLVISGPMLQQEPESFKAMQCIQIPNGDLQNSPPPACRKGLPCSGKSSGESSPSEHSSSGVSTPCLKERKCHEANKRGGMYLEDLDVLAGTALPDAGDQSRMHEFHSQENLVVHIPKDHKPGTFPKALSIESLSPTDSSNGVNWRTGSISLGREQVPGAREPRLMASCHRASRVSIYDNVPGSHLYASTGDLLDLEKDDLFPHLDDILQHVNGLQEVVDDWSKDVLPELQTHDTLVGEPGLSTFPSPNQITLDFEGNSVSEGRTTPSDVERDVTSLNESEPPGVRDRRDSGVGASLTRPNRRLRWNSFQLSHQPRPAPASPHISSQTASQLSLLQRFSLLRLTAIMEKHSMSNKHGWTWSVPKFMKRMKVPDYKDKAVFGVPLIVHVQRTGQPLPQSIQQALRYLRSNCLDQVGLFRKSGVKSRIHALRQMNENFPENVNYEDQSAYDVADMVKQFFRDLPEPLFTNKLSETFLHIYQYVSKEQRLQAVQAAILLLADENREVLQTLLCFLNDVVNLVEENQMTPMNLAVCLAPSLFHLNLLKKESSPRVIQKKYATGKPDQKDLNENLAAAQGLAHMIMECDRLFEVPHELVAQSRNSYVEAEIHVPTLEELGTQLEESGATFHTYLNHLIQGLQKEAKEKFKGWVTCSSTDNTDLAFKKVGDGNPLKLWKASVEVEAPPSVVLNRVLRERHLWDEDFVQWKVVETLDRQTEIYQYVLNSMAPHPSRDFVVLRTWKTDLPKGMCTLVSLSVEHEEAQLLGGVRAVVMDSQYLIEPCGSGKSRLTHICRIDLKGHSPEWYSKGFGHLCAAEVARIRNSFQPLIAEGPETKI

SEQ ID NO: 8548 - protein, 687 aa, Homo sapiens
MLEPSSVLHANVNQAPLWCLVLRWCRECKDTVCGGKQKSRVNHTFQRREIEAKEACDWLRAAGFPQYAQLYEDSQFPINIVAVKNDHDFLEKDLVEPLCRRLNTLNKCASMKLDVNFQRKKGDDSDEEDLCISNKWTFQRTSRRWSRVDDLYTLLPRGDRNGSPGGTGMRNTTSSESVLTDLSEPEVCSIHSESSGGSDSRSQPGQCCTDNPVMLDAPLVSSSLPQPPRDVLNHPFHPKNEKPTRARAKSFLKRMETLRGKGAHGRHKGSGRTGGLVISGPMLQQEPESFKAMQCIQIPNGDLQNSPPPACRKGLPCSGKSSGESSPSEHSSSGVSTPCLKERKCHEANKRGGMYLEDLDVLAGTALPDAGDQSRMHEFHSQENLVVHIPKDHKPGTFPKALSIESLSPTDSSNGVNWRTGSISLGREQVPGAREPRLMASCHRASRVSIYDNVPGSHLYASTGDLLDLEKDDLFPHLDDILQHVNGLQEVVDDWSKDVLPELQTHDTLVGEPGLSTFPSPNQITLDFEGNSVSEGRTTPSDVERDVTSLNESEPPGVRDRRDSGVGASLTRPNRRLRWNSFQLSHQPRPAPASPHISSQTASQLSLLQRFSLLRLTAIMEKHSMSNKHGWTWSVPKFMKRMKVPDYKDKAVFGVPLIVHVQRTGQPLPQSIQQALRYLRSNCLDQE

SEQ ID NO: 8549 - protein, 995 aa, Homo sapiens
MKLDVNFQRKKGDDSDEEDLCISNKWTFQRTSRRWSRVDDLYTLLPRGDRNGSPGGTGMRNTTSSESVLTDLSEPEVCSIHSESSGGSDSRSQPGQCCTDNPVMLDAPLVSSSLPQPPRDVLNHPFHPKNEKPTRARAKSFLKRMETLRGKGAHGRHKGSGRTGGLVISGPMLQQEPESFKAMQCIQIPNGDLQNSPPPACRKGLPCSGKSSGESSPSEHSSSGVSTPCLKERKCHEANKRGGMYLEDLDVLAGTALPDAGDQSRMHEFHSQENLVVHIPKDHKPGTFPKALSIESLSPTDSSNGVNWRTGSISLGREQVPGAREPRLMASCHRASRVSIYDNVPGSHLYASTGDLLDLEKDDLFPHLDDILQHVNGLQEVVDDWSKDVLPELQTHDTLVGEPGLSTFPSPNQITLDFEGNSVSEGRTTPSDVERDVTSLNESEPPGVRDRRDSGVGASLTRPNRRLRWNSFQLSHQPRPAPASPHISSQTASQLSLLQRFSLLRLTAIMEKHSMSNKHGWTWSVPKFMKRMKVPDYKDKAVFGVPLIVHVQRTGQPLPQSIQQALRYLRSNCLDQVGLFRKSGVKSRIHALRQMNENFPENVNYEDQSAYDVADMVKQFFRDLPEPLFTNKLSETFLHIYQYVSKEQRLQAVQAAILLLADENREVLQTLLCFLNDVVNLVEENQMTPMNLAVCLAPSLFHLNLLKKESSPRVIQKKYATGKPDQKDLNENLAAAQGLAHMIMECDRLFEVPHELVAQSRNSYVEAEIHVPTLEELGTQLEESGATFHTYLNHLIQGLQKEAKEKFKGWVTCSSTDNTDLAFKKVGDGNPLKLWKASVEVEAPPSVVLNRVLRERHLWDEDFVQWKVVETLDRQTEIYQYVLNSMAPHPSRDFVVLRTWKTDLPKGMCTLVSLSVEHEEAQLLGGVRAVVMDSQYLIEPCGSGKSRLTHICRIDLKGHSPEWYSKGFGHLCAAEVARIRNSFQPLIAEGPETKI

SEQ ID NO: 8550 - protein, 149 aa, Homo sapiens
MASSDIQVKELEKRASGQAFELILSPRSKESVPEFPLSPPKKKDLSLEEIQKKLEAAEERRKSHEAEVLKQLAEKREHEKEVLQKAIEENNNFSKMAEEKLTHKMEANKENREAQMAAKLERLREKDKHIEEVRKNKESKDPADETEAD

SEQ ID NO: 8551 - protein, 149 aa, Homo sapiens; identical to SEQ ID NO: 8550

SEQ ID NO: 8552 - protein, 149 aa, Homo sapiens; identical to SEQ ID NO: 8550

SEQ ID NO: 8553 - protein, 174 aa, Homo sapiens
MASSDIQVKELEKRASGQAFELILSPRSKESVPEFPLSPPKKKDLSLEEIQKKLEAAEERRKSHEAEVLKQLAEKREHEKEVLQKAIEENNNFSKMAEEKLTHKMEANKENREAQMAAKLERLREKMYFWTHGPGAHPAQISAEQSCLHSVPALCPALGLQSALITWSDLSHHH

SEQ ID NO: 8554 - protein, 86 aa, Homo sapiens
MASSDIQVKELEKRASGQAFELILSPRSKESVPEFPLSPPKKKDLSLEEIQKKLEAAEERRKSHEAEVLKQLAEKREHEKEVLQKA

SEQ ID NO: 8555 - protein, 149 aa, Homo sapiens; identical to SEQ ID NO: 8550

SEQ ID NO: 8556 - protein, 1204 aa, Homo sapiens
MSFFNFRKIFKLGSEKKKKQYEHVKRDLNPEDFWEIIGELGDGAFGKVYKAQNKETSVLAAAKVIDTKSEEELEDYMVEIDILASCDHPNIVKLLDAFYYENNLWILIEFCAGGAVDAVMLELERPLTESQIQVVCKQTLDALNYLHDNKIIHRDLKAGNILFTLDGDIKLADFGVSAKNTRTIQRRDSFIGTPYWMAPEVVMCETSKDRPYDYKADVWSLGITLIEMAEIEPPHHELNPMRVLLKIAKSEPPTLAQPSRWSSNFKDFLKKCLEKNVDARWTTSQLLQHPFVTVDSNKPIRELIAEAKAEVTEEVEDGKEEDEEEETENSLPIPASKRASSDLSIASSEEDKLSQNACILESVSEKTERSNSEDKLNSKILNEKPTTDEPEKAVEDINEHITDAQLEAMTELHDRTAVIKENEREKRPKLENLPDTEDQETVDINSVSEGKENNIMITLETNIEHNLKSEEEKDQEKQQMFENKLIKSEEIKDTILQTVDLVSQETGEKEANIQAVDSEVGLTKEDTQEKLGEDDKTQKDVISNTSDVIGTCEAADVAQKVDEDSAEDTQSNDGKEVVEVGQKLINKPMVGPEAGGTKEVPIKEIVEMNEIEEGKNKEQAINSSENIMDINEEPGTTEGEEITESSSTEEMEVRSVVADTDQKALGSEVQDASKVTTQIDKEKKEIPVSIKKEPEVTVVSQPTEPQPVLIPSININSDSGENKEEIGSLSKTETILPPESENPKENDNDSGTGSTADTSSIDLNLSISSFLSKTKDSGSISLQETRRQKKTLKKTRKFIVDGVEVSVTTSKIVTDSDSKTEELRFLRRQELRELRFLQKEEQRAQQQLNSKLQQQREQIFRRFEQEMMSKKRQYDQEIENLEKQQKQTIERLEQEHTNRLRDEAKRIKGEQEKELSKFQNMLKNRKKEEQEFVQKQQQELDGSLKKIIQQQKAELANIERECLNNKQQLMRAREAAIWELEERHLQEKHQLLKQQLKDQYFMQRHQLLKRHEKETEQMQRYNQRLIEELKNRQTQERARLPKIQRSEAKTRMAMFKKSLRINSTATPDQDRDKIKQFAAQEEKRQKNERMAQHQKHENQMRDLQLQCEANVRELHQLQNEKCHLLVEHETQKLKELDEEHSQELKEWREKLRPRKKTLEEEFARKLQEQEVFFKMTGESECLNPSTQSRISKFYPIPSLHSTGS

SEQ ID NO: 8557 - protein, 1235 aa, Homo sapiens
MSFFNFRKIFKLGSEKKKKQYEHVKRDLNPEDFWEIIGELGDGAFGKVYKAQNKETSVLAAAKVIDTKSEEELEDYMVEIDILASCDHPNIVKLLDAFYYENNLWILIEFCAGGAVDAVMLELERPLTESQIQVVCKQTLDALNYLHDNKIIHRDLKAGNILFTLDGDIKLADFGVSAKNTRTIQRRDSFIGTPYWMAPEVVMCETSKDRPYDYKADVWSLGITLIEMAEIEPPHHELNPMRVLLKIAKSEPPTLAQPSRWSSNFKDFLKKCLEKNVDARWTTSQLLQHPFVTVDSNKPIRELIAEAKAEVTEEVEDGKEEDEEEETENSLPIPASKRASSDLSIASSEEDKLSQNACILESVSEKTERSNSEDKLNSKILNEKPTTDEPEKAVEDINEHITDAQLEAMTELHDRTAVIKENEREKRPKLENLPDTEDQETVDINSVSEGKENNIMITLETNIEHNLKSEEEKDQEKQQMFENKLIKSEEIKDTILQTVDLVSQETGEKEANIQAVDSEVGLTKEDTQEKLGEDDKTQKDVISNTSDVIGTCEAADVAQKVDEDSAEDTQSNDGKEVVEVGQKLINKPMVGPEAGGTKEVPIKEIVEMNEIEEGKNKEQAINSSENIMDINEEPGTTEGEEITESSSTEEMEVRSVVADTDQKALGSEVQDASKVTTQIDKEKKEIPVSIKKEPEVTVVSQPTEPQPVLIPSININSDSGENKEEIGSLSKTETILPPESENPKENDNDSGTGSTADTSSIDLNLSISSFLSKTKDSGSISLQETRRQKKTLKKTRKFIVDGVEVSVTTSKIVTDSDSKTEELRFLRRQELRELRFLQKEEQRAQQQLNSKLQQQREQIFRRFEQEMMSKKRQYDQEIENLEKQQKQTIERLEQEHTNRLRDEAKRIKGEQEKELSKFQNMLKNRKKEVINEVEKAPKELRKELMKRRKEELAQSQHAQEQEFVQKQQQELDGSLKKIIQQQKAELANIERECLNNKQQLMRAREAAIWELEERHLQEKHQLLKQQLKDQYFMQRHQLLKRHEKETEQMQRYNQRLIEELKNRQTQERARLPKIQRSEAKTRMAMFKKSLRINSTATPDQDRDKIKQFAAQEEKRQKNERMAQHQKHENQMRDLQLQCEANVRELHQLQNEKCHLLVEHETQKLKELDEEHSQELKEWREKLRPRKKTLEEEFARKLQEQEVFFKMTGESECLNPSTQSRISKFYPIPSLHSTGS

SEQ ID NO: 8558 - protein, 1147 aa, Homo sapiens
MDEPPFSEAALEQALGEPCDLDAALLTDIEDMLQLINNQDSDFPGLFDPPYAGSGAGGTDPASPDTSSPGSLSPPPATLSSSLEAFLSGPQAAPSPLSPPQPAPTPLKMYPSMPAFSPGPGIKEESVPLSILQTPTPQPLPGALLPQSFPAPAPPQFSSTPVLGYPSPPGGFSTGSPPGNTQQPLPGLPLASPPGVPPVSLHTQVQSVVPQQLLTVTAAPTAAPVTTTVTSQIQQVPVLLQPHFIKADSLLLTAMKTDGATVKAAGLSPLVSGTTVQTGPLPTLVSGGTILATVPLVVDAEKLPINRLAAGSKAPASAQSRGEKRTAHNAIEKRYRSSINDKIIELKDLVVGTEAKLNKSAVLRKAIDYIRFLQHSNQKLKQENLSLRTAVHKSKSLKDLVSACGSGGNTDVLMEGVKTEVEDTLTPPPSDAGSPFQSSPLSLGSRGSGSGGSGSDSEPDSPVFEDSKAKPEQRPSLHSRGMLDRSRLALCTLVFLCLSCNPLASLLGARGLPSPSDTTSVYHSPGRNVLGTESRDGPGWAQWLLPPVVWLLNGLLVLVSLVLLFVYGEPVTRPHSGPAVYFWRHRKQADLDLARGDFAQAAQQLWLALRALGRPLPTSHLDLACSLLWNLIRHLLQRLWVGRWLAGRAGGLQQDCALRVDASASARDAALVYHKLHQLHTMGKHTGGHLTATNLALSALNLAECAGDAVSVATLAEIYVAAALRVKTSLPRALHFLTRFFLSSARQACLAQSGSVPPAMQWLCHPVGHRFFVDGDWSVLSTPWESLYSLAGNPVDPLAQVTQLFREHLLERALNCVTQPNPSPGSADGDKEFSDALGYLQLLNSCSDAAGAPAYSFSISSSMATTTGVDPVAKWWASLTAVVIHWLRRDEEAAERLCPLVEHLPRVLQESERPLPRAALHSFKAARALLGCAKAESGPASLTICEKASGYLQDSLATTPASSSIDKAVQLFLCDLLLVVRTSLWRQQQPPAPAPAAQGTSSRPQASALELRGFQRDLSSLRRLAQSFRPAMRRVFLHEATARLMAGASPTRTHQLLDRSLRRRAGPGGKGGAVAELEPRPTRREHAEALLLASCYLPPGFLSAPGQRVGMLAEAARTLEKLGDRRLLHDCQQMLMRLGGGTTVTSS

SEQ ID NO: 8559 - protein, 1071 aa, Homo sapiens
MDEPPFSEAALEQALGEPCDLDAALLTDIEDMLQLINNQDSDFPGLFDPPYAGSGAGGTDPASPDTSSPGSLSPPPATLSSSLEAFLSGPQAAPSPLSPPQPAPTPLKMYPSMPAFSPGPGIKEESVPLSILQTPTPQPLPGALLPQSFPAPAPPQFSSTPVLGYPSPPGGFSTGSPPGNTQQPLPGLPLASPPGVPPVSLHTQVQSVVPQQLLTVTAAPTAAPVTTTVTSQIQQVPVLLQPHFIKADSLLLTAMKTDGATVKAAGLSPLVSGTTVQTGPLPTLVSGGTILATVPLVVDAEKLPINRLAAGSKAPASAQSRGEKRTAHNAIEKRYRSSINDKIIELKDLVVGTEAKLNKSAVLRKAIDYIRFLQHSNQKLKQENLSLRTAVHKSKSLKDLVSACGSGGNTDVLMEGVKTEVEDTLTPPPSDAGSPFQSSPLSLGSRGSGSGGSGSDSEPDSPVFEDSKAKPEQRPSLHSRGMLDRSRLALCTLVFLCLSCNPLASLLGARGLPSPSDTTSVYHSPGRNVLGTESRDGPGWAQWLLPPVVWLLNGLLVLVSLVLLFVYGEPVTRPHSGPAVYFWRHRKQADLDLARGDFAQAAQQLWLALRALGRPLPTSHLDLACSLLWNLIRHLLQRLWVGRWLAGRAGGLQQDCALRVDASASARDAALVYHKLHQLHTMGKHTGGHLTATNLALSALNLAECAGDAVSVATLAEIYVAAALRVKTSLPRALHFLTRFFLSSARQACLAQSGSVPPAMQWLCHPVGHRFFVDGDWSVLSTPWESLYSLAGNPVDPLAQVTQLFREHLLERALNCVTQPNPSPGSADGDKEFSDALGYLQLLNSCSDAAGAPAYSFSISSSMATTTGVDPVAKWWASLTAVVIHWLRRDEEAAERLCPLVEHLPRVLQESERPLPRAALHSFKAARALLGCAKAESGPASLTICEKASGYLQDSLATTPASSSIDKAVQLFLCDLLLVVRTSLWRQQQPPAPAPAAQGTSSRPQASALELRGFQRDLSSLRRLAQSFRPAMRRLMDVLTSESAWALPQHLGKGFPSPSGHKVPGWHGRMD

SEQ ID NO: 8560 - protein, 1177 aa, Homo sapiens
MDEPPFSEAALEQALGEPCDLDAALLTDIEGEVGAGRGRANGLDAPRAGADRGAMDCTFEDMLQLINNQDSDFPGLFDPPYAGSGAGGTDPASPDTSSPGSLSPPPATLSSSLEAFLSGPQAAPSPLSPPQPAPTPLKMYPSMPAFSPGPGIKEESVPLSILQTPTPQPLPGALLPQSFPAPAPPQFSSTPVLGYPSPPGGFSTGSPPGNTQQPLPGLPLASPPGVPPVSLHTQVQSVVPQQLLTVTAAPTAAPVTTTVTSQIQQVPVLLQPHFIKADSLLLTAMKTDGATVKAAGLSPLVSGTTVQTGPLPTLVSGGTILATVPLVVDAEKLPINRLAAGSKAPASAQSRGEKRTAHNAIEKRYRSSINDKIIELKDLVVGTEAKLNKSAVLRKAIDYIRFLQHSNQKLKQENLSLRTAVHKSKSLKDLVSACGSGGNTDVLMEGVKTEVEDTLTPPPSDAGSPFQSSPLSLGSRGSGSGGSGSDSEPDSPVFEDSKAKPEQRPSLHSRGMLDRSRLALCTLVFLCLSCNPLASLLGARGLPSPSDTTSVYHSPGRNVLGTESRDGPGWAQWLLPPVVWLLNGLLVLVSLVLLFVYGEPVTRPHSGPAVYFWRHRKQADLDLARGDFAQAAQQLWLALRALGRPLPTSHLDLACSLLWNLIRHLLQRLWVGRWLAGRAGGLQQDCALRVDASASARDAALVYHKLHQLHTMGKHTGGHLTATNLALSALNLAECAGDAVSVATLAEIYVAAALRVKTSLPRALHFLTRFFLSSARQACLAQSGSVPPAMQWLCHPVGHRFFVDGDWSVLSTPWESLYSLAGNPVDPLAQVTQLFREHLLERALNCVTQPNPSPGSADGDKEFSDALGYLQLLNSCSDAAGAPAYSFSISSSMATTTGVDPVAKWWASLTAVVIHWLRRDEEAAERLCPLVEHLPRVLQESERPLPRAALHSFKAARALLGCAKAESGPASLTICEKASGYLQDSLATTPASSSIDKAVQLFLCDLLLVVRTSLWRQQQPPAPAPAAQGTSSRPQASALELRGFQRDLSSLRRLAQSFRPAMRRVFLHEATARLMAGASPTRTHQLLDRSLRRRAGPGGKGGAVAELEPRPTRREHAEALLLASCYLPPGFLSAPGQRVGMLAEAARTLEKLGDRRLLHDCQQMLMRLGGGTTVTSS

SEQ ID NO: 8561 - protein, 1155 aa, Homo sapiens
  VARIANT 1: note = MOD_RES - Any amino acid
XKIRRALTGEVGAGRGRANGLDAPRAGADRGAMDCTFEDMLQLINNQDSDFPGLFDPPYAGSGAGGTDPASPDTSSPGSLSPPPATLSSSLEAFLSGPQAAPSPLSPPQPAPTPLKMYPSMPAFSPGPGIKEESVPLSILQTPTPQPLPGALLPQSFPAPAPPQFSSTPVLGYPSPPGGFSTGSPPGNTQQPLPGLPLASPPGVPPVSLHTQVQSVVPQQLLTVTAAPTAAPVTTTVTSQIQQVPVLLQPHFIKADSLLLTAMKTDGATVKAAGLSPLVSGTTVQTGPLPTLVSGGTILATVPLVVDAEKLPINRLAAGSKAPASAQSRGEKRTAHNAIEKRYRSSINDKIIELKDLVVGTEAKLNKSAVLRKAIDYIRFLQHSNQKLKQENLSLRTAVHKSKSLKDLVSACGSGGNTDVLMEGVKTEVEDTLTPPPSDAGSPFQSSPLSLGSRGSGSGGSGSDSEPDSPVFEDSKAKPEQRPSLHSRGMLDRSRLALCTLVFLCLSCNPLASLLGARGLPSPSDTTSVYHSPGRNVLGTESRDGPGWAQWLLPPVVWLLNGLLVLVSLVLLFVYGEPVTRPHSGPAVYFWRHRKQADLDLARGDFAQAAQQLWLALRALGRPLPTSHLDLACSLLWNLIRHLLQRLWVGRWLAGRAGGLQQDCALRVDASASARDAALVYHKLHQLHTMGKHTGGHLTATNLALSALNLAECAGDAVSVATLAEIYVAAALRVKTSLPRALHFLTRFFLSSARQACLAQSGSVPPAMQWLCHPVGHRFFVDGDWSVLSTPWESLYSLAGNPVDPLAQVTQLFREHLLERALNCVTQPNPSPGSADGDKEFSDALGYLQLLNSCSDAAGAPAYSFSISSSMATTTGVDPVAKWWASLTAVVIHWLRRDEEAAERLCPLVEHLPRVLQESERPLPRAALHSFKAARALLGCAKAESGPASLTICEKASGYLQDSLATTPASSSIDKAVQLFLCDLLLVVRTSLWRQQQPPAPAPAAQGTSSRPQASALELRGFQRDLSSLRRLAQSFRPAMRRVFLHEATARLMAGASPTRTHQLLDRSLRRRAGPGGKGGAVAELEPRPTRREHAEALLLASCYLPPGFLSAPGQRVGMLAEAARTLEKLGDRRLLHDCQQMLMRLGGGTTVTSS

SEQ ID NO: 8562 - protein, 766 aa, Homo sapiens
MLAHLSRAAPCPLAAGAVAAVAVAVTRSLTAQSLRTARLGPATVPPSPLPAISSEPHDRAGKTLTDPTSHFIDRITEAWSHVGSHSKAKPEQRPSLHSRGMLDRSRLALCTLVFLCLSCNPLASLLGARGLPSPSDTTSVYHSPGRNVLGTESRDGPGWAQWLLPPVVWLLNGLLVLVSLVLLFVYGEPVTRPHSGPAVYFWRHRKQADLDLARGDFAQAAQQLWLALRALGRPLPTSHLDLACSLLWNLIRHLLQRLWVGRWLAGRAGGLQQDCALRVDASASARDAALVYHKLHQLHTMGKHTGGHLTATNLALSALNLAECAGDAVSVATLAEIYVAAALRVKTSLPRALHFLTRFFLSSARQACLAQSGSVPPAMQWLCHPVGHRFFVDGDWSVLSTPWESLYSLAGNPVDPLAQVTQLFREHLLERALNCVTQPNPSPGSADGDKEFSDALGYLQLLNSCSDAAGAPAYSFSISSSMATTTGVDPVAKWWASLTAVVIHWLRRDEEAAERLCPLVEHLPRVLQESERPLPRAALHSFKAARALLGCAKAESGPASLTICEKASGYLQDSLATTPASSSIDKAVQLFLCDLLLVVRTSLWRQQQPPAPAPAAQGTSSRPQASALELRGFQRDLSSLRRLAQSFRPAMRRVFLHEATARLMAGASPTRTHQLLDRSLRRRAGPGGKGGAVAELEPRPTRREHAEALLLASCYLPPGFLSAPGQRVGMLAEAARTLEKLGDRRLLHDCQQMLMRLGGGTTVTSS

SEQ ID NO: 8563 - protein, 893 aa, Homo sapiens
MKTDGATVKAAGLSPLVSGTTVQTGPLPTLVSGGTILATVPLVVDAEKLPINRLAAGSKAPASAQSRGEKRTAHNAIEKRYRSSINDKIIELKDLVVGTEAKLNKSAVLRKAIDYIRFLQHSNQKLKQENLSLRTAVHKSKSLKDLVSACGSGGNTDVLMEGVKTEVEDTLTPPPSDAGSPFQSSPLSLGSRGSGSGGSGSDSEPDSPVFEDSKAKPEQRPSLHSRGMLDRSRLALCTLVFLCLSCNPLASLLGARGLPSPSDTTSVYHSPGRNVLGTESRDGPGWAQWLLPPVVWLLNGLLVLVSLVLLFVYGEPVTRPHSGPAVYFWRHRKQADLDLARGDFAQAAQQLWLALRALGRPLPTSHLDLACSLLWNLIRHLLQRLWVGRWLAGRAGGLQQDCALRVDASASARDAALVYHKLHQLHTMGKHTGGHLTATNLALSALNLAECAGDAVSVATLAEIYVAAALRVKTSLPRALHFLTRFFLSSARQACLAQSGSVPPAMQWLCHPVGHRFFVDGDWSVLSTPWESLYSLAGNPVDPLAQVTQLFREHLLERALNCVTQPNPSPGSADGDKEFSDALGYLQLLNSCSDAAGAPAYSFSISSSMATTTGVDPVAKWWASLTAVVIHWLRRDEEAAERLCPLVEHLPRVLQESERPLPRAALHSFKAARALLGCAKAESGPASLTICEKASGYLQDSLATTPASSSIDKAVQLFLCDLLLVVRTSLWRQQQPPAPAPAAQGTSSRPQASALELRGFQRDLSSLRRLAQSFRPAMRRVFLHEATARLMAGASPTRTHQLLDRSLRRRAGPGGKGGAVAELEPRPTRREHAEALLLASCYLPPGFLSAPGQRVGMLAEAARTLEKLGDRRLLHDCQQMLMRLGGGTTVTSS

SEQ ID NO: 8564 - protein, 984 aa, Homo sapiens
MDCTFEDMLQLINNQDSDFPGLFDPPYAGSGAGGTDPASPDTSSPGSLSPPPATLSSSLEAFLSGPQAAPSPLSPPQPAPTPLKMYPSMPAFSPGPGIKEESVPLSILQTPTPQPLPVPTLVSGGTILATVPLVVDAEKLPINRLAAGSKAPASAQSRGEKRTAHNAIEKRYRSSINDKIIELKDLVVGTEAKLNKSAVLRKAIDYIRFLQHSNQKLKQENLSLRTAVHKSKSLKDLVSACGSGGNTDVLMEGVKTEVEDTLTPPPSDAGSPFQSSPLSLGSRGSGSGGSGSDSEPDSPVFEDSKAKPEQRPSLHSRGMLDRSRLALCTLVFLCLSCNPLASLLGARGLPSPSDTTSVYHSPGRNVLGTESRDGPGWAQWLLPPVVWLLNGLLVLVSLVLLFVYGEPVTRPHSGPAVYFWRHRKQADLDLARGDFAQAAQQLWLALRALGRPLPTSHLDLACSLLWNLIRHLLQRLWVGRWLAGRAGGLQQDCALRVDASASARDAALVYHKLHQLHTMGKHTGGHLTATNLALSALNLAECAGDAVSVATLAEIYVAAALRVKTSLPRALHFLTRFFLSSARQACLAQSGSVPPAMQWLCHPVGHRFFVDGDWSVLSTPWESLYSLAGNPVDPLAQVTQLFREHLLERALNCVTQPNPSPGSADGDKEFSDALGYLQLLNSCSDAAGAPAYSFSISSSMATTTGVDPVAKWWASLTAVVIHWLRRDEEAAERLCPLVEHLPRVLQESERPLPRAALHSFKAARALLGCAKAESGPASLTICEKASGYLQDSLATTPASSSIDKAVQLFLCDLLLVVRTSLWRQQQPPAPAPAAQGTSSRPQASALELRGFQRDLSSLRRLAQSFRPAMRRVFLHEATARLMAGASPTRTHQLLDRSLRRRAGPGGKGGAVAELEPRPTRREHAEALLLASCYLPPGFLSAPGQRVGMLAEAARTLEKLGDRRLLHDCQQMLMRLGGGTTVTSS

SEQ ID NO: 8565 - protein, 1073 aa, Homo sapiens
MDCTFEDMLQLINNQDSDFPGLFDPPQPAPTPLKMYPSMPAFSPGPGIKEESVPLSILQTPTPQPLPGALLPQSFPAPAPPQFSSTPVLGYPSPPGGFSTGSPPGNTQQPLPGLPLASPPGVPPVSLHTQVQSVVPQQLLTVTAAPTAAPVTTTVTSQIQQVPVLLQPHFIKADSLLLTAMKTDGATVKAAGLSPLVSGTTVQTGPLPTLVSGGTILATVPLVVDAEKLPINRLAAGSKAPASAQSRGEKRTAHNAIEKRYRSSINDKIIELKDLVVGTEAKLNKSAVLRKAIDYIRFLQHSNQKLKQENLSLRTAVHKSKSLKDLVSACGSGGNTDVLMEGVKTEVEDTLTPPPSDAGSPFQSSPLSLGSRGSGSGGSGSDSEPDSPVFEDSKAKPEQRPSLHSRGMLDRSRLALCTLVFLCLSCNPLASLLGARGLPSPSDTTSVYHSPGRNVLGTESRDGPGWAQWLLPPVVWLLNGLLVLVSLVLLFVYGEPVTRPHSGPAVYFWRHRKQADLDLARGDFAQAAQQLWLALRALGRPLPTSHLDLACSLLWNLIRHLLQRLWVGRWLAGRAGGLQQDCALRVDASASARDAALVYHKLHQLHTMGKHTGGHLTATNLALSALNLAECAGDAVSVATLAEIYVAAALRVKTSLPRALHFLTRFFLSSARQACLAQSGSVPPAMQWLCHPVGHRFFVDGDWSVLSTPWESLYSLAGNPVDPLAQVTQLFREHLLERALNCVTQPNPSPGSADGDKEFSDALGYLQLLNSCSDAAGAPAYSFSISSSMATTTGVDPVAKWWASLTAVVIHWLRRDEEAAERLCPLVEHLPRVLQESERPLPRAALHSFKAARALLGCAKAESGPASLTICEKASGYLQDSLATTPASSSIDKAVQLFLCDLLLVVRTSLWRQQQPPAPAPAAQGTSSRPQASALELRGFQRDLSSLRRLAQSFRPAMRRVFLHEATARLMAGASPTRTHQLLDRSLRRRAGPGGKGGAVAELEPRPTRREHAEALLLASCYLPPGFLSAPGQRVGMLAEAARTLEKLGDRRLLHDCQQMLMRLGGGTTVTSS

SEQ ID NO: 8566 - protein, 470 aa, Homo sapiens
MDEPPFSEAALEQALGEPCDLDAALLTDIEDMLQLINNQDSDFPGLFDPPYAGSGAGGTDPASPDTSSPGSLSPPPATLSSSLEAFLSGPQAAPSPLSPPQPAPTPLKMYPSMPAFSPGPGIKEESVPLSILQTPTPQPLPGALLPQSFPAPAPPQFSSTPVLGYPSPPGGFSTGSPPGNTQQPLPGLPLASPPGVPPVSLHTQVQSVVPQQLLTVTAAPTAAPVTTTVTSQIQQVPVLLQPHFIKADSLLLTAMKTDGATVKAAGLSPLVSGTTVQTGPLPTLVSGGTILATVPLVVDAEKLPINRLAAGSKAPASAQSRGEKRTAHNAIEKRYRSSINDKIIELKDLVVGTEAKLNKSAVLRKAIDYIRFLQHSNQKLKQENLSLRTAVHKSKSLKDLVSACGSGGNTDVLMEGVKTEVEDTLTPPPSDAGSPFQSSPLSLGSRGSGSGGSGSDSEPDSPVFEDSKTE

SEQ ID NO: 8567 - protein, 214 aa, Homo sapiens
LMPACLPGKHTGGHLTATNLALSALNLAECAGDAVSVATLAEIYVAAALRVKTSLPRALHFLTRFFLSSARQACLAQSGSVPPAMQWLCHPVGHRFFVDGDWSVLSTPWESLYSLAGNPVDPLAQVTQLFREHLLERALNCVTQPNPSPGSADGDKEFSDALGYLQLLNSCSDAAGAPAYSFSISSSMATTTGDPCPGQLCTPSRLPGPCWAVP

SEQ ID NO: 8568 - protein, 248 aa, Homo sapiens [sequence omitted]

SEQ ID NO: 8569 - protein, 216 aa, Homo sapiens
MERASLIQKAKLAEQAERYEDMAAFMKGAVEKGEELSCEERNLLSVAYKNVVGGQRAAWRVLSSIEQKSNEEGSEEKGPEVREYRVFYLKMKGDYYRYLAEVATGDDKKRIIDSARSAYQEAMDISKKEMPPTNPIRLGLALNFSVFHYEIANSPEEAISLAKTTFDEAMADLHTLSEDSYKDSTLIMQLLRDNLTLWTADNAGEEGGEAPQEPQS

SEQ ID NO: 8570 - protein, 1233 aa, Homo sapiens
MGFLKLIEIENFKSYKGRQIIGPFQRFTAIIGPNGSGKSNLMDAISFVLGEKTSNLRVKTLRDLIHGAPVGKPAANRAFVSMVYSEEGAEDRTFARVIVGGSSEYKINNKVVQLHEYSEELEKLGILIKARNFLVFQGAVESIAMKNPKERTALFEEISRSGELAQEYDKRKKEMVKAEEDTQFNYHRKKNIAAERKEAKQEKEEADRYQRLKDEVVRAQVQLQLFKLYHNEVEIEKLNKELASKNKEIEKDKKRMDKVEDELKEKKKELGKMMREQQQIEKEIKEKDSELNQKRPQYIKAKENTSHKIKKLEAAKKSLQNAQKHYKKRKGDMDELEKEMLSVEKARQEFEERMEEESQSQGRDLTLEENQVKKYHRLKEEASKRAATLAQELEKFNRDQKADQDRLDLEERKKVETEAKIKQKLREIEENQKRIEKLEEYITTSKQSLEEQKKLEGELTEEVEMAKRRIDEINKELNQVMEQLGDARIDRQESSRQQRKAEIMESIKRLYPGSVYGRLIDLCQPTQKKYQIAVTKVLGKNMDAIIVDSEKTGRDCIQYIKEQRGEPETFLPLDYLEVKPTDEKLRELKGAKLVIDVIRYEPPHIKKALQYACGNALVCDNVEDARRIAFGGHQRHKTVALDGTLFQKSGVISGGASDLKAKARRWDEKAVDKLKEKKERLTEELKEQMKAKRKEAELRQVQSQAHGLQMRLKYSQSDLEQTKTRHLALNLQEKSKLESELANFGPRINDIKRIIQSREREMKDLKEKMNQVEDEVFEEFCREIGVRNIREFEEEKVKRQNEIAKKRLEFENQKTRLGIQLDFEKNQLKEDQDKVHMWEQTVKKDENEIEKLKKEEQRHMKIIDETMAQLQDLKNQHLAKKSEVNDKNHEMEEIRKKLGGANKEMTHLQKEVTAIETKLEQKRSDRHNLLQACKMQDIKLPLSKGTMDDISQEEGSSQGEDSVSGSQRISSIYAREALIEIDYGDLCEDLKDAQAEEEIKQEMNTLQQKLNEQQSVLQRIAAPNMKAMEKLESVRDKFQETSDEFEAARKRAKKAKQAFEQIKKERFDRFNACFESVATNIDEIYKALSRNSSAQAFLGPENPEEPYLDGINYNCVAPGKRFRPMDNLSGGEKTVAALALLFAIHSYKPAPFFVLDEIDAALDNTNIGKVANYIKEQSTCNFQAIVISLKEEFYTKAESLIGVYPEQGDCVISKVLTFDLTKYPDANPNPNEQ

SEQ ID NO: 8571 - protein, 203 aa, Homo sapiens
MGFLKLIEIENFKSYKGRQIIGPFQRFTAIIGPNGSGKSNLMDAISFVLGEKTSNLRVKTLRDLIHGAPVGKPAANRAFVSMVYSEEGAEDRTFARVIVGGSSEYKINNKVVQLHEYSEELEKLGILIKARNFLVFQGCCGIYCHETPKRGQLYLKISRSGELAQEYDKRKKEMVKAEEDTQFNYHRKKNIAAERKEAKQEKE

SEQ ID NO: 8572 - protein, 516 aa, Homo sapiens
MGFLKLIEIENFKSYKGRQIIGPFQRFTAIIGPNGSGKSNLMDAISFVLGEKTSNLRVKTLRDLIHGAPVGKPAANRAFVSMVYSEEGAEDRTFARVIVGGSSEYKINNKVVQLHEYSEELEKLGILIKARNFLVFQVKKYHRLKEEASKRAATLAQELEKFNRDQKADQDRLDLEERKKVETEAKIKQKLREIEENQKRIEKLEEYITTSKQSLEEQKKLEGELTEEVEMAKRRIDEINKELNQVMEQLGDARIDRQESSRQQRKAEIMESIKRLYPGSVYGRLIDLCQPTQKKYQIAVTKVLGKNMDAIIVDSEKTGRDCIQYIKEQRGEPETFLPLDYLEVKPTDEKLRELKGAKLVIDVIRYEPPHIKKALQYACGNALVCDNVEDARRIAFGGHQRHKTVALDGTLFQKSGVISGGASDLKAKARRWDEKAVDKLKEKKERLTEELKEQMKAKRKEAELRQVQSQAHGLQMRLKYSQSDLEQTKTRHLALNLQVGPGLQPCSPKAIHTFLA

SEQ ID NO: 8573 - protein, 289 aa, Homo sapiens
  VARIANT 1: note = MOD_RES - Any amino acid
XWYTPTPFYSSLEAALLNFRPSAPVFRMLEVSIPTPHRYVRGKSNLMDAISFVLGEKTSNLRVKTLRDLIHGAPVGKPAANRAFVSMVYSEEGAEDRTFARVIVGGSSEYKINNKVVQLHEYSEELEKLGILIKARNFLVFQGAVESIAMKNPKERTALFEEISRSGELAQEYDKRKKEMVKAEEDTQFNYHRKKNIAAERKEAKQEKEEADRYQRLKDEVVRAQVQLQLFKLYHNEVEIEKLNKELASKNKEIEKDKKRMDKVEDELKEKKKELGKMMREQQQIEKEI

SEQ ID NO: 8574 - protein, 664 aa, Homo sapiens
MSGVRGLSRLLSARRLALAKAWPTVLQTGTRGFHFTVDGNKRASAKVSDSISAQYPVVDHEFDAVVVGAGGAGLRAAFGLSEAGFNTACVTKLFPTRSHTVAAQGGINAALGNMEEDNWRWHFYDTVKGSDWLGDQDAIHYMTEQAPAAVVELENYGMPFSRTEDGKIYQRAFGGQSLKFGKGGQAHRCCCVADRTGHSLLHTLYGRSLRYDTSYFVEYFALDLLMENGECRGVIALCIEDGSIHRIRAKNTVVATGGYGRTYFSCTSAHTSTGDGTAMITRAGLPCQDLEFVQFHPTGIYGAGCLITEGCRGEGGILINSQGERFMERYAPVAKDLASRDVVSRSMTLEIREGRGCGPEKDHVYLQLHHLPPEQLATRLPGISETAMIFAGVDVTKEPIPVLPTVHYNMGGIPTNYKGQVLRHVNGQDQIVPGLYACGEAACASVHGANRLGANSLLDLVVFGRACALSIEESCRPGDKVPPIKPNAGEESVMNLDKLRFADGSIRTSELRLSMQKSMQNHAAVFRVGSVLQEGCGKISKLYGDLKHLKTFDRGMVWNTDLVETLELQNLMLCALQTIYGAEARKESRGAHAREDYKVRIDEYDYSKPIQGQQKKPFEEHWRKHTLSYVDVGTGKVTLEYRPVIDKTLNEADCATVPPAIRSY

SEQ ID NO: 8575 - protein, 519 aa, Homo sapiens
MSGVRGLSRLLSARRLALAKAWPTVLQTGTRGFHFTVDGNKRASAKVSDSISAQYPVVDHEFDAVVVGAGGAGLRAAFGLSEAGFNTACVTKLFPTRSHTVAAQGGINAALGNMEEDNWRWHFYDTSTGDGTAMITRAGLPCQDLEFVQFHPTGIYGAGCLITEGCRGEGGILINSQGERFMERYAPVAKDLASRDVVSRSMTLEIREGRGCGPEKDHVYLQLHHLPPEQLATRLPGISETAMIFAGVDVTKEPIPVLPTVHYNMGGIPTNYKGQVLRHVNGQDQIVPGLYACGEAACASVHGANRLGANSLLDLVVFGRACALSIEESCRPGDKVPPIKPNAGEESVMNLDKLRFADGSIRTSELRLSMQKSMQNHAAVFRVGSVLQEGCGKISKLYGDLKHLKTFDRGMVWNTDLVETLELQNLMLCALQTIYGAEARKESRGAHAREDYKVRIDEYDYSKPIQGQQKKPFEEHWRKHTLSYVDVGTGKVTLEYRPVIDKTLNEADCATVPPAIRSY

SEQ ID NO: 8576 - protein, 2214 aa, Homo sapiens
MKRKERIARRLEGIENDTQPILLQSCTGLVTHRLLEEDTPRYMRASDPASPHIGRSNEEEETSDSSLEKQTRSKYCTETSGVHGDSPYGSGTMDTHSLESKAERIARYKAERRRQLAEKYGLTLDPEADSEYLSRYTKSRKEPDAVEKRGGKSDKQEESSRDASSLYPGTETMGLRTCAGESKDYALHVGDGSSDPEVLLNIENQRRGQELSATRQAHDLSPAAESSSTFSFSGRDSSFTEVPRSPKHAHSSSLQQAASRSPSFGDPQLSPEARPSTGKPKHEWFLQKDSEGDTPSLINWPSRVKVREKLVKEESARNSPELASESVTQRRHQPAPVHYVSFQSEHSAFDRVPSKAAGSTRQPIRGYVQPADTGHTAKLVTPETPENASECSWVASATQNVPKPPSLTVLEGDGRDSPVLHVCESKAEEEEGEGEGEEKEEDVCFTEALEQSKKTLLALEGDGLVRSPEDPSRNEDFGKPAVSTVTLEHQKELENVAQPPQAPHQPTERTGRSEMVLYIQSEPVSQDAKPTGHNREASKKRKVRTRSLSDFTGPPQLQALKYKDPASRRELELPSSKTEGPYGEISMLDTKVSVAQLRSAFLASANACRRPELKSRVERSAEGPGLPTGVERERGSRKPRRYFSPGESRKTSERFRTQPITSAERKESDRCTSHSETPTVDDEEKVDERAKLSVAAKRLLFREMEKSFDEQNVPKRRSRNTAVEQRLRRLQDRSLTQPITTEEVVIAATEPIPASCSGGTHPVMARLPSPTVARSAVQPARLQASAHQKALAKDQTNEGKELAEQGEPDSSTLSLAEKLALFNKLSQPVSKAISTRNRIDTRQRRMNARYQTQPVTLGEVEQVQSGKLIPFSPAVNTSVSTVASTVAPMYAGDLRTKPPLDHNASATDYKFSSSIENSDSPVRSILKSQAWQPLVEGSENKGMLREYGETESKRALTGRDSGMEKYGSFEEAEASYPILNRAREGDSHKESKYAVPRRGSLERANPPITHLGDEPKEFSMAKMNAQGNLDLRDRLPFEEKVEVENVMKRKFSLRAAEFGEPTSEQTGTAAGKTIAQTTAPVSWKPQDSSEQPQEKLCKNPCAMFAAGEIKTPTGEGLLDSPSKTMSIKERLALLKKSGEEDWRNRLSRRQEGGKAPASSLHTQEAGRSLIKKRVTESRESQMTIEERKQLITVREEAWKTRGRGAANDSTQFTVAGRMVKKGLASPTAITPVASPICGKTRGTTPVSKPLEDIEARPDMQLESDLKLDRLETFLRRLNNKVGGMHETVLTVTGKSVKEVMKPDDDETFAKFYRSVDYNMPRSPVEMDEDFDVIFDPYAPKLTSSVAEHKRAVRPKRRVQASKNPLKMLAAREDLLQEYTEQRLNVAFMESKRMKVEKMSSNSNFSEVTLAGLASKENFSNVSLRSVNLTEQNSNNSAVPYKRLMLLQIKGRRHVQTRLVEPRASALNSGDCFLLLSPHCCFLWVGEFANVIEKAKASELATLIQTKRELGCRATYIQTIEEGINTHTHAAKDFWKLLGGQTSYQSAGDPKEDELYEAAIIETNCIYRLMDDKLVPDDDYWGKIPKCSLLQPKEVLVFDFGSEVYVWHGKEVTLAQRKIAFQLAKHLWNGTFDYENCDINPLDPGECNPLIPRKGQGRPDWAIFGRLTEHNETILFKEKFLDWTELKRSNEKNPGELAQHKEDPRTDVKAYDVTRMVSMPQTTAGTILDGVNVGRGYGLVEGHDRRQFEITSVSVDVWHILEFDYSRLPKQSIGQFHEGDAYVVKWKFMVSTAVGSRQKGEHSVRAAGKEKCVYFFWQGRHSTVSEKGTSALMTVELDEERGAQVQVLQGKEPPCFLQCFQGGMVVHSGRREEEEENVQSEWRLYCVRGEVPVEGNLLEVACHCSSLRSRTSMVVLNVNKALIYLWHGCKAQAHTKEVGRTAANKIKEQCPLEAGLHSSSKVTIHECDEGSEPLGFWDALGRRDRKAYDCMLQDPGSFNFAPRLFILSSSSGDFAATEFVYPARAPSVVSSMPFLQEDLYSAPQPALFLVDNHHEVYLWQGWWPIENKITGSARIRWASDRKSAMETVLQYCKGKNLKKPAPKSYLIHAGLEPLTFTNMFPSWEHREDIAEITEMDTEVSNQITLVEDVLAKLCKTIYPLADLLARPLPEGVDPLKLEIYLTDEDFEFALDMTRDEYNALPAWKQVNLKKAKGLF

SEQ ID NO: 8577 - protein, 2214 aa, Homo sapiens; identical to SEQ ID NO: 8576

SEQ ID NO: 8578 - protein, 1788 aa, Homo sapiens
MKRKERIARRLEGIENDTQPILLQSCTGLVTHRLLEEDTPRYMRASDPASPHIGRSNEEEETSDSSLEKQTRSKYCTETSGVHGDSPYGSGTMDTHSLESKAERIARYKAERRRQLAEKYGLTLDPEADSEYLSRYTKSRKEPDAVEKRGGKSDKQEESSRDASSLYPGTETMGLRTCAGESKDYALHVGDGSSDPEVLLNIENQRRGQELSATRQAHDLSPAAESSSTFSFSGRDSSFTEVPRSPKHAHSSSLQQAASRSPSFGDPQLSPEARPRCTSHSETPTVDDEEKVDERAKLSVAAKRLLFREMEKSFDEQNVPKRRSRNTAVEQRLRRLQDRSLTQPITTEEVVIAATLQASAHQKALAKDQTNEGKELAEQGEPDSSTLSLAEKLALFNKLSQPVSKAISTRNRIDTRQRRMNARYQTQPVTLGEVEQVQSGKLIPFSPAVNTSVSTVASTVAPMYAGDLRTKPPLDHNASATDYKFSSSIENSDSPVRSILKSQAWQPLVEGSENKGMLREYGETESKRALTGRDSGMEKYGSFEEAEASYPILNRAREGDSHKESKYAVPRRGSLERANPPITHLGDEPKEFSMAKMNAQGNLDLRDRLPFEEKVEVENVMKRKFSLRAAEFGEPTSEQTGTAAGKTIAQTTAPVSWKPQDSSEQPQEKLCKNPCAMFAAGEIKTPTGEGLLDSPSKTMSIKERLALLKKSGEEDWRNRLSRRQEGGKAPASSLHTQEAGRSLIKKRVTESRESQMTIEERKQLITVREEAWKTRGRGAANDSTQFTVAGRMVKKGLASPTAITPVASPICGKTRGTTPVSKPLEDIEARPDMQLESDLKLDRLETFLRRLNNKVGGMHETVLTVTGKSVKEVMKPDDDETFAKFYRSVDYNMPRSPVEMDEDFDVIFDPYAPKLTSSVAEHKRAVRPKRRVQASKNPLKMLAAREDLLQEYTEQRLNVAFMESKRMKVEKMSSNSNFSEVTLAGLASKENFSNVSLRSVNLTEQNSNNSAVPYKRLMLLQIKGRRHVQTRLVEPRASALNSGDCFLLLSPHCCFLWVGEFANVIEKAKASELATLIQTKRELGCRATYIQTIEEGINTHTHAAKDFWKLLGGQTSYQSAGDPKEDELYEAAIIETNCIYRLMDDKLVPDDDYWGKIPKCSLLQPKEVLVFDFGSEVYVWHGKEVTLAQRKIAFQLAKHLWNGTFDYENCDINPLDPGECNPLIPRKGQGRPDWAIFGRLTEHNETILFKEKFLDWTELKRSNEKNPGELAQHKEDPRTDVKAYDVTRMVSMPQTTAGTILDGVNVGRGYGLVEGHDRRQFEITSVSVDVWHILEFDYSRLPKQSIGQFHEGDAYVVKWKFMVSTAVGSRQKGEHSVRAAGKEKCVYFFWQGRHSTVSEKGTSALMTVELDEERGAQVQVLQGKEPPCFLQCFQGGMVVHSGRREEEEENVQSEWRLYCVRGEVPVEGNLLEVACHCSSLRSRTSMVVLNVNKALIYLWHGCKAQAHTKEVGRTAANKIKEQCPLEAGLHSSSKVTIHECDEGSEPLGFWDALGRRDRKAYDCMLQDPGSFNFAPRLFILSSSSGDFAATEFVYPARAPSVVSSMPFLQEDLYSAPQPALFLVDNHHEVYLWQGWWPIENKITGSARIRWASDRKSAMETVLQYCKGKNLKKPAPKSYLIHAGLEPLTFTNMFPSWEHREDIAEITEMDTEVSNQITLVEDVLAKLCKTIYPLADLLARPLPEGVDPLKLEIYLTDEDFEFALDMTRDEYNALPAWKQVNLKKAKGLF

SEQ ID NO: 8579 - protein, 1128 aa, Homo sapiens
MFAAGEIKTPTGEGLLDSPSKTMSIKERLALLKKSGEEDWRNRLSRRQEGGKAPASSLHTQEAGRSLIKKEEGGVADDSAISNLLWRVTESRESQMTIEERKQLITVREEAWKTRGRGAANDSTQFTVAGRMVKKGLASPTAITPVASPICGKTRGTTPVSKPLEDIEARPDMQLESDLKLDRLETFLRRLNNKVGGMHETVLTVTGKSVKEVMKPDDDETFAKFYRSVDYNMPRSPVEMDEDFDVIFDPYAPKLTSSVAEHKRAVRPKRRVQASKNPLKMLAAREDLLQEYTEQRLNVAFMESKRMKVEKMSSNSNFSEVTLAGLASKENFSNVSLRSVNLTEQNSNNSAVPYKRLMLLQIKGRRHVQTRLVEPRASALNSGDCFLLLSPHCCFLWVGEFANVIEKAKASELATLIQTKRELGCRATYIQTIEEGINTHTHAAKDFWKLLGGQTSYQSAGDPKEDELYEAAIIETNCIYRLMDDKLVPDDDYWGKIPKCSLLQPKEVLVFDFGSEVYVWHGKEVTLAQRKIAFQLAKHLWNGTFDYENCDINPLDPGECNPLIPRKGQGRPDWAIFGRLTEHNETILFKEKFLDWTELKRSNEKNPGELAQHKEDPRTDVKAYDVTRMVSMPQTTAGTILDGVNVGRGYGLVEGHDRRQFEITSVSVDVWHILEFDYSRLPKQSIGQFHEGDAYVVKWKFMVSTAVGSRQKGEHSVRAAGKEKCVYFFWQGRHSTVSEKGTSALMTVELDEERGAQVQVLQGKEPPCFLQCFQGGMVVHSGRREEEEENVQSEWRLYCVRGEVPVEGNLLEVACHCSSLRSRTSMVVLNVNKALIYLWHGCKAQAHTKEVGRTAANKIKEQCPLEAGLHSSSKVTIHECDEGSEPLGFWDALGRRDRKAYDCMLQDPGSFNFAPRLFILSSSSGDFAATEFVYPARAPSVVSSMPFLQEDLYSAPQPALFLVDNHHEVYLWQGWWPIENKITGSARIRWASDRKSAMETVLQYCKGKNLKKPAPKSYLIHAGLEPLTFTNMFPSWEHREDIAEITEMDTEVSNQITLVEDVLAKLCKTIYPLADLLARPLPEGVDPLKLEIYLTDEDFEFALDMTRDEYNALPAWKQVNLKKAKGLF

SEQ ID NO: 8580 - protein, 766 aa, Homo sapiens
MKRKFSLRAAEFGEPTSEQTGTAAGKTIAQTTAPVSWKPQDSSEQPQEKLCKNPCAMFAAGEIKTPTGEGLLDSPSKTMSIKERLALLKKSGEEDWRNRLSRRQEGGKAPASSLHTQEAGRSLIKKRVTESRESQMTIEERKQLITVREEAWKTRGRGAANDSTQFTVAGRMVKKGLASPTAITPVASPICGKTRGTTPVSKPLEDIEARPDMQLESDLKLDRLETFLRRLNNKVGGMHETVLTVTGKSVKEVMKPDDDETFAKFYRSVDYNMPRSPVEMDEDFDVIFDPYAPKLTSSVAEHKRAVRPKRRVQASKNPLKMLAAREDLLQEYTEQRLNVAFMESKRMKVEKMSSNSNFSEVTLAGLASKENFSNVSLRSVNLTEQNSNNSAVPYKRLMLLQIKGRRHVQTRLVEPRASALNSGDCFLLLSPHCCFLWVGEFANVIEKAKASELATLIQTKRELGCRATYIQTIEEGINTHTHAAKDFWKLLGGQTSYQSAGDPKEDELYEAAIIETNCIYRLMDDKLVPDDDYWGKIPKCSLLQPKEVLVFDFGSEVYVWHGKEVTLAQRKIAFQLAKHLWNGTFDYENCDINPLDPGECNPLIPRKGQGRPDWAIFGRLTEHNETILFKEKFLDWTELKRSNEKNPGELAQHKEDPRTDVKAYDVTRMVSMPQTTAGTILDGVNVGRGYGLVEGHDRRQFEITSVSVDVWHILEFDYSRLPKQSIGQFHEGDAYVVKWKFMVSTAVLRAWRGARGREFAGSGLSL

SEQ ID NO: 8581 - protein, 585 aa, Homo sapiens
MNSSDVSSLKHPSSLASPTAITPVASPICGKTRGTTPVSKPLEDIEARPDMQLESDLKLDRLETFLRRLNNKVGGMHETVLTVTGKSVKEVMKPDDDETFAKFYRSVDYNMPRSPVEMDEDFDVIFDPYAPKLTSSVAEHKRAVRPKRRVQASKNPLKMLAAREDLLQEYTEQRLNVAFMESKRMKVEKMSSNSNFSEVTLAGLASKENFSNVSLRSVNLTEQNSNNSAVPYKRLMLLQIKGRRHVQTRLVEPRASALNSGDCFLLLSPHCCFLWVGEFANVIEKAKASELATLIQTKRELGCRATYIQTIEEGINTHTHAAKDFWKLLGGQTSYQSAGDPKEDELYEAAIIETNCIYRLMDDKLVPDDDYWGKIPKCSLLQPKEVLVFDFGSEVYVWHGKEVTLAQRKIAFQLAKHLWNGTFDYENCDINPLDPGECNPLIPRKGQGRPDWAIFGRLTEHNETILFKEKFLDWTELKRSNEKNPGELAQHKEDPRTDVKAYDVTRMVSMPQTTAGTILDGVNVGRGYGLVEGHDRRQFEITSVSVDVWHILEFDYSRLPKQSIGQFHEGDAYVVKWKFMVSTAG

SEQ ID NO: 8582 - protein, 211 aa, Homo sapiens
MVAHNQVAADNAVSTAAEPRRRPEPSSSSSSSPAAPARPRPCPAVPAPAPGDTHFRTFRSHADYRRITRASALLDACGFYWGPLSVHGAHERLRAEPVGTFLVRDSRQRNCFFALSVKMASGPTSIRVHFQAGRFHLDGSRESFDCLFELLEHYVAAPRRMLGAPLRQRRVRPLQELCRQRIVATVGRENLARIPLNPVLRDYLSSFPFQI

SEQ ID NO: 8583 - protein, 225 aa, Homo sapiens
MVTHSKFPAAGMSRPLDTSLRLKTFSSKSEYQLVVNAVRKLQESGFYWSAVTGGEANLLLSAEPAGTFLIRDSSDQRHFFTLSVKTQSGTKNLRIQCEGGSFSLQSDPRSTQPVPRFDCVLKLVHHYMPPPGAPSFPSPPTEPSSEVPEQPSAQPLPGSPPRRAYYIYSGGEKIPLVLSRPLSSNVATLQHLCRKTVNGHLDSYEKVTQLPGPIREFLDQYDAPL

SEQ ID NO: 8584 - protein, 433 aa, Homo sapiens
MAELRPSGAPGPTAPPAPGPTAPPAFASLFPPGLHAIYGECRRLYPDQPNPLQVTAIVKYWLGGPDPLDYVSMYRNVGSPSANIPEHWHYISFGLSDLYGDNRVHEFTGTDGPSGFGFELTFRLKRETGESAPPTWPAELMQGLARYVFQSENTFCSGDHVSWHSPLDNSESRIQHMLLTEDPQMQPVQTPFGVVTFLQIVGVCTEELHSAQQWNGQGILELLRTVPIAGGPWLITDMRRGETIFEIDPHLQERVDKGIETDGSNLSGVSAKCAWDDLSRPPEDDEDSRSICIGTQPRRLSGKDTEQIRETLRRGLEINSKPVLPPINPQRQNGLAHDRAPSRKDSLESDSSTAIIPHELIRTRQLESVHLKFNQESGALIPLCLRGRLLHGRHFTYKSITGDMAITFVSTGVEGAFATEEHPYAAHGPWLQL

SEQ ID NO: 8585 - protein, 484 aa, Homo sapiens
MAELRPSGAPGPTAPPAPGPTAPPAFASLFPPGLHAIYGECRRLYPDQPNPLQVTAIVKYWLGGPDPLDYVSMYRNVGSPSANIPEHWHYISFGLSDLYGDNRVHEFTGTDGPSGFGFELTFRLKRETGESAPPTWPAELMQGLARYVFQSENTFCSGDHVSWHSPLDNSESRIQHMLLTEDPQMQPVQTPFGVVTFLQIVGVCTEELHSAQQWNGQGILELLRTVPIAGGPWLITDMRRGETIFEIDPHLQERVDKGIETDGSNLSGVSAKCAWDDLSRPPEDDEDSRSICIGTQPRRLSGKDTEQIRETLRRGLEINSKPVLPPINPQRQNGLAHDRAPSRKDSLESDSSTAIIPHELIRTRQLESVHLKFNQESGALIPLCLRGRLLHGRHFTYKSITGDMAITFVSTGVEGAFATEEHPYAAHGPWLQILLTEEFVEKMLEDLEDLTSPEEFKLPKEYSWPEKKLKVSILPDVVFDSPLH

SEQ ID NO: 8586 - protein, 79 aa, Homo sapiens
MARSRLTATSVSQVQENGFVKKLEPKSGWMTFLEVTGKICEMLFCPEAILLTRKDTPYCETGLIFLTLTKTIANTYFYF

SEQ ID NO: 8587 - protein, 79 aa, Homo sapiens; identical to SEQ ID NO: 8586

SEQ ID NO: 8588 - protein, 414 aa, Homo sapiens
MNLQRYWGEIPISSSQTNRSSFDLLPREFRLVEVHDPPLHQPSANKPKPPTMLDIPSEPCSLTIHTIQLIQHNRRLRNLIATAQAQNQQQTEGVKTEESEPLPSCPGSPPLPDDLLPLDCKNPNAPFQIRHSDPESDFYRGKGEPVTELSWHSCRQLLYQAVATILAHAGFDCANESVLETLTDVAHEYCLKFTKLLRFAVDREARLGQTPFPDVMEQVFHEVGIGSVLSLQKFWQHRIKDYHSYMLQISKQLSEEYERIVNPEKATEDAKPVKIKEEPVSDITFPVSEELEADLASGDQSLPMGVLGAQSERFPSNLEVEASPQASSAEVNASPLWNLAHVKMEPQESEEGNVSGHGVLGSDVFEEPMSGMSEAGIPQSPDDSDSSYGSHSTDSLMGSSPVFNQRCKKRMRKI

SEQ ID NO: 8589 - protein, 279 aa, Homo sapiens
MNLQSGKGEPVTELSWHSCRQLLYQAVATILAHAGFDCANESVLETLTDVAHEYCLKFTKLLRFAVDREARLGQTPFPDVMEQVFHEVGIGSVLSLQKFWQHRIKDYHSYMLQISKQLSEEYERIVNPEKATEDAKPVKIKEEPVSDITFPVSEELEADLASGDQSLPMGVLGAQSERFPSNLEVEASPQASSAEVNASPLWNLAHVKMEPQESEEGNVSGHGVLGSDVFEEPMSGMSEAGIPQSPDDSDSSYGSHSTDSLMGSSPVFNQRCKKRMRKI

SEQ ID NO: 8590 - protein, 412 aa, Homo sapiens
MLRYWGEIPISSSQTNRSSFDLLPREFRLVEVHDPPLHQPSANKPKPPTMLDIPSEPCSLTIHTIQLIQHNRRLRNLIATAQAQNQQQTEGVKTEESEPLPSCPGSPPLPDDLLPLDCKNPNAPFQIRHSDPESDFYRGKGEPVTELSWHSCRQLLYQAVATILAHAGFDCANESVLETLTDVAHEYCLKFTKLLRFAVDREARLGQTPFPDVMEQVFHEVGIGSVLSLQKFWQHRIKDYHSYMLQISKQLSEEYERIVNPEKATEDAKPVKIKEEPVSDITFPVSEELEADLASGDQSLPMGVLGAQSERFPSNLEVEASPQASSAEVNASPLWNLAHVKMEPQESEEGNVSGHGVLGSDVFEEPMSGMSEAGIPQSPDDSDSSYGSHSTDSLMGSSPVFNQRCKKRMRKI

SEQ ID NO: 8591 - protein, 412 aa, Homo sapiens; identical to SEQ ID NO: 8590

SEQ ID NO: 8592 - protein, 412 aa, Homo sapiens; identical to SEQ ID NO: 8590

SEQ ID NO: 8593 - protein, 423 aa, Homo sapiens
MVGMSRLRNDRLADPLTGCSVCCKSSWNQLQDLCRLAKLSCPALGISKRNLYDFEVEYLCDYKKIREQEYYLVKWRGYPDSESTWEPRQNLKCVRILKQFHKDLERELLRRHHRSKTPRHLDPSLANYLVQKAKQRRALRRWEQELNAKRSHLGRITVENEVDLDGPPRAFVYINEYRVGEGITLNQVAVGCECQDCLWAPTGGCCPGASLHKFAYNDQGQVRLRAGLPIYECNSRCRCGYDCPNRVVQKGIRYDLCIFRTDDGRGWGVRTLEKIRKNSFVMEYVGEIITSEEAERRGQIYDRQGATYLFDLDYVEDVYTVDAAYYGNISHFVNHSCDPNLQVYNVFIDNLDERLPRIAFFATRTIRAGEELTFDYNMQVDPVDMESTRMDSNFGLAGLPGSPKKRVRIECKCGTESCRKYLF

SEQ ID NO: 8594 - protein, 412 aa, Homo sapiens
MAENLKGCSVCCKSSWNQLQDLCRLAKLSCPALGISKRNLYDFEVEYLCDYKKIREQEYYLVKWRGYPDSESTWEPRQNLKCVRILKQFHKDLERELLRRHHRSKTPRHLDPSLANYLVQKAKQRRALRRWEQELNAKRSHLGRITVENEVDLDGPPRAFVYINEYRVGEGITLNQVAVGCECQDCLWAPTGGCCPGASLHKFAYNDQGQVRLRAGLPIYECNSRCRCGYDCPNRVVQKGIRYDLCIFRTDDGRGWGVRTLEKIRKNSFVMEYVGEIITSEEAERRGQIYDRQGATYLFDLDYVEDVYTVDAAYYGNISHFVNHSCDPNLQVYNVFIDNLDERLPRIAFFATRTIRAGEELTFDYNMQVDPVDMESTRMDSNFGLAGLPGSPKKRVRIECKCGTESCRKYLF

SEQ ID NO: 8595 - protein, 215 aa, Homo sapiens
MAWISRLREHLDGPPRAFVYINEYRVGEGITLNQVAVGCECQDCLWAPTGGCCPGASLHKFAYNDQGQVRLRAGLPIYECNSRCRCGYDCPNRVVQKGIRYDLCIFRTDDGRGWGVRTLEKIRKNSFVMDPALLTVCLKLPAFPMGKAWETDLSVTGTLGRGCGRGEDRLQESPFPVPAPSVGCTYKPPPTFRNSFSTSRLSVVGIHGLLRRSKG

SEQ ID NO: 8596 - protein, 409 aa, Homo sapiens
MAENLKGCSVCCKSSWNQLQDLCRLAKLSCPALGISKRNLYDFEVEYVRLQEDPRTGILPGEMAWISRLREHLGATAESQVCAYPQAVPQGLRKGAAPAAPPVKDPPAPGPKLGQLPGAEGQAEAGAPSLGAGAQCQAHLGRITVENEVDLDGPPRAFVYINEYRVGEGITLNQVAVGCECQDCLWAPTGGCCPRHCTSLPTMTRARCGFEPGCPSTSATPAAAAAMTAQIVWYRRVSDMTSASSARMMGVAGASAPWRRFARTASSWSTWERSLPQRRQSGGQIYDRQGATYLFDLDYVEDVYTVDAAYYGNISHFVNHSCDPNLQVYNVFIDNLDERLPSLSLPQEPSGQARSSPLITTCKWTPWTWRAPAWTPTLAWLGSLAPLRSGSVLNASVGLSPAANTSSSP

SEQ ID NO: 8597 - protein, 184 aa, Homo sapiens
MAWISRLREHLGATAESQVCAYPQAVPQGLRKGAAPAAPPVKDPPAPGPKLGQLPGAEGQAEPGCPSTSATPAAAAAMTAQIVWYRRVSDMTSASSARMMGVAGASAPWRRFARTASSWSTWERSLPQRRQSGGARSTTVRAPPTSLTWTTWRTCTPWMPPTMATSPTLSTTVVTPTCRCTTSS

SEQ ID NO: 8598 - protein, 94 aa, Homo sapiens
MRAGFSDFQLIRDQVLFLQDQAQRLTEWLQLSGFENPVSESTTLCLREREKRIPTCVAVCVPSPGTVHTALLHPTTLSQSRSSSEAKMLIIHTA

SEQ ID NO: 8599 - protein, 197 aa, Homo sapiens [sequence omitted]

SEQ ID NO: 8600 - protein, 191 aa, Homo sapiens
MDVGSKEVLMESPPDYSAAPRGRFGIPCCPVHLKRLLIVVVVVVLIVVVIVGALLMGLHMSQKHTEMVLEMSIGAPEAQQRLALSEHLVTTATFSIGSTGLVVYDYQQLLIAYKPAPGTCCYIMKIAPESIPSLEALTRKVHNFQAKPAVPTSKLGQAEGRDAGSAPSGGDPAFLGMAVSTLCGEVPLYYI

SEQ ID NO: 8601 - protein, 385 aa, Homo sapiens
MMMMALSKTFGQKPVKFQLEDDGEFYMIGSEVGNYLRMFRGSLYKRYPSLWRRLATVEERKKIVASSHGKKTKPNTKDHGYTTLATSVTLLKASEVEEILDGNDEKYKAVSISTEPPTYLREQKAKRNSQWVPTLPNSSHHLDAVPCSTTINRNRMGRDKKRTFPLCFDDHDPAVIHENASQPEVLVPIRLDMEIDGQKLRDAFTWNMNEKLMTPEMFSEILCDDLDLNPLTFVPAIASAIRQQIESYPTDSILEDQSDQRVIIKLNIHVGNISLVDQFEWDMSEKENSPEKFALKLCSELGLGGEFVTTIAYSIRGQLSWHQKTYAFSENPLPTVEIAIRNTGDADQWCPLLETLTDAEMEKKIRDQDRNTRRMRRLANTAPAW

SEQ ID NO: 8602 - protein, 376 aa, Homo sapiens
MMMMALSKTFGQKPVKFQLEDDGEFYMIGSEVGNYLRMFRGSLYKRYPSLWRRLATVEERKKIVASSHDHGYTTLATSVTLLKASEVEEILDGNDEKYKAVSISTEPPTYLREQKAKRNSQWVPTLPNSSHHLDAVPCSTTINRNRMGRDKKRTFPLCFDDHDPAVIHENASQPEVLVPIRLDMEIDGQKLRDAFTWNMNEKLMTPEMFSEILCDDLDLNPLTFVPAIASAIRQQIESYPTDSILEDQSDQRVIIKLNIHVGNISLVDQFEWDMSEKENSPEKFALKLCSELGLGGEFVTTIAYSIRGQLSWHQKTYAFSENPLPTVEIAIRNTGDADQWCPLLETLTDAEMEKKIRDQDRNTRRMRRLANTAPAW

SEQ ID NO: 8603 - protein, 26 aa, Homo sapiens
WRRLATVEERKKIVASSHALMTMTQL

SEQ ID NO: 8604 - protein, 2541 aa, Homo sapiens
MVALSLKISIGNVVKTMQFEPSTMVYDACRIIRERIPEAPAGPPSDFGLFLSDDDPKKGIWLEAGKALDYYMLRNGDTMEYRKKQRPLKIRMLDGTVKTIMVDDSKTVTDMLMTICARIGITNHDEYSLVRELMEEKKEEITGTLRKDKTLLRDEKKMEKLKQKLHTDDELNWLDHGRTLREQGVEEHETLLLRRKFFYSDQNVDSRDPVQLNLLYVQARDDILNGSHPVSFDKACEFAGFQCQIQFGPHNEQKHKAGFLDLKDFLPKEYVKQKGERKIFQAHKNCGQMSEIEAKVRYVKLARSLKTYGVSFFLVKEKMKGKNKLVPRLLGITKECVMRVDEKTKEVIQEWNLTNIKRWAASPKSFTLDFGDYQDGYYSVQTTEGEQIAQLIAGYIDIILKKKKSKDHFGLEGDEESTMLEDSVSPKKSTVLQQQYNRVGKVEHGSVALPAIMRSGASGPENFQVGSMPPAQQQITSGQMHRGHMPPLTSAQQALTGTINSSMQAVQAAQATLDDFDTLPPLGQDAASKAWRKNKMDESKHEIHSQVDAITAGTASVVNLTAGDPAETDYTAVGCAVTTISSNLTEMSRGVKLLAALLEDEGGSGRPLLQAAKGLAGAVSELLRSAQPASAEPRQNLLQAAGNVGQASGELLQQIGESDTDPHFQDALMQLAKAVASAAAALVLKAKSVAQRTEDSGLQTQVIAAATQCALSTSQLVACTKVVAPTISSPVCQEQLVEAGRLVAKAVEGCVSASQAATEDGQLLRGVGAAATAVTQALNELLQHVKAHATGAGPAGRYDQATDTILTVTENIFSSMGDAGEMVRQARILAQATSDLVNAIKADAEGESDLENSRKLLSAAKILADATAKMVEAAKGAAAHPDSEEQQQRLREAAEGLRMATNAAAQNAIKKKLVQRLEHAAKQAAASATQTIAAAQHAASTPKASAGPQPLLVQSCKAVAEQIPLLVQGVRGSQAQPDSPSAQLALIAASQSFLQPGGKMVAAAKASVPTIQDQASAMQLSQCAKNLGTALAELRTAAQKAQEACGPLEMDSALSVVQNLEKDLQEVKAAARDGKLKPLPGETMEKCTQDLGNSTKAVSSAIAQLLGEVAQGNENYAGIAARDVAGGLRSLAQAARGVAALTSDPAVQAIVLDTASDVLDKASSLIEEAKKAAGHPGDPESQQRLAQVAKAVTQALNRCVSCLPGQRDVDNALRAVGDASKRLLSDSLPPSTGTFQEAQSRLNEAAAGLNQAATELVQASRGTPQDLARASGRFGQDFSTFLEAGVEMAGQAPSQEDRAQVVSNLKGISMSSSKLLLAAKALSTDPAAPNLKSQLAAAARAVTDSINQLITMCTQQAPGQKECDNALRELETVRELLENPVQPINDMSYFGCLDSVMENSKVLGEAMTGISQNAKNGNLPEFGDAISTASKALCGFTEAAAQAAYLVGVSDPNSQAGQQGLVEPTQFARANQAIQMACQSLGEPGCTQAQVLSAATIVAKHTSALCNSCRLASARTTNPTAKRQFVQSAKEVANSTANLVKTIKALDGAFTEENRAQCRAATAPLLEAVDNLSAFASNPEFSSIPAQISPEGRAAMEPIVISAKTMLESAGGLIQTARALAVNPRDPPSWSVLAGHSRTVSDSIKKLITSMRDKAPGQLECETAIAALNSCLRDLDQASLAAVSQQLAPREGISQEALHTQMLTAVQEISHLIEPLANAARAEASQLGHKVSQMAQYFEPLTLAAVGAASKTLSHPQQMALLDQTKTLAESALQLLYTAKEAGGNPKQAAHTQEALEEAVQMMTEAVEDLTTTLNEAASAAGVVGGMVDSITQAINQLDEGPMGEPEGSFVDYQTTMVRTAKAIAVTVQEMVTKSNTSPEELGPLANQLTSDYGRLASEAKPAAVAAENEEIGSHIKHRVQELGHGCAALVTKAGALQCSPSDAYTKKELIECARRVSEKVSHVLAALQAGNRGTQACITAASAVSGIIADLDTTIMFATAGTLNREGTETFADHREGILKTAKVLVEDTKVLVQNAAGSQEKLAQAAQSSVATITRLADVVKLGAASLGAEDPETQVVLINAVKDVAKALGDLISATKAAAGKVGDDPAVWQLKNSAKVMVTNVTSLLKTVKAVEDEATKGTRALEATTEHIRQELAVFCSPEPPAKTSTPEDFIRMTKGITMATAKAVAAGNSCRQEDVIATANLSRRAIADMLRACKEAAYHPEVAPDVRLRALHYGRECANGYLELLDHVLLTLQKPSPELKQQLTGHSKRVAGSVTELIQAAEAMKGTEWVDPEDPTVIAENELLGAAAAIEAAAKKLEQLKPRAKPKEADESLNFEEQILEAAKSIAAATSALVKAASAAQRELVAQGKVGAIPANALDDGQWSQGLISAARMVAAATNNLCEAANAAVQGHASQEKLISSAKQVAASTAQLLVACKVKADQDSEAMKRLQAAGNAVKRASDNLVKAAQKAAAFEEQENETVVVKEKMVGGIAQIIAAQEEMLRKERELEEARKKLAQIRQQQYKFLPSELRDEH

SEQ ID NO: 8605 - protein, 2429 aa, Homo sapiens
MVALSLKISIGNVVKTMQFEPSTMVYDACRIIRERIPEAPAGPPSDFGLFLSDDDPKKGIWLEAGKALDYYMLRNGDTMEYRKKQRPLKIRMLDGTVKTIMVDDSKTVTDMLMTICARIGITNHDEYSLVRELMEEKKEEITGTLRKDKTLLRDEKKMEKLKQKLHTDDELNWLDHGRTLREQGVEEHETLLLRRKFFYSDQNVDSRDPVQLNLLYVQARDDILNGSHPVSFDKACEFAGFQCQIQFGPHNEQKHKAGFLDLKDFLPKEYVKQKGERKIFQAHKNCGQMSEIEAKVRYVKLARSLKTYGVSFFLVKEKMKGKNKLVPRLLGITKECVMRVDEKTKEVIQEWNLTNIKRWAASPKSFTLDFGDYQDGYYSVQTTEGEQIAQLIAGYIDIILKKKKSKDHFGLEGDEESTMLEDSVSPKKSTVLQQQYNRVGKVEHGSVALPAIMRSGASGPENFQVGSMPPAQQQITSGQMHRGHMPPLTSAQQALTGTINSSMQAVQAAQATLDDFDTLPPLGQDAASKAWRKNKMDESKHEIHSQVDAITAGTASVVNLTAGDPAETDYTAVGCAVTTISSNLTEMSRGVKLLAALLEDEGGSGRPLLQAAKGLAGAVSELLRSAQPASAEPRQNLLQAAGNVGQASGELLQQIGESDTDPHFQDALMQLAKAVASAAAALVLKAKSVAQRTEDSGLQTQVIAAATQCALSTSQLVACTKVVAPTISSPVCQEQLVEAGRLVAKAVEGCVSASQAATEDGQLLRGVGAAATAVTQALNELLQHVKAHATGAGPAGRYDQATDTILTVTENIFSSMGDAGEMVRQARILAQATSDLVNAIKADAEGESDLENSRKLLSAAKILADATAKMVEAAKGAAAHPDSEEQQQRLREAAEGLRMATNAAAQNAIKKKLVQRLEHAAKQAAASATQTIAAAQHAASTPKASAGPQPLLVQSCKAVAEQIPLLVQGVRGSQAQPDSPSAQLALIAASQSFLQPGGKMVAAAKASVPTIQDQASAMQLSQCAKNLGTALAELRTAAQKAQEACGPLEMDSALSVVQNLEKDLQEVKAAARDGKLKPLPGETMEKCTQDLGNSTKAVSSAIAQLLGEVAQGNENYAGIAARDVAGGLRSLAQAARGVAALTSDPAVQAIVLDTASDVLDKASSLIEEAKKAAGHPGDPESQQRLAQVAKAVTQALNRCVSCLPGQRDVDNALRAVGDASKRLLSDSLPPSTGTFQEAQSRLNEAAAGLNQAATELVQASRGTPQDLARASGRFGQDFSTFLEAGVEMAGQAPSQEDRAQVVSNLKGISMSSSKLLLAAKALSTDPAAPNLKSQLAAAARAVTDSINQLITMCTQQAPGQKECDNALRELETVRELLENPVQPINDMSYFGCLDSVMENSKVLGEAMTGISQNAKNGNLPEFGDAISTASKALCGFTEAAAQAAYLVGVSDPNSQAGQQGLVEPTQFARANQAIQMACQSLGEPGCTQAQVLSAATIVAKHTSALCNSCRLASARTTNPTAKRQFVQSAKEVANSTANLVKTIKALDGAFTEENRAQCRAATAPLLEAVDNLSAFASNPEFSSIPAQISPEGRAAMEPIVISAKTMLESAGGLIQTARALAVNPRDPPSWSVLAGHSRTVSDSIKKLITSMRDKAPGQLECETAIAALNSCLRDLDQASLAAVSQQLAPLQEISHLIEPLANAARAEASQLGHKVSQMAQYFEPLTLAAVGAASKTLSHPQQMALLDQTKTLAESALQLLYTAKEAGGNPKLDEGPMGEPEGSFVDYQTTMVRTAKAIAVTVQEMIGSHIKHRVQELGHGCAALVTKAGALQCSPSDAYTKKELIECARRVSEKVSHVLAALQAGNRGTQACITAASAVSGIIADLDTTIMFATAGTLNREGTETFADHREGILKTAKVLVEDTKVLVQNAAGSQEKLAQAAQSSVATITRLADVVKLGAASLGAEDPETQVVLINAVKDVAKALGDLISATKAAAGKVGDDPAVWQLKNSAKVMVTNVTSLLKTVKAVEDEATKGTRALEATTEHIRQELAPPAKTSTPEDFIRMTKGITMATAKAVAAGNSCRQEDVIATANLSRRAIADMLRACKEAAYHPEVAPDVRLRALHYGRECANGYLELLDHVLLTLQKPSPELKQQLTGHSKRVAGSVTELIQAAEAMKGTEWVDPEDPTVIAENELLGAAAAIEAAAKKLEQLKPRAKPKEADESLNFEEQILEAAKSIAAATSALVKAASAAQRELVAQGKVGAIPANALDDGQWSQGLISAARMVAAATNNLCEAANAAVQGHASQEKLISSAKQVAASTAQLLVACKVKADQDSEAMKRLQAAGNAVKRASDNLVKAAQKAAAFEEQENETVVVKEKMVGGIAQIIAAQEEMLRKERELEEARKKLAQIRQQQYKFLPSELRDEH

SEQ ID NO: 8606 - protein, 1327 aa, Homo sapiens
MAASRRSQHHHHHHQQQLQPAPGASAPPPPPPPPLSPGLAPGTTPASPTASGLAPFASPRHGLALPEGDGSRDPPDRPRSPDPVDGTSCCSTTSTICTVAAAPVVPAVSTSSAAGVAPNPAGSGSNNSPSSSSSPTSSSSSSPSSPGSSLAESPEAAGVSSTAPLGPGAAGPGTGVPAVSGALRELLEACRNGDVSRVKRLVDAANVNAKDMAGRKSSPLHFAAGFGRKDVVEHLLQMGANVHARDDGGLIPLHNACSFGHAEVVSLLLCQGADPNARDNWNYTPLHEAAIKGKIDVCIVLLQHGADPNIRNTDGKSALDLADPSAKAVLTGEYKKDELLEAARSGNEEKLMALLTPLNVNCHASDGRKSTPLHLAAGYNRVRIVQLLLQHGADVHAKDKGGLVPLHNACSYGHYEVTELLLKHGACVNAMDLWQFTPLHEAASKNRVEVCSLLLSHGADPTLVNCHGKSAVDMAPTPELRERLTYEFKGHSLLQAAREADLAKVKKTLALEIINFKQPQSHETALHCAVASLHPKRKQVTELLLRKGANVNEKNKDFMTPLHVAAERAHNDVMEVLHKHGAKMNALDTLGQTALHRAALAGHLQTCRLLLSYGSDPSIISLQGFTAAQMGNEAVQQILSESTPIRTSDVDYRLLEASKAGDLETVKQLCSSQNVNCRDLEGRHSTPLHFAAGYNRVSVVEYLLHHGADVHAKDKGGLVPLHNACSYGHYEVAELLVRHGASVNVADLWKFTPLHEAAAKGKYEICKLLLKHGADPTKKNRDGNTPLDLVKEGDTDIQDLLRGDAALLDAAKKGCLARVQKLCTPENINCRDTQGRNSTPLHLAAGYNNLEVAEYLLEHGADVNAQDKGGLIPLHNAASYGHVDIAALLIKYNTCVNATDKWAFTPLHEAAQKGRTQLCALLLAHGADPTMKNQEGQTPLDLATADDIRALLIDAMPPEALPTCFKPQATVVSASLISPASTPSCLSAASSIDNLTGPLAELAVGGASNAGDGAAGTERKEGEVAGLDMNISQFLKSLGLEHLRDIFETEQITLDVLADMGHEELKEIGINAYGHRHKLIKGVERLLGGQQGTNPYLTFHCVNQGTILLDLAPEDKEYQSVEEEMQSTIREHRDGGNAGGIFNRYNVIRIQKVVNKKLRERFCHRQKEVSEENHNHHNERMLFHGSPFINAIIHKGFDERHAYIGGMFGAGIYFAENSSKSNQYVYGIGGGTGCPTHKDRSCYICHRQMLFCRVTLGKSFLQFSTMKMAHAPPGHHSVIGRPSVNGLAYAEYVIYRGEQAYPEYLITYQIMKPEAPSQTATAAEQKT

SEQ ID NO: 8607 - protein, 1166 aa, Homo sapiens
MSGRRCAGGGAACASAAAEAVEPAARELFEACRNGDVERVKRLVTPEKVNSRDTAGRKSTPLHFAAGFGRKDVVEYLLQNGANVQARDDGGLIPLHNACSFGHAEVVNLLLRHGADPNARDNWNYTPLHEAAIKGKIDVCIVLLQHGAEPTIRNTDGRTALDLADPSAKAVLTGEYKKDELLESARSGNEEKMMALLTPLNVNCHASDGRKSTPLHLAAGYNRVKIVQLLLQHGADVHAKDKGDLVPLHNACSYGHYEVTELLVKHGACVNAMDLWQFTPLHEAASKNRVEVCSLLLSYGADPTLLNCHNKSAIDLAPTPQLKERLAYEFKGHSLLQAAREADVTRIKKHLSLEMVNFKHPQTHETALHCAAASPYPKRKQICELLLRKGANINEKTKEFLTPLHVASEKAHNDVVEVVVKHEAKVNALDNLGQTSLHRAAYCGHLQTCRLLLSYGCDPNIISLQGFTALQMGNENVQQLLQEGISLGNSEADRQLLEAAKAGDVETVKKLCTVQSVNCRDIEGRQSTPLHFAAGYNRVSVVEYLLQHGADVHAKDKGGLVPLHNACSYGHYEVAELLVKHGAVVNVADLWKFTPLHEAAAKGKYEICKLLLQHGADPTKKNRDGNTPLDLVKDGDTDIQDLLRGDAALLDAAKKGCLARVKKLSSPDNVNCRDTQGRHSTPLHLAAGYNNLEVAEYLLQHGADVNAQDKGGLIPLHNAASYGHVDVAALLIKYNACVNATDKWAFTPLHEAAQKGRTQLCALLLAHGADPTLKNQEGQTPLDLVSADDVSALLTAAMPPSALPSCYKPQVLNGVRSPGATADALSSGPSSPSSLSAASSLDNLSGSFSELSSVVSSSGTEGASSLEKKEVPGVDFSITQFVRNLGLEHLMDIFEREQITLDVLVEMGHKELKEIGINAYGHRHKLIKGVERLISGQQGLNPYLTLNTSGSGTILIDLSPDDKEFQSVEEEMQSTVREHRDGGHAGGIFNRYNILKIQKVCNKKLWERYTHRRKEVSEENHNHANERMLFHGSPFVNAIIHKGFDERHAYIGGMFGAGIYFAENSSKSNQYVYGIGGGTGCPVHKDRSCYICHRQLLFCRVTLGKSFLQFSAMKMAHSPPGHHSVTGRPSVNGLALAEYVIYRGEQAYPEYLITYQIMRPEGMVDG

SEQ ID NO: 8608 - protein, 712 aa, Homo sapiens
MREPALAASAMAYHPFHAPRPADFPMSAFLAAAQPSFFPALALPPGALAKPLPDPGLAGAAAAAAAAAAAAEAGLHVSALGPHPPAAHLRSLKSLEPEDEVEDDPKVTLEAKELWDQFHKLGTEMVITKSGRRMFPPFKVRVSGLDKKAKYILLMDIVAADDCRYKFHNSRWMVAGKADPEMPKRMYIHPDSPATGEQWMAKPVAFHKLKLTNNISDKHGFTILNSMHKYQPRFHIVRANDILKLPYSTFRTYVFPETDFIAVTAYQNDKITQLKIDNNPFAKGFRDTGNGRREKRKQLTLPSLRLYEEHCKPERDGAESDASSCDPPPAREPPTSPGAAPSPLRLHRARAEEKSCAADSDPEPERLSEERAGAPLGRSPAPDSASPTRLTEPERARERRSPERGKEPAESGGDGPFGLRSLEKERAEARRKDEGRKEAAEGKEQGLAPLVVQTDSASPLGAGHLPGLAFSSHLHGQQFFGPLGAGQPLFLHPGQFTMGPGAFSAMGMGHLLASVAGGGNGGGGGPGTAAGLDAGGLGPAASAASTAAPFPFHLSQHMLASQGIPMPTFGGLFPYPYTYMAAAAAAASALPATSAAAAAAAAAGSLSRSPFLGSARPRLRFSPYQIPVTIPPSTSLLTTGLASEGSKAAGGNSREPSPLPELALRKVGAPSRGALSPSGSAKEAANELQSIQRLVSGLESQRALSPGRESPK

SEQ ID NO: 8609 - protein, 326 aa, Homo sapiens
MSAFLAAAQPSFFPALALPPGALAKPLPDPGLAGAAAAAAAAAAAAEAGLHVSALGPHPPAAHLRSLKSLEPEDEVEDDPKVTLEAKELWDQFHKLGTEMVITKSGRRMFPPFKVRVSGLDKKAKYILLMDIVAADDCRYKFHNSRWMVAGKADPEMPKRMYIHPDSPATGEQWMAKPVAFHKLKLTNNISDKHGFTILNSMHKYQPRFHIVRANDILKLPYSTFRTYVFPETDFIAVTAYQNDKITQLKIDNNPFAKGFRDTGNGRREKRKQLTLPSLRLYEEHCKPERDGAESDASSCDPPPAREPPTSPGAAPSPLRLHRARG

SEQ ID NO: 8610 - protein, 331 aa, Homo sapiens
MTERPPSEAARSDPQLEGRDAAEASMAPPHLVLLNGVAKETSRAAAAEPPVIELGARGGPGGGPAGGGGAARDLKGRDAATAEARHRVPTTELCRPPGPAPAPAPASVTAELPGDGRMVQLSPPALAAPAAPGRALLYSLSQPLASLGSGFFGEPDAFPMFTTNNRVKRRPSPYEMEITDGPHTKVVRRIFTNSRERWRQQNVNGAFAELRKLIPTHPPDKKLSKNEILRLAMKYINFLAKLLNDQEEEGTQRAKTGKDPVVGAGGGGGGGGGGAPPDDLLQDVLSPNSSCGSSLDGAASPDSYTEEPAPKHTARSLHPAMLPAADGAGPR

SEQ ID NO: 8611 - protein, 333 aa, Homo sapiens
MTERPPSEAARSDPQLEGRDAAEASMAPPHLVLLNGVAKETSRAAAAEPPVIELGARGGPGGGPAGGGGAARDLKGRDAATAEARHRVPTTELCRPPGPAPAPAPASVTAELPGDGRMVQLSPPALAAPAAPGRALLYSLSQPLASLGSHSGFFGEPDAFPMFTTNNRVKRRPSPYEMEITDGPHTKVVRRIFTNSRERWRQQNVNGAFAELRKLIPTHPPDKKLSKNEILRLAMKYINFLAKLLNDQEEEGTQRAKTGKDPVVGAGGGGGGGGGGAPPDDLLQDVLSPNSSCGSSLDGAASPDSYTEEPAPKHTARSLHPAMLPAADGAGPR

SEQ ID NO: 8612 - protein, 331 aa, Homo sapiens; identical to SEQ ID NO: 8610

SEQ ID NO: 8613 - protein, 330 aa, Homo sapiens
MEHLGPHHLHPGHAEPISFGIDQILNSPDQGGCMGPASRLQDGEYGLGCLVGGAYTYGGGGSAAATGAGGAGAYGTGGPGGPGGPAGGGGACSMGPLTGSYNVNMALAGGPGPGGGGGSSGGAGALSAAGVIRVPAHRPLAGAVAHPQPLATGLPTVPSVPAMPGVNNLTGLTFPWMESNRRYTKDRFTGHPYQNRTPPKKKKPRTSFTRLQICELEKRFHRQKYLASAERAALAKALKMTDAQVKTWFQNRRTKWRRQTAEEREAERQQANRILLQLQQEAFQKSLAQPLPADPLCVHNSSLFALQNLQPWSDDSTKITSVTSVASACE

SEQ ID NO: 8614 - protein, 257 aa, Homo sapiens
MEHLGPHHLHPGHAEPISFGIDQILNSPDQGGCMGPASRLQDGEYGLGCLVGGAYTYGGGGSAAATGAGGAGAYGTGGPGGPGGPAGGGGACSMGPLTGSYNVNMALAGGPGPGGGGGSSGGAGALSAAGVIRVPAHRPLAGAVAHPQPLATGLPTVPSVPAMPGVNNLTGLTFPWMESNRRYTKDRFTGHPYQNRTPPKKKKPRTSFTRLQICELEKRFHRQKYLASAERAALAKALKMTDAQVKTWFQNRRTKWR

SEQ ID NO: 8615 - protein, 114 aa, Homo sapiens
MAECPTLGEAVTDHPDRLWAWEKFVYLDEKQHAWLPLTIEIKDRLQLRVLLRREDVVLGRPMTPTQIGPSLLPIMWQLYPDGRYRSSDSSFWRLVYHIKIDGVEDMLLELLPDD

SEQ ID NO: 8616 - protein, 114 aa, Homo sapiens; identical to SEQ ID NO: 8615

SEQ ID NO: 8617 - protein, 114 aa, Homo sapiens; identical to SEQ ID NO: 8615

SEQ ID NO: 8618 - protein, 114 aa, Homo sapiens; identical to SEQ ID NO: 8615

SEQ ID NO: 8619 - protein, 468 aa, Homo sapiens
MDSLASLVLCGVSLLLSGTVEGAMDLILINSLPLVSDAETSLTCIASGWRPHEPITIGRDFEALMNQHQDPLEVTQDVTREWAKKVVWKREKASKINGAYFCEGRVRGEAIRIRTMKMRQQASFLPATLTMTVDKGDNVNISFKKVLIKEEDAVIYKNGSFIHSVPRHEVPDILEVHLPHAQPQDAGVYSARYIGGNLFTSAFTRLIVRRCEAQKWGPECNHLCTACMNNGVCHEDTGECICPPGFMGRTCEKACELHTFGRTCKERCSGQEGCKSYVFCLPDPYGCSCATGWKGLQCNEGIQRMTPKIVDLPDHIEVNSGKFNPICKASGWPLPTNEEMTLVKPDGTVLHPKDFNHTDHFSVAIFTIHRILPPDSGVWVCSVNTVAGMVEKPFNISVKVLPKPLNAPNVIDTGHNFAVINISSEPYFGDGPIKSKKLLYKPVNHYEAWQHIQVSMEKQRLTKANSDI

SEQ ID NO: 8620 - protein, 1124 aa, Homo sapiens
MDSLASLVLCGVSLLLSGTVEGAMDLILINSLPLVSDAETSLTCIASGWRPHEPITIGRDFEALMNQHQDPLEVTQDVTREWAKKVVWKREKASKINGAYFCEGRVRGEAIRIRTMKMRQQASFLPATLTMTVDKGDNVNISFKKVLIKEEDAVIYKNGSFIHSVPRHEVPDILEVHLPHAQPQDAGVYSARYIGGNLFTSAFTRLIVRRCEAQKWGPECNHLCTACMNNGVCHEDTGECICPPGFMGRTCEKACELHTFGRTCKERCSGQEGCKSYVFCLPDPYGCSCATGWKGLQCNEACHPGFYGPDCKLRCSCNNGEMCDRFQGCLCSPGWQGLQCEREGIQRMTPKIVDLPDHIEVNSGKFNPICKASGWPLPTNEEMTLVKPDGTVLHPKDFNHTDHFSVAIFTIHRILPPDSGVWVCSVNTVAGMVEKPFNISVKVLPKPLNAPNVIDTGHNFAVINISSEPYFGDGPIKSKKLLYKPVNHYEAWQHIQVTNEIVTLNYLEPRTEYELCVQLVRRGEGGEGHPGPVRRFTTASIGLPPPRGLNLLPKSQTTLNLTWQPIFPSSEDDFYVEVERRSVQKSDQQNIKVPGNLTSVLLNNLHPREQYVVRARVNTKAQGEWSEDLTAWTLSDILPPQPENIKISNITHSSAVISWTILDGYSISSITIRYKVQGKNEDQHVDVKIKNATITQYQLKGLEPETAYQVDIFAENNIGSSNPAFSHELVTLPESQAPADLGGGKMLLIAILGSAGMTCLTVLLAFLIILQLKRANVQRRMAQAFQNVREEPAVQFNSGTLALNRKVKNNPDPTIYPVLDWNDIKFQDVIGEGNFGQVLKARIKKDGLRMDAAIKRMKEYASKDDHRDFAGELEVLCKLGHHPNIINLLGACEHRGYLYLAIEYAPHGNLLDFLRKSRVLETDPAFAIANSTASTLSSQQLLHFAADVARGMDYLSQKQFIHRDLAARNILVGENYVAKIADFGLSRGQEVYVKKTMGRLPVRWMAIESLNYSVYTTNSDVWSYGVLLWEIVSLGGTPYCGMTCAELYEKLPQGYRLEKPLNCDDEVYDLMRQCWREKPYERPSFAQILVSLNRMLEERKTYVNTTLYEKFTYAGIDCSAEEAA

SEQ ID NO: 8621 - protein, 1081 aa, Homo sapiens
MDSLASLVLCGVSLLLSGTVEGAMDLILINSLPLVSDAETSLTCIASGWRPHEPITIGRDFEALMNQHQDPLEVTQDVTREWAKKVVWKREKASKINGAYFCEGRVRGEAIRIRTMKMRQQASFLPATLTMTVDKGDNVNISFKKVLIKEEDAVIYKNGSFIHSVPRHEVPDILEVHLPHAQPQDAGVYSARYIGGNLFTSAFTRLIVRRCEAQKWGPECNHLCTACMNNGVCHEDTGECICPPGFMGRTCEKACELHTFGRTCKERCSGQEGCKSYVFCLPDPYGCSCATGWKGLQCNEGIQRMTPKIVDLPDHIEVNSGKFNPICKASGWPLPTNEEMTLVKPDGTVLHPKDFNHTDHFSVAIFTIHRILPPDSGVWVCSVNTVAGMVEKPFNISVKVLPKPLNAPNVIDTGHNFAVINISSEPYFGDGPIKSKKLLYKPVNHYEAWQHIQVTNEIVTLNYLEPRTEYELCVQLVRRGEGGEGHPGPVRRFTTASIGLPPPRGLNLLPKSQTTLNLTWQPIFPSSEDDFYVEVERRSVQKSDQQNIKVPGNLTSVLLNNLHPREQYVVRARVNTKAQGEWSEDLTAWTLSDILPPQPENIKISNITHSSAVISWTILDGYSISSITIRYKVQGKNEDQHVDVKIKNATITQYQLKGLEPETAYQVDIFAENNIGSSNPAFSHELVTLPESQAPADLGGGKMLLIAILGSAGMTCLTVLLAFLIILQLKRANVQRRMAQAFQNVREEPAVQFNSGTLALNRKVKNNPDPTIYPVLDWNDIKFQDVIGEGNFGQVLKARIKKDGLRMDAAIKRMKEYASKDDHRDFAGELEVLCKLGHHPNIINLLGACEHRGYLYLAIEYAPHGNLLDFLRKSRVLETDPAFAIANSTASTLSSQQLLHFAADVARGMDYLSQKQFIHRDLAARNILVGENYVAKIADFGLSRGQEVYVKKTMGRLPVRWMAIESLNYSVYTTNSDVWSYGVLLWEIVSLGGTPYCGMTCAELYEKLPQGYRLEKPLNCDDEVYDLMRQCWREKPYERPSFAQILVSLNRMLEERKTYVNTTLYEKFTYAGIDCSAEEAA

SEQ ID NO: 8622 - protein, 1124 aa, Homo sapiens; identical to SEQ ID NO: 8620

SEQ ID NO: 8623 - protein, 976 aa, Homo sapiens
MDSLASLVLCGVSLLLSASFLPATLTMTVDKGDNVNISFKKVLIKEEDAVIYKNGSFIHSVPRHEVPDILEVHLPHAQPQDAGVYSARYIGGNLFTSAFTRLIVRRCEAQKWGPECNHLCTACMNNGVCHEDTGECICPPGFMGRTCEKACELHTFGRTCKERCSGQEGCKSYVFCLPDPYGCSCATGWKGLQCNEGIQRMTPKIVDLPDHIEVNSGKFNPICKASGWPLPTNEEMTLVKPDGTVLHPKDFNHTDHFSVAIFTIHRILPPDSGVWVCSVNTVAGMVEKPFNISVKVLPKPLNAPNVIDTGHNFAVINISSEPYFGDGPIKSKKLLYKPVNHYEAWQHIQVTNEIVTLNYLEPRTEYELCVQLVRRGEGGEGHPGPVRRFTTASIGLPPPRGLNLLPKSQTTLNLTWQPIFPSSEDDFYVEVERRSVQKSDQQNIKVPGNLTSVLLNNLHPREQYVVRARVNTKAQGEWSEDLTAWTLSDILPPQPENIKISNITHSSAVISWTILDGYSISSITIRYKVQGKNEDQHVDVKIKNATITQYQLKGLEPETAYQVDIFAENNIGSSNPAFSHELVTLPESQAPADLGGGKMLLIAILGSAGMTCLTVLLAFLIILQLKRANVQRRMAQAFQNREEPAVQFNSGTLALNRKVKNNPDPTIYPVLDWNDIKFQDVIGEGNFGQVLKARIKKDGLRMDAAIKRMKEYASKDDHRDFAGELEVLCKLGHHPNIINLLGACEHRGYLYLAIEYAPHGNLLDFLRKSRVLETDPAFAIANSTASTLSSQQLLHFAADVARGMDYLSQKQFIHRDLAARNILVGENYVAKIADFGLSRGQEVYVKKTMGRLPVRWMAIESLNYSVYTTNSDVWSYGVLLWEIVSLGGTPYCGMTCAELYEKLPQGYRLEKPLNCDDEVYDLMRQCWREKPYERPSFAQILVSLNRMLEERKTYVNTTLYEKFTYAGIDCSAEEAA

SEQ ID NO: 8624 - protein, 2627 aa, Homo sapiens
MEKLHGHVSAHPDILSLENRCLAMLPDLQPLEKLHQHVSTHSDILSLKNQCLATLPDLKTMEKPHGYVSAHPDILSLENQCLATLSDLKTMEKPHGHVSAHPDILSLENRCLATLSSLKSTVSASPLFQSLQISHMTQADLYRVNNSNCLLSEPPSWRAQHFSKGLDLSTCPIALKSISATETAQEATLGRWFDSEEKKGAETQMPSYSLSLGEEEEVEDLAVKLTSGDSESHPEPTDHVLQEKKMALLSLLCSTLVSEVNMNNTSDPTLAAIFEICRELALLEPEFILKASLYARQQLNVRNVANNILAIAAFLPACRPHLRRYFCAIVQLPSDWIQVAELYQSLAEGDKNKLVPLPACLRTAMTDKFAQFDEYQLAKYNPRKHRAKRHPRRPPRSPGMEPPFSHRCFPRYIGFLREEQRKFEKAGDTVSEKKNPPRFTLKKLVQRLHIHKPAQHVQALLGYRYPSNLQLFSRSRLPGPWDSSRAGKRMKLSRPETWERELSLRGNKASVWEELIENGKLPFMAMLRNLCNLLRVGISSRHHELILQRLQHAKSVIHSRQFPFRFLNAHDAIDALEAQLRNQALPFPSNITLMRRILTRNEKNRPRRRFLCHLSRQQLRMAMRIPVLYEQLKREKLRVHKARQWKYDGEMLNRYRQALETAVNLSVKHSLPLLPGRTVLVYLTDANADRLCPKSNPQGPPLNYALLLIGMMITRAEQVDVVLCGGDTLKTAVLKAEEGILKTAIKLQAQVQEFDENDGWSLNTFGKYLLSLAGQRVPVDRVILLGQSMDDGMINVAKQLYWQRVNSKCLFVGILLRRVQYLSTDLNPNDVTLSGCTDAILKFIAEHGASHLLEHVGQMDKIFKIPPPPGKTGVQSLRPLEEDTPSPLAPVSQQGWRSIRLFISSTFRDMHGERDLLLRSVLPALQARAAPHRISLHGIDLRWGVTEEETRRNRQLEVCLGEVENAQLFVGILGSRYGYIPPSYNLPDHPHFHWAQQYPSGRSVTEMEVMQFLNRNQRLQPSAQALIYFRDSSFLSSVPDAWKSDFVSESEEAARRISELKSYLSRQKGITCRRYPCEWGGVAAGRPYVGGLEEFGQLVLQDVWNMIQKLYLQPGALLEQPVSIPDDDLVQATFQQLQKPPSPARPRLLQDTVQRLMLPHGRLSLVTGQSGQGKTAFLASLVSALQAPDGAKVASLVFFHFSGARPDQGLALTLLRRLCTYLRGQLKEPGALPSTYRSLVWELQQRLLPKSAESLHPGQTQVLIIDGADRLVDQNGQLISDWIPKKLPRCVHLVLSVSSDAGLGETLEQSQGAHVLALGPLEASARARLVREELALYGKRLEESPFNNQMRLLLVKRESGRPLYLRLVTDHLRLFTLYEQVSERLRTLPATVPLLLQHILSTLEKEHGPDVLPQALTALEVTRSGLTVDQLHGVLSVWRTLPKGTKSWEEAVAAGNSGDPYPMGPFACLVQSLRSLLGEGPLERPGARLCLPDGPLRTAAKRCYGKRPGLEDTAHILIAAQLWKTCDADASGTFRSCPPEALGDLPYHLLQSGNRGLLSKFLTNLHVVAAHLELGLVSRLLEAHALYASSVPKEEQKLPEADVAVFRTFLRQQASILSQYPRLLPQQAANQPLDSPLCHQASLLSRRWHLQHTLRWLNKPRTMKNQQSSSLSLAVSSSPTAVAFSTNGQRAAVGTANGTVYLLDLRTWQEEKSVVSGCDGISACLFLSDDTLFLTAFDGLLELWDLQHGCRVLQTKAHQYQITGCCLSPDCRLLATVCLGGCLKLWDTVRGQLAFQHTYPKSLNCVAFHPEGQVIATGSWAGSISFFQVDGLKVTKDLGAPGASIRTLAFNVPGGVVAVGRLDSMVELWAWREGARLAAFPAHHGFVAAALFLHAGCQLLTAGEDGKVQVWSGSLGRPRGHLGSLSLSPALSVALSPDGDRVAVGYRADGIRIYKISSGSQGAQGQALDVAVSALAWLSPKVLVSGAEDGSLQGWALKECSLQSLWLLSRFQKPVLGLATSQELLASASEDFTVQLWPRQLLTRPHKAEDFPCGTELRGHEGPVSCCSFSTDGGSLATGGRDRSLLCWDVRTPKTPVLIHSFPACHRDWVTGCAWTKDNLLISCSSDGSVGLWDPESGQRLGQFLGHQSAVSAVAAVEEHVVSVSRDGTLKVWDHQGVELTSIPAHSGPISHCAAAMEPRAAGQPGSELLVVTVGLDGATRLWHPLLVCQTHTLLGHSGPVRAAAVSETSGLMLTASEDGSVRLWQVPKEADDTCIPRSSAAVTAVAWAPDGSMAVSGNQAGELILWQEAKAVATAQAPGHIGALIWSSAHTFFVLSADEKISEWQVKLRKGSAPGNLSLHLNRILQEDLGVLTSLDWAPDGHFLILAKADLKLLCMKPGDAPSEIWSSYTENPMILSTHKEYGIFVLQPKDPGVLSFLRQKESGEFEERLNFDINLENPSRTLISITQAKPESESSFLCASSDGILWNLAKCSPEGEWTTGNMWQKKANTPETQTPGTDPSTCRESDASMDSDASMDSEPTPHLKTRQRRKIHSGSVTALHVLPELLVTASKDRDVKLWERPSMQLLGLFRCEGSVSCLEPWLGANSTLQLAVGDVQGNVYFLNWE

SEQ ID NO: 8625 - protein, 2619 aa, Homo sapiens
MEKLHGHVSAHPDILSLENRCLAMLPDLQPLEKLHQHVSTHSDILSLKNQCLATLPDLKTMEKPHGYVSAHPDILSLENQCLATLSDLKTMEKPHGHVSAHPDILSLENRCLATLSSLKSTVSASPLFQSLQISHMTQADLYRVNNSNCLLSEPPSWRAQHFSKGLDLSTCPIALKSISATETAQEATLGRWFDSEEKKGAETQMPSYSLSLGEEEEVEDLAVKLTSGDSESHPEPTDHVLQEKKMALLSLLCSTLVSEVNMNNTSDPTLAAIFEICRELALLEPEFILKASLYARQQLNVRNVANNILAIAAFLPACRPHLRRYFCAIVQLPSDWIQVAELYQSLAEGDKNKLVPLPACLRTAMTDKFAQFDEYQLAKYNPRKHRAKRHPRRPPRSPGMEPPFSHRCFPRYIGFLREEQRKFEKAGDTVSEKKNPPRFTLKKLVQRLHIHKPAQHVQALLGYRYPSNLQLFSRSRLPGPWDSSRAGKRMKLSRPETWERELSLRGNKASVWEELIENGKLPFMAMLRNLCNLLRVGISSRHHELILQRLQHAKSVIHSRQFPFRFLNAHDAIDALEAQLRNQALPFPSNITLMRRILTRNEKNRPRRRFLCHLSRQQLRMAMRIPVLYEQLKREKLRVHKARQWKYDGEMLNRYRQALETAVNLSVKHSLPLLPGRTVLVYLTDANADRLCPKSNPQGPPLNYALLLIGMMITRAEQVDVVLCGGDTLKTAVLKAEEGILKTAIKLQAQVQEFDENDGWSLNTFGKYLLSLAGQRVPVDRVILLGQSMDDGMINVAKQLYWQRVNSKCLFVGILLRRVQYLSTDLNPNDVTLSGCTDAILKFIAEHGASHLLEHVGQMDKIFKIPPPPGKTGVQSLRPLEEDTPSPLAPVSQQGWRSIRLFISSTFRDMHGERDLLLRSVLPALQARAAPHRISLHGIDLRWGVTEEETRRNRQLEVCLGEVENAQLFVGILGSRYGYIPPSYNLPDHPHFHWAQQYPSGRSVTEMEVMQFLNRNQRLQPSAQALIYFRDSSFLSSVPDAWKSDFVSESEEAARRISELKSYLSRQKGITCRRYPCEWGGVAAGRPYVGGLEEFGQLVLQDVWNMIQKLYLQPGALLEQPVSIPDDDLVQATFQQLQKPPSPARPRLLQDTVQRLMLPHGRLSLVTGQSGQGKTAFLASLVSALQAPDGAKVASLVFFHFSGARPDQGLALTLLRRLCTYLRGQLKEPGALPSTYRSLVWELQQRLLPKSAESLHPGQTQVLIIDGADRLVDQNGQLISDWIPKKLPRCVHLVLSVSSDAGLGETLEQSQGAHVLALGPLEASARARLVREELALYGKRLEESPFNNQMRLLLVKRESGRPLYLRLVTDHLRLFTLYEQVSERLRTLPATVPLLLQHILSTLEKEHGPDVLPQALTALEVTRSGLTVDQLHGVLSVWRTLPKGTKSWEEAVAAGNSGDPYPMGPFACLVQSLRSLLGEGPLERPGARLCLPDGPLRTAAKRCYGKRPGLEDTAHILIAAQLWKTCDADASGTFRSCPPEALGDLPYHLLQSGNRGLLSKFLTNLHVVAAHLELGLVSRLLEAHALYASSVPKEEQKLPEADVAVFRTFLRQQASILSQYPRLLPQQAANQPLDSPLCHQASLLSRRWHLQHTLRWLNKPRTMKNQQSSSLSLAVSSSPTAVAFSTNGQRAAVGTANGTVYLLDLRTWQEEKSVVSGCDGISACLFLSDDTLFLTAFDGLLELWDLQHGCRVLQTKAHQYQITGCCLSPDCRLLATVCLGGCLKLWDTVRGQLAFQHTYPKSLNCVAFHPEGQVIATGSWAGSISFFQVDGLKVTKDLGAPGASIRTLAFNVPGGVVAVGRLDSMVELWAWREGARLAAFPAHHGFVAAALFLHAGCQLLTAGEDGKVQVWSGSLGRPRGHLGSLSLSPALSVALSPDGDRVAVGYRADGIRIYKISSGSQGAQGQALDVAVSALAWLSPKVLVSGAEDGSLQGWALKECSLQSLWLLSRFQKPVLGLATSQELLASASEDFTVQLWPRQLLTRPHKAEDFPCGTELRGHEGPVSCCSFSTDGGSLATGGRDRSLLCWDVRTPKTPVLIHSFPACHRDWVTGCAWTKDNLLISCSSDGSVGLWDPESGQRLGQFLGHQSAVSAVAAVEEHVVSVSRDGTLKVWDHQGVELTSIPAHSGPISHCAAAMEPRAAGQPGSELLVVTVGLDGATRLWHPLLVCQTHTLLGHSGPVRAAAVSETSGLMLTASEDGSVRLWQVPKEADDTCIPRSSAAVTAVAWAPDGSMAVSGNQAGELILWQEAKAVATAQAPGHIGALIWSSAHTFFVLSADEKISEWQVKLRKGSAPGNLSLHLNRILQEDLGVLTSLDWAPDGHFLILAKADLKLLCMKPGDAPSEIWSSYTENPMILSTHKEYGIFVLQPKDPGVLSFLRQKESGEFEERLNFDINLENPSRTLISITQAKPESALMGSYGTWPNAAQKENGPQVTCGRKKNTPETQTPGTDPSTCRESDASMDSDASMDSEPTPHLKTRQRRKIHSGSVTALHVLPELLVTASKDRDVKLWERPSMQLLGLFRCEGSVSCLEPWLGANSTLQLAVGDVQGNVYFLNWE

SEQ ID NO: 8626 - protein, 676 aa, Homo sapiens
MKNQQSSSLSLAVSSSPTAVAFSTNGQRAAVGTANGTVYLLDLRTWQEEKSVVSGCDGISACLFLSDDTLFLTAFDGLLELWDLQHGCRVLQTKAHQYQITGCCLSPDCRLLATVCLGGCLKLWDTVRGQLAFQHTYPKSLNCVAFHPEGQVIATGSWAGSISFFQVDGLKVTKDLGAPGASIRTLAFNVPGGVVAVGRLDSMVELWAWREGARLAAFPAHHGFVAAALFLHAGCQLLTAGEDGKVQVWSGSLGRPRGHLGSLSLSPALSVALSPDGDRVAVGYRADGIRIYKISSGSQGAQGQALDVAVSALAWLSPKVLVSGAEDGSLQGWALKECSLQSLWLLSRFQKPVLGLATSQELLASASEDFTVQLWPRQLLTRPHKAEDFPCGTELRGHEGPVSCCSFSTDGGSLATGGRDRSLLCWDVRTPKTPVLIHSFPACHRDWVTGCAWTKDNLLISCSSDGSVGLWDPESGQRLGQFLGHQSAVSAVAAVEEHVVSVSRDGTLKVWDHQGVELTSIPAHSGPISHCAAAMEPRAAGQPGSELLVVTVGLDGATRLWHPLLVCQTHTLLGHSGPVRAAAVSETSGLMLTASEDGSVRLWQVPKEADDTCIPRSSAAVTAVAWAPDGSMAVSGNQAGELILWQEAKAVATAQSSPEPNSTGGLRGADKSGLGS

SEQ ID NO: 8627 - protein, 166 aa, Homo sapiens
MEKLHGHVSAHPDILSLENRCLAMLPDLQPLEKLHQHVSTHSDILSLKNQCLATLPDLKTMEKPHGYVSAHPDILSLENQCLATLSDLKTMEKPHGHVSAHPDILSLENRCLATLSSLKSTVSASPLFQSLQISHMTQADLYRVNNSNCLLSEPPSWRAQHFSKGL

SEQ ID NO: 8628 - protein, 419 aa, Homo sapiens
MAEDVSSAAPSPRGCADGRDADPTEEQMAETERNDEEQFECQELLECQVQVGAPEEEEEEEEDAGLVAEAEAVAAGWMLDFLCLSLCRAFRDGRSEDFRRTRNSAEAIIHGLSSLTACQLRTIYICQFLTRIAAGKTLDAQFENDERITPLESALMIWGSIEKEHDKLHEEIQNLIKIQAIAVCMENGNFKEAEEVFERIFGDPNSHMPFKSKLLMIISQKDTFHSFFQHFSYNHMMEKIKSYVNYVLSEKSSTFLMKAAAKVVESKRTRTITSQDKPSGNDVEMETEANLDTRKRSHKNLFLSKLQHGTQQQDLNKKERRVGTPQSTKKKKESRRATESRIPVSKSQPVTPEKHRARKRQAWLWEEDKNLRSGVRKYGEGNWSKILLHYKFNNRTSVMLKDRWRTMKKLKLISSDSED

SEQ ID NO: 8629 - protein, 439 aa, Homo sapiens
MAEDVSSAAPSPRGCADGRDADPTEEQMAETERNDEEQFECQELLECQVQVGAPEEEEEEEEDAGLVAEAEAVAAGWMLDFLCLSLCRAFRDGRSEDFRRTRNSAEAIIHGLSSLTACQLRTIYICQFLTRIAAGKTLDAQFENDERITPLESALMIWGSIEKEHDKLHEEIQNLIKIQAIAVCMENGNFKEAEEVFERIFGDPNSHMPFKSKLLMIISQKDTFHSFFQHFSYNHMMEKIKSYVNYVLSEKSSTFLMKAAAKVVESKRTRTITSQDKPSGNDVEMETEANLDTRKSVSDKQSAVTESSEGTVSLLRSHKNLFLSKLQHGTQQQDLNKKERRVGTPQSTKKKKESRRATESRIPVSKSQPVTPEKHRARKRQAWLWEEDKNLRSGVRKYGEGNWSKILLHYKFNNRTSVMLKDRWRTMKKLKLISSDSED

SEQ ID NO: 8630 - protein, 50 aa, Homo sapiens
IFSIIHGLSSLTACQLRTIYICQFLTRIAAGKTLDAQFENDERITPLESA

SEQ ID NO: 8631 - protein, 500 aa, Homo sapiens
MAGGGGSSDGSGRAAGRRASRSSGRARRGRHEPGLGGPAERGAGEARLEEAVNRWVLKFYFHEALRAFRGSRYGDFRQIRDIMQALLVRPLGKEHTVSRLLRVMQCLSRIEEGENLDCSFDMEAELTPLESAINVLEMIKTEFTLTEAVVESSRKLVKEAAVIICIKNKEFEKASKILKKHMSKDPTTQKLRNDLLNIIREKNLAHPVIQNFSYETFQQKMLRFLESHLDDAEPYLLTMAKKALKSESAASSTGKEDKQPAPGPVEKPPREPARQLRNPPTTIGMMTLKAAFKTLSGAQDSEAAFAKLDQKDLVLPTQALPASPALKNKRPRKDENESSAPADGEGGSELQPKNKRMTISRLVLEEDSQSTEPSAGLNSSQEAASAPPSKPTVLNQPLPGEKNPKVPKGKWNSSNGVEEKETWVEEDELFQVQAAPDEDSTTNITKKQKWTVEESEWVKAGVQKYGEGNWAAISKNYPFVNRTAVMIKDRWRTMKRLGMN

SEQ ID NO: 8632 - protein, 399 aa, Homo sapiens
MAEAMDLGKDPNGPTHSSTLFVRDDGSSMSFYVRPSPAKRRLSTLILHGGGTVCRVQEPGAVLLAQPGEALAEASGDFISTQYILDCVERNERLELEAYRLGPASAADTGSEAKPGALAEGAAEPEPQRHAGRIAFTDADDVAILTYVKENARSPSSVTGNALWKAMEKSSLTQHSWQSLKDRYLKHLRGQEHKYLLGDAPVSPSSQKLKRKAEEDPEAADSGEPQNKRTPDLPEEEYVKEEIQENEEAVKKMLVEATREFEEVVVDESPPDFEIHITMCDDDPPTPEEDSETQPDEEEEEEEEKVSQPEVGAAIKIIRQLMEKFNLDLSTVTQAFLKNSGELEATSAFLASGQRADGYPIWSRQDDIDLQKDDEDTREALVKKFGAQNVARRIEFRKK

SEQ ID NO: 8633 - protein, 4244 aa, Homo sapiens
MMPAQYALTSSLVLLVLLSTARAGPFSSRSNVTLPAPRPPPQPGGHTVGAGVGSPSSQLYEHTVEGGEKQVVFTHRINLPPSTGCGCPPGTEPPVLASEVQALRVRLEILEELVKGLKEQCTGGCCPASAQAGTGQTDVRTLCSLHGVFDLSRCTCSCEPGWGGPTCSDPTDAEIPPSSPPSASGSCPDDCNDQGRCVRGRCVCFPGYTGPSCGWPSCPGDCQGRGRCVQGVCVCRAGFSGPDCSQRSCPRGCSQRGRCEGGRCVCDPGYTGDDCGMRSCPRGCSQRGRCENGRCVCNPGYTGEDCGVRSCPRGCSQRGRCKDGRCVCDPGYTGEDCGTRSCPWDCGEGGRCVDGRCVCWPGYTGEDCSTRTCPRDCRGRGRCEDGECICDTGYSGDDCGVRSCPGDCNQRGRCEDGRCVCWPGYTGTDCGSRACPRDCRGRGRCENGVCVCNAGYSGEDCGVRSCPGDCRGRGRCESGRCMCWPGYTGRDCGTRACPGDCRGRGRCVDGRCVCNPGFTGEDCGSRRCPGDCRGHGLCEDGVCVCDAGYSGEDCSTRSCPGGCRGRGQCLDGRCVCEDGYSGEDCGVRQCPNDCSQHGVCQDGVCICWEGYVSEDCSIRTCPSNCHGRGRCEEGRCLCDPGYTGPTCATRMCPADCRGRGRCVQGVCLCHVGYGGEDCGQEEPPASACPGGCGPRELCRAGQCVCVEGFRGPDCAIQTCPGDCRGRGECHDGSCVCKDGYAGEDCGEEVPTIEGMRMHLLEETTVRTEWTPAPGPVDAYEIQFIPTTEGASPPFTARVPSSASAYDQRGLAPGQEYQVTVRALRGTSWGLPASKTITTMIDGPQDLRVVAVTPTTLELGWLRPQAEVDRFVVSYVSAGNQRVRLEVPPEADGTLLTDLMPGVEYVVTVTAERGRAVSYPASVRANTGSSPLGLLGTTDEPPPSGPSTTQGAQAPLLQQRPQELGELRVLGRDETGRLRVVWTAQPDTFAYFQLRMRVPEGPGAHEEVLPGDVRQALVPPPPPGTPYELSLHGVPPGGKPSDPIIYQGIMDKDEEKPGKSSGPPRLGELTVTDRTSDSLLLRWTVPEGEFDSFVIQYKDRDGQPQVVPVEGPQRSAVITSLDPGRKYKFVLYGFVGKKRHGPLVAEAKILPQSDPSPGTPPHLGNLWVTDPTPDSLHLSWTVPEGQFDTFMVQYRDRDGRPQVVPVEGPERSFVVSSLDPDHKYRFTLFGIANKKRYGPLTADGTTAPERKEEPPRPEFLEQPLLGELTVTGVTPDSLRLSWTVAQGPFDSFMVQYKDAQGQPQAVPVAGDENEVTVPGLDPDRKYKMNLYGLRGRQRVGPESVVAKTAPQEDVDETPSPTELGTEAPESPEEPLLGELTVTGSSPDSLSLFWTVPQGSFDSFTVQYKDRDGRPRAVRVGGKESEVTVGGLEPGHKYKMHLYGLHEGQRVGPVSAVGVTAPQQEETPPATESPLEPRLGELTVTDVTPNSVGLSWTVPEGQFDSFIVQYKDKDGQPQVVPVAADQREVTVYNLEPERKYKMNMYGLHDGQRMGPLSVVIVTAPLPPAPATEASKPPLEPRLGELTVTDITPDSVGLSWTVPEGEFDSFVVQYKDRDGQPQVVPVAADQREVTIPDLEPSRKYKFLLFGIQDGKRRSPVSVEAKTVARGDASPGAPPRLGELWVTDPTPDSLRLSWTVPEGQFDSFVVQFKDKDGPQVVPVEGHERSVTVTPLDAGRKYRFLLYGLLGKKRHGPLTADGTTEARSAMDDTGTKRPPKPRLGEELQVTTVTQNSVGLSWTVPEGQFDSFVVQYKDRDGQPQVVPVEGSLREVSVPGLDPAHRYKLLLYGLHHGKRVGPISAVAITAGREETETETTAPTPPAPEPHLGELTVEEATSHTLHLSWMVTEGEFDSFEIQYTDRDGQLQMVRIGGDRNDITLSGLESDHRYLVTLYGFSDGKHVGPVHVEALTVPEEEKPSEPPTATPEPPIKPRLGELTVTDATPDSLSLSWTVPEGQFDHFLVQYRNGDGQPKAVRVPGHEEGVTISGLEPDHKYKMNLYGFHGGQRMGPVSVVGVTAAEEETPSPTEPSMEAPEPAEEPLLGELTVTGSSPDSLSLSWTVPQGRFDSFTVQYKDRDGRPQVVRVGGEESEVTVGGLEPGRKYKMHLYGLHEGRRVGPVSAVGVTAPEEESPDAPLAKLRLGQMTVRDITSDSLSLSWTVPEGQFDHFLVQFKNGDGQPKAVRVPGHEDGVTISGLEPDHKYKMNLYGFHGGQRVGPVSAVGLTAPGKDEEMAPASTEPPTPEPPIKPRLEELTVTDATPDSLSLSWTVPEGQFDHFLVQYKNGDGQPKATRVPGHEDRVTISGLEPDNKYKMNLYGFHGGQRVGPVSAIGVTAAEEETPSPTEPSMEAPEPPEEPLLGELTVTGSSPDSLSLSWTVPQGRFDSFTVQYKDRDGRPQVVRVGGEESEVTVGGLEPGRKYKMHLYGLHEGRRVGPVSTVGVTAPQEDVDETPSPTEPGTEAPGPPEEPLLGELTVTGSSPDSLSLSWTVPQGRFDSFTVQYKDRDGRPQAVRVGGQESKVTVRGLEPGRKYKMHLYGLHEGRRLGPVSAVGVTEDEAETTQAVPTMTPEPPIKPRLGELTMTDATPDSLSLSWTVPEGQFDHFLVQYRNGDGQPKAVRVPGHEDGVTISGLEPDHKYKMNLYGFHGGQRVGPISVIGVTAAEEETPSPTELSTEAPEPPEEPLLGELTVTGSSPDSLSLSWTIPQGHFDSFTVQYKDRDGRPQVMRVRGEESEVTVGGLEPGRKYKMHLYGLHEGRRVGPVSTVGVTAPEDEAETTQAVPTTTPEPPNKPRLGELTVTDATPDSLSLSWMVPEGQFDHFLVQYRNGDGQPKVVRVPGHEDGVTISGLEPDHKYKMNLYGFHGGQRVGPISVIGVTAAEEETPAPTEPSTEAPEPPEEPLLGELTVTGSSPDSLSLSWTIPQGRFDSFTVQYKDRDGRPQVVRVRGEESEVTVGGLEPGCKYKMHLYGLHEGQRVGPVSAVGVTAPKDEAETTQAVPTMTPEPPIKPRLGELTVTDATPDSLSLSWMVPEGQFDHFLVQYRNGDGQPKAVRVPGHEDGVTISGLEPDHKYKMNLYGFHGGQRVGPVSAIGVTEEETPSPTEPSTEAPEAPEEPLLGELTVTGSSPDSLSLSWTVPQGRFDSFTVQYKDRDGQPQVVRVRGEESEVTVGGLEPGRKYKMHLYGLHEGQRVGPVSTVGITAPLPTPLPVEPRLGELAVAAVTSDSVGLSWTVAQGPFDSFLVQYRDAQGQPQAVPVSGDLRAVAVSGLDPARKYKFLLFGLQNGKRHGPVPVEARTAPDTKPSPRLGELTVTDATPDSVGLSWTVPEGEFDSFVVQYKDKDGRLQVVPVAANQREVTVQGLEPSRKYRFLLYGLSGRKRLGPISADSTTAPLEKELPPHLGELTVAEETSSSLRLSWTVAQGPFDSFVVQYRDTDGQPRAVPVAADQRTVTVEDLEPGKKYKFLLYGLLGGKRLGPVSALGMTAPEEDTPAPELAPEAPEPPEEPRLGVLTVTDTTPDSMRLSWSVAQGPFDSFVVQYEDTNGQPQALLVDGDQSKILISGLEPSTPYRFLLYGLHEGKRLGPLSAEGTTGLAPAGQTSEESRPRLSQLSVTDVTTSSLRLNWEAPPGAFDSFLLRFGVPSPSTLEPHPRPLLQRELMVPGTRHSAVLRDLRSGTLYSLTLYGLRGPHKADSIQGTARTLSPVLESPRDLQFSEIRETSAKVNWMPPPSRADSFKVSYQLADGGEPQSVQVDGQARTQKLQGLIPGARYEVTVVSVRGFEESEPLTGFLTTVPDGPTQLRALNLTEGFAVLHWKPPQNPVDTYDVQVTAPGAPPLQAETPGSAVDYPLHDLVLHTNYTATVRGLRGPNLTSPASITFTTGLEAPRDLEAKEVTPRTALLTWTEPPVRPAGYLLSFHTPGGQNQEILLPGGITSHQLLGLFPSTSYNARLQAMWGQSLLPPVSTSFTTGGLRIPFPRDCGEEMQNGAGASRTSTIFLNGNRERPLNVFCDMETDGGGWLVFQRRMDGQTDFWRDWEDYAHGFGNISGEFWLGNEALHSLTQAGDYSMRVDLRAGDEAVFAQYDSFHVDSAAEYYRLHLEGYHGTAGDSMSYHSGSVFSARDRDPNSLLISCAVSYRGAWWYRNCHYANLNGLYGSTVDHQGVSWYHWKGFEFSVPFTEMKLRPRNFRSPAGGG

SEQ ID NO: 8634 - protein, 4242 aa, Homo sapiens
MMPAQYALTSSLVLLVLLSTARAGPFSSRSNVTLPAPRPPPQPGGHTVGAGVGSPSSQLYEHTVEGGEKQVVFTHRINLPPSTGCGCPPGTEPPVLASEVQALRVRLEILEELVKGLKEQCTGGCCPASAQAGTGQTDVRTLCSLHGVFDLSRCTCSCEPGWGGPTCSDPTDAEIPPSSPPSASGSCPDDCNDQGRCVRGRCVCFPGYTGPSCGWPSCPGDCQGRGRCVQGVCVCRAGFSGPDCSQRSCPRGCSQRGRCEGGRCVCDPGYTGDDCGMRSCPRGCSQRGRCENGRCVCNPGYTGEDCGVRSCPRGCSQRGRCKDGRCVCDPGYTGEDCGTRSCPWDCGEGGRCVDGRCVCWPGYTGEDCSTRTCPRDCRGRGRCEDGECICDTGYSGDDCGVRSCPGDCNQRGRCEDGRCVCWPGYTGTDCGSRACPRDCRGRGRCENGVCVCNAGYSGEDCGVRSCPGDCRGRGRCESGRCMCWPGYTGRDCGTRACPGDCRGRGRCVDGRCVCNPGFTGEDCGSRRCPGDCRGHGLCEDGVCVCDAGYSGEDCSTRSCPGGCRGRGQCLDGRCVCEDGYSGEDCGVRQCPNDCSQHGVCQDGVCICWEGYVSEDCSIRTCPSNCHGRGRCEEGRCLCDPGYTGPTCATRMCPADCRGRGRCVQGVCLCHVGYGGEDCGQEEPPASACPGGCGPRELCRAGQCVCVEGFRGPDCAIQTCPGDCRGRGECHDGSCVCKDGYAGEDCGEEVPTIEGMRMHLLEETTVRTEWTPAPGPVDAYEIQFIPTTEGASPPFTARVPSSASAYDQRGLAPGQEYQVTVRALRGTSWGLPASKTITTMIDGPQDLRVVAVTPTTLELGWLRPQAEVDRFVVSYVSAGNQRVRLEVPPEADGTLLTDLMPGVEYVVTVTAERGRAVSYPASVRANTGSSPLGLLGTTDEPPPSGPSTTQGAQAPLLQQRPQELGELRVLGRDETGRLRVVWTAQPDTFAYFQLRMRVPEGPGAHEEVLPGDVRQALVPPPPPGTPYELSLHGVPPGGKPSDPIIYQGIMDKDEEKPGKSSGPPRLGELTVTDRTSDSLLLRWTVPEGEFDSFVIQYKDRDGQPQVVPVEGPQRSAVITSLDPGRKYKFVLYGFVGKKRHGPLVAEAKILPQSDPSPGTPPHLGNLWVTDPTPDSLHLSWTVPEGQFDTFMVQYRDRDGRPQVVPVEGPERSFVVSSLDPDHKYRFTLFGIANKKRYGPLTADGTTAPERKEEPPRPEFLEQPLLGELTVTGVTPDSLRLSWTVAQGPFDSFMVQYKDAQGQPQAVPVAGDENEVTVPGLDPDRKYKMNLYGLRGRQRVGPESVVAKTAPQEDVDETPSPTELGTEAPESPEEPLLGELTVTGSSPDSLSLFWTVPQGSFDSFTVQYKDRDGRPRAVRVGGKESEVTVGGLEPGHKYKMHLYGLHEGQRVGPVSAVGVTAPQQEETPPATESPLEPRLGELTVTDVTPNSVGLSWTVPEGQFDSFIVQYKDKDGQPQVVPVAADQREVTVYNLEPERKYKMNMYGLHDGQRMGPLSVVIVTAPLPPAPATEASKPPLEPRLGELTVTDITPDSVGLSWTVPEGEFDSFVVQYKDRDGQPQVVPVAADQREVTIPDLEPSRKYKFLLFGIQDGKRRSPVSVEAKTVARGDASPGAPPRLGELWVTDPTPDSLRLSWTVPEGQFDSFVVQFKDKDGPQVVPVEGHERSVTVTPLDAGRKYRFLLYGLLGKKRHGPLTADGTTEARSAMDDTGTKRPPKPRLGEELQVTTVTQNSVGLSWTVPEGQFDSFVVQYKDRDGQPQVVPVEGSLREVSVPGLDPAHRYKLLLYGLHHGKRVGPISAVAITAGREETETETTAPTPPAPEPHLGELTVEEATSHTLHLSWMVTEGEFDSFEIQYTDRDGQLQMVRIGGDRNDITLSGLESDHRYLVTLYGFSDGKHVGPVHVEALTVPEEEKPSEPPTATPEPPIKPRLGELTVTDATPDSLSLSWTVPEGQFDHFLVQYRNGDGQPKAVRVPGHEEGVTISGLEPDHKYKMNLYGFHGGQRMGPVSVVGVTAAEEETPSPTEPSMEAPEPAEEPLLGELTVTGSSPDSLSLSWTVPQGRFDSFTVQYKDRDGRPQVVRVGGEESEVTVGGLEPGRKYKMHLYGLHEGRRVGPVSAVGVTAPEEESPDAPLAKLRLGQMTVRDITSDSLSLSWTVPEGQFDHFLVQFKNGDGQPKAVRVPGHEDGVTISGLEPDHKYKMNLYGFHGGQRVGPVSAVGLTAPGKDEEMAPASTEPPTPEPPIKPRLEELTVTDATPDSLSLSWTVPEGQFDHFLVQYKNGDGQPKATRVPGHEDRVTISGLEPDNKYKMNLYGFHGGQRVGPVSAIGVTAAEEETPSPTEPSMEAPEPPEEPLLGELTVTGSSPDSLSLSWTVPQGRFDSFTVQYKDRDGRPQVVRVGGEESEVTVGGLEPGRKYKMHLYGLHEGRRVGPVSTVGVTAPQEDVDETPSPTEPGTEAPGPPEEPLLGELTVTGSSPDSLSLSWTVPQGRFDSFTVQYKDRDGRPQAVRVGGQESKVTVRGLEPGRKYKMHLYGLHEGRRLGPVSAVGVTEDEAETTQAVPTMTPEPPIKPRLGELTMTDATPDSLSLSWTVPEGQFDHFLVQYRNGDGQPKAVRVPGHEDGVTISGLEPDHKYKMNLYGFHGGQRVGPISVIGVTAAEEETPSPTELSTEAPEPPEEPLLGELTVTGSSPDSLSLSWTIPQGHFDSFTVQYKDRDGRPQVMRVRGEESEVTVGGLEPGRKYKMHLYGLHEGRRVGPVSTVGVTEDEAETTQAVPTTTPEPPNKPRLGELTVTDATPDSLSLSWMVPEGQFDHFLVQYRNGDGQPKVVRVPGHEDGVTISGLEPDHKYKMNLYGFHGGQRVGPISVIGVTAAEEETPAPTEPSTEAPEPPEEPLLGELTVTGSSPDSLSLSWTIPQGRFDSFTVQYKDRDGRPQVVRVRGEESEVTVGGLEPGCKYKMHLYGLHEGQRVGPVSAVGVTAPKDEAETTQAVPTMTPEPPIKPRLGELTVTDATPDSLSLSWMVPEGQFDHFLVQYRNGDGQPKAVRVPGHEDGVTISGLEPDHKYKMNLYGFHGGQRVGPVSAIGVTEEETPSPTEPSTEAPEAPEEPLLGELTVTGSSPDSLSLSWTVPQGRFDSFTVQYKDRDGQPQVVRVRGEESEVTVGGLEPGRKYKMHLYGLHEGQRVGPVSTVGITAPLPTPLPVEPRLGELAVAAVTSDSVGLSWTVAQGPFDSFLVQYRDAQGQPQAVPVSGDLRAVAVSGLDPARKYKFLLFGLQNGKRHGPVPVEARTAPDTKPSPRLGELTVTDATPDSVGLSWTVPEGEFDSFVVQYKDKDGRLQVVPVAANQREVTVQGLEPSRKYRFLLYGLSGRKRLGPISADSTTAPLEKELPPHLGELTVAEETSSSLRLSWTVAQGPFDSFVVQYRDTDGQPRAVPVAADQRTVTVEDLEPGKKYKFLLYGLLGGKRLGPVSALGMTAPEEDTPAPELAPEAPEPPEEPRLGVLTVTDTTPDSMRLSWSVAQGPFDSFVVQYEDTNGQPQALLVDGDQSKILISGLEPSTPYRFLLYGLHEGKRLGPLSAEGTTGLAPAGQTSEESRPRLSQLSVTDVTTSSLRLNWEAPPGAFDSFLLRFGVPSPSTLEPHPRPLLQRELMVPGTRHSAVLRDLRSGTLYSLTLYGLRGPHKADSIQGTARTLSPVLESPRDLQFSEIRETSAKVNWMPPPSRADSFKVSYQLADGGEPQSVQVDGQARTQKLQGLIPGARYEVTVVSVRGFEESEPLTGFLTTVPDGPTQLRALNLTEGFAVLHWKPPQNPVDTYDVQVTAPGAPPLQAETPGSAVDYPLHDLVLHTNYTATVRGLRGPNLTSPASITFTTGLEAPRDLEAKEVTPRTALLTWTEPPVRPAGYLLSFHTPGGQNQEILLPGGITSHQLLGLFPSTSYNARLQAMWGQSLLPPVSTSFTTGGLRIPFPRDCGEEMQNGAGASRTSTIFLNGNRERPLNVFCDMETDGGGWLVFQRRMDGQTDFWRDWEDYAHGFGNISGEFWLGNEALHSLTQAGDYSMRVDLRAGDEAVFAQYDSFHVDSAAEYYRLHLEGYHGTAGDSMSYHSGSVFSARDRDPNSLLISCAVSYRGAWWYRNCHYANLNGLYGSTVDHQGVSWYHWKGFEFSVPFTEMKLRPRNFRSPAGGG

SEQ ID NO: 8635 - protein, 673 aa, Homo sapiens
MRLSWSVAQGPFDSFVVQYEDTNGQPQALLVDGDQSKILISGLEPSTPYRFLLYGLHEGKRLGPLSAEGTTGLAPAGQTSEESRPRLSQLSVTDVTTSSLRLNWEAPPGAFDSFLLRFGVPSPSTLEPHPRPLLQRELMVPGTRHSAVLRDLRSGTLYSLTLYGLRGPHKADSIQGTARTLSPVLESPRDLQFSEIRETSAKVNWMPPPSRADSFKVSYQLADGGEPQSVQVDGQARTQKLQGLIPGARYEVTVVSVRGFEESEPLTGFLTTVPDGPTQLRALNLTEGFAVLHWKPPQNPVDTYDVQVTAPGAPPLQAETPGSAVDYPLHDLVLHTNYTATVRGLRGPNLTSPASITFTTGLEAPRDLEAKEVTPRTALLTWTEPPVRPAGYLLSFHTPGGQNQEILLPGGITSHQLLGLFPSTSYNARLQAMWGQSLLPPVSTSFTTGGLRIPFPRDCGEEMQNGAGASRTSTIFLNGNRERPLNVFCDMETDGGGWLVFQRRMDGQTDFWRDWEDYAHGFGNISGEFWLGNEALHSLTQAGDYSMRVDLRAGDEAVFAQYDSFHVDSAAEYYRLHLEGYHGTAGDSMSYHSGSVFSARDRDPNSLLISCAVSYRGAWWYRNCHYANLNGLYGSTVDHQGVSWYHWKGFEFSVPFTEMKLRPRNFRSPAGGG

SEQ ID NO: 8636 - protein, 317 aa, Homo sapiens
MAKNPPENCEDCHILNAEAFKSKKICKSLKICGLVFGILALTLIVLFWGSKHFWPEVPKKAYDMEHTFYSNGEKKKIYMEIDPVTRTEIFRSGNGTDETLEVHDFKNGYTGIYFVGLQKCFIKTQIKVIPEFSEPEEEIDENEEITTTFFEQSVIWVPAEKPIENRDFLKNSKILEICDNVTMYWINPTLISVSELQDFEEEGEDLHFPANEKKGIEQNEQWVVPQVKVEKTRHARQASEEELPINDYTENGIEFDPMLDERGYCCIYCRRGNRYCRRVCEPLLGYYPYPYCYQGGRVICRVIMPCNWWVARMLGRV

SEQ ID NO: 8637 - protein, 451 aa, Homo sapiens
MATPLVAGPAALRFAAAASWQVVRGRCVEHFPRVLEFLRSLRAVAPGLVRYRHHERLCMGLKAKVVVELILQGRPWAQVLKALNHHFPESGPIVRDPKATKQDLRKILEAQETFYQQVKQLSEAPVDLASKLQELEQEYGEPFLAAMEKLLFEYLCQLEKALPTPQAQQLQDVLSWMQPGVSITSSLAWRQYGVDMGWLLPECSVTDSVNLAEPMEQNPPQQQRLALHNPLPKAKPGTHLPQGPSSRTHPEPLAGRHFNLAPLGRRRVQSQWASTRGGHKERPTVMLFPFRNLGSPTQVISKPESKEEHAIYTADLAMGTRAASTGKSKSPCQTLGGRALKENPVDLPATEQKENCLDCYMDPLRLSLLPPRARKPVCPPSLCSSVITIGDLVLDSDEEENGQGEGKESLENYQKTKFDTLIPTLCEYLPPSGHGAIPVSSCDCRDSSRPL

SEQ ID NO: 8638 - protein, 354 aa, Homo sapiens
MATPLVAGPAALRFAAAASWQVVRGRCVEHFPRVLEFLRSLRAVAPGLVRYRHHERLCMGLKAKVVVELILQGRPWAQVLKALNHHFPESGPIVRDPKATKQDLRKILEAQETFYQQVKQLSEAPVDLASKLQELEQEYGEPFLAAMEKLLFEYLCQLEKALPTPQAQQLQDVLSWMQPGVSITSSLAWRQYGVDMGWLLPECSVTDSVNLAEPMEQNPPQQQRLALHNPLPKAKPGTHLPQGPSSRTHPEPLAGRHFNLAPLGRRRVQSQWASTRGGHKERPTVMLFPFRNLGSPTQVISKPESKEEHAIYTADLAMGTRAASTGKSKSPCQTLGGRALKENPVDLPATEQKE

SEQ ID NO: 8639 - protein, 140 aa, Homo sapiens
MEQNPPQQQRLALHNPLPKAKPGTHLPQGPSSRTHPEPLAGRHFNLAPLGRRRVQSQWASTRGGHKERPTVMLFPFRNLGSPTQVISKPESKEEHAIYTADLAMGTRAASTGKSKSPCQTLGGRALKENPVDLPATEQKE

SEQ ID NO: 8640 - protein, 416 aa, Homo sapiens
MATPLVAGPAALRFAAAASWQVVRGRCVEHFPRVLEFLRSLRAVAPGLVRYRHHERLCMGLKAKTKQDLRKILEAQETFYQQVKQLSEAPVDLASKLQELEQEYGEPFLAAMEKLLFEYLCQLEKALPTPQAQQLQDVLSWMQPGVSITSSLAWRQYGVDMGWLLPECSVTDSVNLAEPMEQNPPQQQRLALHNPLPKAKPGTHLPQGPSSRTHPEPLAGRHFNLAPLGRRRVQSQWASTRGGHKERPTVMLFPFRNLGSPTQVISKPESKEEHAIYTADLAMGTRAASTGKSKSPCQTLGGRALKENPVDLPATEQKENCLDCYMDPLRLSLLPPRARKPVCPPSLCSSVITIGDLVLDSDEEENGQGEGKESLENYQKTKFDTLIPTLCEYLPPSGHGAIPVSSCDCRDSSRPL

SEQ ID NO: 8641 - protein, 1165 aa, Homo sapiens
MEQDRTNHVEGNRLSPFLIPSPPICQTEPLATKLQNGSPLPERAHPEVNGDTKWHSFKSYYGIPCMKGSQNSRVSPDFTQESRGYSKCLQNGGIKRTVSEPSLSGLLQIKKLKQDQKANGERRNFGVSQERNPGESSQPNVSDLSDKKESVSSVAQENAVKDFTSFSTHNCSGPENPELQILNEQEGKSANYHDKNIVLLKNKAVLMPNGATVSASSVEHTHGELLEKTLSQYYPDCVSIAVQKTTSHINAINSQATNELSCEITHPSHTSGQINSAQTSNSELPPKPAAVVSEACDADDADNASKLAAMLNTCSFQKPEQLQQQKSVFEICPSPAENNIQGTTKLASGEEFCSGSSSNLQAPGGSSERYLKQNEMNGAYFKQSSVFTKDSFSATTTPPPPSQLLLSPPPPLPQVPQLPSEGKSTLNGGVLEEHHHYPNQSNTTLLREVKIEGKPEAPPSQSPNPSTHVCSPSPMLSERPQNNCVNRNDIQTAGTMTVPLCSEKTRPMSEHLKHNPPIFGSSGELQDNCQQLMRNKEQEILKGRDKEQTRDLVPPTQHYLKPGWIELKAPRFHQAESHLKRNEASLPSILQYQPNLSNQMTSKQYTGNSNMPGGLPRQAYTQKTTQLEHKSQMYQVEMNQGQSQGTVDQHLQFQKPSHQVHFSKTDHLPKAHVQSLCGTRFHFQQRADSQTEKLMSPVLKQHLNQQASETEPFSNSHLLQHKPHKQAAQTQPSQSSHLPQNQQQQQKLQIKNKEEILQTFPHPQSNNDQQREGSFFGQTKVEECFHGENQYSKSSEFETHNVQMGLEEVQNINRRNSPYSQTMKSSACKIQVSCSNNTHLVSENKEQTTHPELFAGNKTQNLHHMQYFPNNVIPKQDLLHRCFQEQEQKSQQASVLQGYKNRNQDMSGQQAAQLAQQRYLIHNHANVFPVPDQGGSHTQTPPQKDTQKHAALRWHLLQKQEQQQTQQPQTESCHSQMHRPIKVEPGCKPHACMHTAPPENKTWKKVTKQENPPASCDNVQQKSIIETMEQHLKQFHAKSLFDHKALTLKSQKQVKVEMSGPVTVLTRQTTAAELDSHTPALEQQTTSSEKTPTKRTAASVLNNFIESPSKLLDTPIKNLLDTPVKTQYDFPSCRCVGKCQKCTETHGVYPELANLSSDMGFSFFF

SEQ ID NO: 8642 - protein, 2002 aa, Homo sapiens
MEQDRTNHVEGNRLSPFLIPSPPICQTEPLATKLQNGSPLPERAHPEVNGDTKWHSFKSYYGIPCMKGSQNSRVSPDFTQESRGYSKCLQNGGIKRTVSEPSLSGLLQIKKLKQDQKANGERRNFGVSQERNPGESSQPNVSDLSDKKESVSSVAQENAVKDFTSFSTHNCSGPENPELQILNEQEGKSANYHDKNIVLLKNKAVLMPNGATVSASSVEHTHGELLEKTLSQYYPDCVSIAVQKTTSHINAINSQATNELSCEITHPSHTSGQINSAQTSNSELPPKPAAVVSEACDADDADNASKLAAMLNTCSFQKPEQLQQQKSVFEICPSPAENNIQGTTKLASGEEFCSGSSSNLQAPGGSSERYLKQNEMNGAYFKQSSVFTKDSFSATTTPPPPSQLLLSPPPPLPQVPQLPSEGKSTLNGGVLEEHHHYPNQSNTTLLREVKIEGKPEAPPSQSPNPSTHVCSPSPMLSERPQNNCVNRNDIQTAGTMTVPLCSEKTRPMSEHLKHNPPIFGSSGELQDNCQQLMRNKEQEILKGRDKEQTRDLVPPTQHYLKPGWIELKAPRFHQAESHLKRNEASLPSILQYQPNLSNQMTSKQYTGNSNMPGGLPRQAYTQKTTQLEHKSQMYQVEMNQGQSQGTVDQHLQFQKPSHQVHFSKTDHLPKAHVQSLCGTRFHFQQRADSQTEKLMSPVLKQHLNQQASETEPFSNSHLLQHKPHKQAAQTQPSQSSHLPQNQQQQQKLQIKNKEEILQTFPHPQSNNDQQREGSFFGQTKVEECFHGENQYSKSSEFETHNVQMGLEEVQNINRRNSPYSQTMKSSACKIQVSCSNNTHLVSENKEQTTHPELFAGNKTQNLHHMQYFPNNVIPKQDLLHRCFQEQEQKSQQASVLQGYKNRNQDMSGQQAAQLAQQRYLIHNHANVFPVPDQGGSHTQTPPQKDTQKHAALRWHLLQKQEQQQTQQPQTESCHSQMHRPIKVEPGCKPHACMHTAPPENKTWKKVTKQENPPASCDNVQQKSIIETMEQHLKQFHAKSLFDHKALTLKSQKQVKVEMSGPVTVLTRQTTAAELDSHTPALEQQTTSSEKTPTKRTAASVLNNFIESPSKLLDTPIKNLLDTPVKTQYDFPSCRCVEQIIEKDEGPFYTHLGAGPNVAAIREIMEERFGQKGKAIRIERVIYTGKEGKSSQGCPIAKWVVRRSSSEEKLLCLVRERAGHTCEAAVIVILILVWEGIPLSLADKLYSELTETLRKYGTLTNRRCALNEERTCACQGLDPETCGASFSFGCSWSMYYNGCKFARSKIPRKFKLLGDDPKEEEKLESHLQNLSTLMAPTYKKLAPDAYNNQIEYEHRAPECRLGLKEGRPFSGVTACLDFCAHAHRDLHNMQNGSTLVCTLTREDNREFGGKPEDEQLHVLPLYKVSDVDEFGSVEAQEEKKRSGAIQVLSSFRRKVRMLAEPVKTCRQRKLEAKKAAAEKLSSLENSSNKNEKEKSAPSRTKQTENASQAKQLAELLRLSGPVMQQSQQPQPLQKQPPQPQQQQRPQQQQPHHPQTESVNSYSASGSTNPYMRRPNPVSPYPNSSHTSDIYGSTSPMNFYSTSSQAAGSYLNSSNPMNPYPGLLNQNTQYPSYQCNGNLSVDNCSPYLGSYSPQSQPMDLYRYPSQDPLSKLSLPPIHTLYQPRFGNSQSFTSKYLGYGNQNMQGDGFSSCTIRPNVHHVGKLPPYPTHEMDGHFMGATSRLPPNLSNPNMDYKNGEHHSPSHIIHNYSAAPGMFNSSLHALHLQNKENDMLSHTANGLSKMLPALNHDRTACVQGGLHKLSDANGQEKQPLALVQGVASGAEDNDEVWSDSEQSFLDPDIGGVAVAPTHGSILIECAKRELHATTPLKNPNRNHPTRISLVFYQHKSMNEPKHGLALWEAKMAEKAREKEEECEKYGPDYVPQKSHGKKVKREPAEPHETSEPTYLRFIKSLAERTMSVTTDSTVTTSPYAFTRVTGPYNRYI

SEQ ID NO: 8643 - protein, 1165 aa, Homo sapiens; identical to SEQ ID NO: 8641

SEQ ID NO: 8644 - protein, 110 aa, Homo sapiens
MEQDRTNHVEGNRLSPFLIPSPPICQTEPLATKLQNGSPLPERAHPEVNGDTKWHSFKSYYGIPCMKGSQNSRVSPDFTQESRGYSKCLQNGGIKRTVSEPSLSGLLQIK

SEQ ID NO: 8645 - protein, 637 aa, Homo sapiens
MEQDRTNHVEGNRLSPFLIPSPPICQTEPLATKLQNGSPLPERAHPEVNGDTKWHSFKSYYGIPCMKGSQNSRVSPDFTQESRGYSKCLQNGGIKRTVSEPSLSGLLQIKKLKQDQKANGERRNFGVSQERNPGESSQPNVSDLSDKKESVSSVAQENAVKDFTSFSTHNCSGPENPELQILNEQEGKSANYHDKNIVLLKNKAVLMPNGATVSASSVEHTHGELLEKTLSQYYPDCVSIAVQKTTSHINAINSQATNELSCEITHPSHTSGQINSAQTSNSELPPKPAAVVSEACDADDADNASKLAAMLNTCSFQKPEQLQQQKSVFEICPSPAENNIQGTTKLASGEEFCSGSSSNLQAPGGSSERYLKQNEMNGAYFKQSSVFTKDSFSATTTPPPPSQLLLSPPPPLPQVPQLPSEGKSTLNGGVLEEHHHYPNQSNTTLLREVKIEGKPEAPPSQSPNPSTHVCSPSPMLSERPQNNCVNRNDIQTAGTMTVPLCSEKTRPMSEHLKHNPPIFGSSGELQDNCQQLMRNKEQEILKGRDKEQTRDLVPPTQHYLKPGWIELKAPRFHQAESHLKRNEASLPSILQYQPNLSNQMTSKQYTGNSNMPGGLPRQAYTQKTTQLSTSHKCTKLK

SEQ ID NO: 8646 - protein, 2002 aa, Homo sapiens; identical to SEQ ID NO: 8642

SEQ ID NO: 8647 - protein, 1194 aa, Homo sapiens
MEQDRTNHVEGNRLSPFLIPSPPICQTEPLATKLQNGSPLPERAHPEVNGDTKWHSFKSYYGIPCMKGSQNSRVSPDFTQESRGYSKCLQNGGIKRTVSEPSLSGLLQIKKLKQDQKANGERRNFGVSQERNPGESSQPNVSDLSDKKESVSSVAQENAVKDFTSFSTHNCSGPENPELQILNEQEGKSANYHDKNIVLLKNKAVLMPNGATVSASSVEHTHGELLEKTLSQYYPDCVSIAVQKTTSHINAINSQATNELSCEITHPSHTSGQINSAQTSNSELPPKPAAVVSEACDADDADNASKLAAMLNTCSFQKPEQLQQQKSVFEICPSPAENNIQGTTKLASGEEFCSGSSSNLQAPGGSSERYLKQNEMNGAYFKQSSVFTKDSFSATTTPPPPSQLLLSPPPPLPQVPQLPSEGKSTLNGGVLEEHHHYPNQSNTTLLREVKIEGKPEAPPSQSPNPSTHVCSPSPMLSERPQNNCVNRNDIQTAGTMTVPLCSEKTRPMSEHLKHNPPIFGSSGELQDNCQQLMRNKEQEILKGRDKEQTRDLVPPTQHYLKPGWIELKAPRFHQAESHLKRNEASLPSILQYQPNLSNQMTSKQYTGNSNMPGGLPRQAYTQKTTQLEHKSQMYQVEMNQGQSQGTVDQHLQFQKPSHQVHFSKTDHLPKAHVQSLCGTRFHFQQRADSQTEKLMSPVLKQHLNQQASETEPFSNSHLLQHKPHKQAAQTQPSQSSHLPQNQQQQQKLQIKNKEEILQTFPHPQSNNDQQREGSFFGQTKVEECFHGENQYSKSSEFETHNVQMGLEEVQNINRRNSPYSQTMKSSACKIQVSCSNNTHLVSENKEQTTHPELFAGNKTQNLHHMQYFPNNVIPKQDLLHRCFQEQEQKSQQASVLQGYKNRNQDMSGQQAAQLAQQRYLIHNHANVFPVPDQGGSHTQTPPQKDTQKHAALRWHLLQKQEQQQTQQPQTESCHSQMHRPIKVEPGCKPHACMHTAPPENKTWKKVTKQENPPASCDNVQQKSIIETMEQHLKQFHAKSLFDHKALTLKSQKQVKVEMSGPVTVLTRQTTAAELDSHTPALEQQTTSSEKTPTKRTAASVLNNFIESPSKLLDTPIKNLLDTPVKTQYDFPSCRCVGLDRRVKLLGLKESSILVKKAKVLRDVLLLSGWFAEAAVKRSYCVWCGSELATPVRLQ

SEQ ID NO: 8648 - protein, 2023 aa, Homo sapiens
MIQEEQIQLEGSLVDGPEASLMEQDRTNHVEGNRLSPFLIPSPPICQTEPLATKLQNGSPLPERAHPEVNGDTKWHSFKSYYGIPCMKGSQNSRVSPDFTQESRGYSKCLQNGGIKRTVSEPSLSGLLQIKKLKQDQKANGERRNFGVSQERNPGESSQPNVSDLSDKKESVSSVAQENAVKDFTSFSTHNCSGPENPELQILNEQEGKSANYHDKNIVLLKNKAVLMPNGATVSASSVEHTHGELLEKTLSQYYPDCVSIAVQKTTSHINAINSQATNELSCEITHPSHTSGQINSAQTSNSELPPKPAAVVSEACDADDADNASKLAAMLNTCSFQKPEQLQQQKSVFEICPSPAENNIQGTTKLASGEEFCSGSSSNLQAPGGSSERYLKQNEMNGAYFKQSSVFTKDSFSATTTPPPPSQLLLSPPPPLPQVPQLPSEGKSTLNGGVLEEHHHYPNQSNTTLLREVKIEGKPEAPPSQSPNPSTHVCSPSPMLSERPQNNCVNRNDIQTAGTMTVPLCSEKTRPMSEHLKHNPPIFGSSGELQDNCQQLMRNKEQEILKGRDKEQTRDLVPPTQHYLKPGWIELKAPRFHQAESHLKRNEASLPSILQYQPNLSNQMTSKQYTGNSNMPGGLPRQAYTQKTTQLEHKSQMYQVEMNQGQSQGTVDQHLQFQKPSHQVHFSKTDHLPKAHVQSLCGTRFHFQQRADSQTEKLMSPVLKQHLNQQASETEPFSNSHLLQHKPHKQAAQTQPSQSSHLPQNQQQQQKLQIKNKEEILQTFPHPQSNNDQQREGSFFGQTKVEECFHGENQYSKSSEFETHNVQMGLEEVQNINRRNSPYSQTMKSSACKIQVSCSNNTHLVSENKEQTTHPELFAGNKTQNLHHMQYFPNNVIPKQDLLHRCFQEQEQKSQQASVLQGYKNRNQDMSGQQAAQLAQQRYLIHNHANVFPVPDQGGSHTQTPPQKDTQKHAALRWHLLQKQEQQQTQQPQTESCHSQMHRPIKVEPGCKPHACMHTAPPENKTWKKVTKQENPPASCDNVQQKSIIETMEQHLKQFHAKSLFDHKALTLKSQKQVKVEMSGPVTVLTRQTTAAELDSHTPALEQQTTSSEKTPTKRTAASVLNNFIESPSKLLDTPIKNLLDTPVKTQYDFPSCRCVEQIIEKDEGPFYTHLGAGPNVAAIREIMEERFGQKGKAIRIERVIYTGKEGKSSQGCPIAKWVVRRSSSEEKLLCLVRERAGHTCEAAVIVILILVWEGIPLSLADKLYSELTETLRKYGTLTNRRCALNEERTCACQGLDPETCGASFSFGCSWSMYYNGCKFARSKIPRKFKLLGDDPKEEEKLESHLQNLSTLMAPTYKKLAPDAYNNQIEYEHRAPECRLGLKEGRPFSGVTACLDFCAHAHRDLHNMQNGSTLVCTLTREDNREFGGKPEDEQLHVLPLYKVSDVDEFGSVEAQEEKKRSGAIQVLSSFRRKVRMLAEPVKTCRQRKLEAKKAAAEKLSSLENSSNKNEKEKSAPSRTKQTENASQAKQLAELLRLSGPVMQQSQQPQPLQKQPPQPQQQQRPQQQQPHHPQTESVNSYSASGSTNPYMRRPNPVSPYPNSSHTSDIYGSTSPMNFYSTSSQAAGSYLNSSNPMNPYPGLLNQNTQYPSYQCNGNLSVDNCSPYLGSYSPQSQPMDLYRYPSQDPLSKLSLPPIHTLYQPRFGNSQSFTSKYLGYGNQNMQGDGFSSCTIRPNVHHVGKLPPYPTHEMDGHFMGATSRLPPNLSNPNMDYKNGEHHSPSHIIHNYSAAPGMFNSSLHALHLQNKENDMLSHTANGLSKMLPALNHDRTACVQGGLHKLSDANGQEKQPLALVQGVASGAEDNDEVWSDSEQSFLDPDIGGVAVAPTHGSILIECAKRELHATTPLKNPNRNHPTRISLVFYQHKSMNEPKHGLALWEAKMAEKAREKEEECEKYGPDYVPQKSHGKKVKREPAEPHETSEPTYLRFIKSLAERTMSVTTDSTVTTSPYAFTRVTGPYNRYI

SEQ ID NO: 8649 - protein, 204 aa, Homo sapiens
MVCGGFACSKNCLCALNLLYTLVSLLLIGIAAWGIGFGLISSLRVVGVVIAVGIFLFLIALVGLIGAVKHHQVLLFFYMIILLLVFIVQFSVSCACLALNQEQQGQLLEVGWNNTASARNDIQRNLNCCGFRSVNPNDTCLASCVKSDHSCSPCAPIIGEYAGEVLRFVGGIGLFFSFTEILGVWLTYRYRNQKDPRANPSAFL

SEQ ID NO: 8650 - protein, 245 aa, Homo sapiens
MASPSRRLQTKPVITCFKSVLLIYTFIFWITGVILLAVGIWGKVSLENYFSLLNEKATNVPFVLIATGTVIILLGTFGCFATCRASAWMLKLYAMFLTLVFLVELVAAIVGFVFRHEIKNSFKNNYEKALKQYNSTGDYRSHAVDKIQNTLHCCGVTDYRDWTDTNYYSEKGFPKSCCKLEDCTPQRDADKVNNEGCFIKVMTIIESEMGVVAGISFGVACFQLIGIFLAYCLSRAITNNQYEIV

SEQ ID NO: 8651 - protein, 227 aa, Homo sapiens
MASPSRRLQTKPVITCFKSVLLIYTFIFWITGVILLAVGIWGKVSLENYFSLLNEKATFGCFATCRASAWMLKLYAMFLTLVFLVELVAAIVGFVFRHEIKNSFKNNYEKALKQYNSTGDYRSHAVDKIQNTLHCCGVTDYRDWTDTNYYSEKGFPKSCCKLEDCTPQRDADKVNNEGCFIKVMTIIESEMGVVAGISFGVACFQLIGIFLAYCLSRAITNNQYEIV

SEQ ID NO: 8652 - protein, 222 aa, Homo sapiens
MERKGSAAGAKGNPSPPAAGEGQRPPPPLCVPGGGGGAPARGQVGAAAEPAELIRRAHEFKSQGAQCYKDKKFREAIGKYHRALLELKGLLPPPGERERDSRPASPAGALKPGRLSEEQSKTVEAIEIDCYNSLAACLLQAELVNYERVKEYCLKVLKKEGENFKALYRSGVAFYHLGDYDKALYYLKEARTQQPTDTNVIRYIQLTEMKLSRCSQREKEAM

SEQ ID NO: 8653 - protein, 85 aa, Homo sapiens
MVKQIESKTAFQEALDAAGDKLVVVDFSATWCGPCKMIKPFFHDVASECEVKCMPTFQFFKKGQKVGEFSGANKEKLEATINELV

SEQ ID NO: 8654 - protein, 105 aa, Homo sapiens
MVKQIESKTAFQEALDAAGDKLVVVDFSATWCGPCKMIKPFFHSLSEKYSNVIFLEVDVDDCQDVASECEVKCMPTFQFFKKGQKVGEFSGANKEKLEATINELV

SEQ ID NO: 8655 - protein, 391 aa, Homo sapiens
MVMFKKIKSFEVVFNDPEKVYGSGEKVAGRVIVEVCEVTRVKAVRILACGVAKVLWMQGSQQCKQTSEYLRYEDTLLLEDQPTGENEMVIMRPGNKYEYKFGFELPQGPLGTSFKGKYGCVDYWVKAFLDRPSQPTQETKKNFEVVDLVDVNTPDLMAPVSAKKEKKVSCMFIPDGRVSVSARIDRKGFCEGDEISIHADFENTCSRIVVPKAAIVARHTYLANGQTKVLTQKLSSVRGNHIISGTCASWRGKSLRVQKIRPSILGCNILRVEYSLLIYVSVPGSKKVILDLPLVIGSRSGLSSRTSSMASRTSSEMSWVDLNIPDTPEAPPCYMDVIPEDHRLESPTTPLLDDMDGSQDSPIFMYAPEFKFMPPPTYTEVDPCILNNNVQ

SEQ ID NO: 8656 - protein, 497 aa, Homo sapiens
MNGPEDLPKSYDYDLIIIGGGSGGLAAAKEAAQYGKKVMVLDFVTPTPLGTRWGLGGTCVNVGCIPKKLMHQAALLGQALQDSRNYGWKVEETVKHDWDRMIEAVQNHIGSLNWGYRVALREKKVVYENAYGQFIGPHRIKATNNKGKEKIYSAERFLIATGERPRYLGIPGDKEYCISSDDLFSLPYCPGKTLVVGASYVALECAGFLAGIGLDVTVMVRSILLRGFDQDMANKIGEHMEEHGIKFIRQFVPIKVEQIEAGTPGRLRVVAQSTNSEEIIEGEYNTVMLAIGRDACTRKIGLETVGVKINEKTGKIPVTDEEQTNVPYIYAIGDILEDKVELTPVAIQAGRLLAQRLYAGSTVKCDYENVPTTVFTPLEYGACGLSEEKAVEKFGEENIEVYHSYFWPLEWTIPSRDNNKCYAKIICNTKDNERVVGFHVLGPNAGEVTQGFAAALKCGLTKKQLDSTIGIHPVCAEVFTTLSVTKRSGASILQAGC

SEQ ID NO: 8657 - protein, 581 aa, Homo sapiens
MQQVMLTCKGVNRGHAVPAGPGRKPRPRRSSRLLAGEKHLTRSALLLCHTEDGRALEGTLSELAAETDLPVVFVKQRKIGGHGPTLKAYQEGRLQKLLKMNGPEDLPKSYDYDLIIIGGGSGGLAAAKEAAQYGKKVMVLDFVTPTPLGTRWGLGGTCVNVGCIPKKLMHQAALLGQALQDSRNYGWKVEETVKHDWDRMIEAVQNHIGSLNWGYRVALREKKVVYENAYGQFIGPHRIKATNNKGKEKIYSAERFLIATGERPRYLGIPGDKEYCISSDDLFSLPYCPGKTLVVGASYVALECAGFLAGIGLDVTVMVRSILLRGFDQDMANKIGEHMEEHGIKFIRQFVPIKVEQIEAGTPGRLRVVAQSTNSEEIIEGEYNTVMLAIGRDACTRKIGLETVGVKINEKTGKIPVTDEEQTNVPYIYAIGDILEDKVELTPVAIQAGRLLAQRLYAGSTVKCDYENVPTTVFTPLEYGACGLSEEKAVEKFGEENIEVYHSYFWPLEWTIPSRDNNKCYAKIICNTKDNERVVGFHVLGPNAGEVTQGFAAALKCGLTKKQLDSTIGIHPVCAEFFSFI

SEQ ID NO: 8658 - protein, 549 aa, Homo sapiens
MSCEDGRALEGTLSELAAETDLPVVFVKQRKIGGHGPTLKAYQEGRLQKLLKMNGPEDLPKSYDYDLIIIGGGSGGLAAAKEAAQYGKKVMVLDFVTPTPLGTRWGLGGTCVNVGCIPKKLMHQAALLGQALQDSRNYGWKVEETVKHDWDRMIEAVQNHIGSLNWGYRVALREKKVVYENAYGQFIGPHRIKATNNKGKEKIYSAERFLIATGERPRYLGIPGDKEYCISSDDLFSLPYCPGKTLVVGASYVALECAGFLAGIGLDVTVMVRSILLRGFDQDMANKIGEHMEEHGIKFIRQFVPIKVEQIEAGTPGRLRVVAQSTNSEEIIEGEYNTVMLAIGRDACTRKIGLETVGVKINEKTGKIPVTDEEQTNVPYIYAIGDILEDKVELTPVAIQAGRLLAQRLYAGSTVKCDYENVPTTVFTPLEYGACGLSEEKAVEKFGEENIEVYHSYFWPLEWTIPSRDNNKCYAKIICNTKDNERVVGFHVLGPNAGEVTQGFAAALKCGLTKKQLDSTIGIHPVCAEVFTTLSVTKRSGASILQAGC

SEQ ID NO: 8659 - protein, 541 aa, Homo sapiens
MLSRLVLNSWAQAIIRPRPPKVLGLQVTTFSEAYQEGRLQKLLKMNGPEDLPKSYDYDLIIIGGGSGGLAAAKEAAQYGKKVMVLDFVTPTPLGTRWGLGGTCVNVGCIPKKLMHQAALLGQALQDSRNYGWKVEETVKHDWDRMIEAVQNHIGSLNWGYRVALREKKVVYENAYGQFIGPHRIKATNNKGKEKIYSAERFLIATGERPRYLGIPGDKEYCISSDDLFSLPYCPGKTLVVGASYVALECAGFLAGIGLDVTVMVRSILLRGFDQDMANKIGEHMEEHGIKFIRQFVPIKVEQIEAGTPGRLRVVAQSTNSEEIIEGEYNTVMLAIGRDACTRKIGLETVGVKINEKTGKIPVTDEEQTNVPYIYAIGDILEDKVELTPVAIQAGRLLAQRLYAGSTVKCDYENVPTTVFTPLEYGACGLSEEKAVEKFGEENIEVYHSYFWPLEWTIPSRDNNKCYAKIICNTKDNERVVGFHVLGPNAGEVTQGFAAALKCGLTKKQLDSTIGIHPVCAEVFTTLSVTKRSGASILQAGC

SEQ ID NO: 8660 - protein, 612 aa, Homo sapiens
MPVDDYWLCLPASCARPFVQTVRVVQSCPHCCWFPGVLPSVPEPLRMPAMLPTGSHSAVLPPSHCSTAPPSTSQEPSSSADPKLCLSPPTSDSRQERNVQFGLAYQEGRLQKLLKMNGPEDLPKSYDYDLIIIGGGSGGLAAAKEAAQYGKKVMVLDFVTPTPLGTRWGLGGTCVNVGCIPKKLMHQAALLGQALQDSRNYGWKVEETVKHDWDRMIEAVQNHIGSLNWGYRVALREKKVVYENAYGQFIGPHRIKATNNKGKEKIYSAERFLIATGERPRYLGIPGDKEYCISSDDLFSLPYCPGKTLVVGASYVALECAGFLAGIGLDVTVMVRSILLRGFDQDMANKIGEHMEEHGIKFIRQFVPIKVEQIEAGTPGRLRVVAQSTNSEEIIEGEYNTVMLAIGRDACTRKIGLETVGVKINEKTGKIPVTDEEQTNVPYIYAIGDILEDKVELTPVAIQAGRLLAQRLYAGSTVKCDYENVPTTVFTPLEYGACGLSEEKAVEKFGEENIEVYHSYFWPLEWTIPSRDNNKCYAKIICNTKDNERVVGFHVLGPNAGEVTQGFAAALKCGLTKKQLDSTIGIHPVCAEVFTTLSVTKRSGASILQAGC

SEQ ID NO: 8661 - protein, 647 aa, Homo sapiens
MGCAEGKAVAAAAPTELQTKGKNGDGRRRSAKDHHPGKTLPENPAGFTSTATADSRALLQAYIDGHSVVIFSRSTCTRCTEVKKLFKSLCVPYFVLELDQTEDGRALEGTLSELAAETDLPVVFVKQRKIGGHGPTLKAYQEGRLQKLLKMNGPEDLPKSYDYDLIIIGGGSGGLAAAKEAAQYGKKVMVLDFVTPTPLGTRWGLGGTCVNVGCIPKKLMHQAALLGQALQDSRNYGWKVEETVKHDWDRMIEAVQNHIGSLNWGYRVALREKKVVYENAYGQFIGPHRIKATNNKGKEKIYSAERFLIATGERPRYLGIPGDKEYCISSDDLFSLPYCPGKTLVVGASYVALECAGFLAGIGLDVTVMVRSILLRGFDQDMANKIGEHMEEHGIKFIRQFVPIKVEQIEAGTPGRLRVVAQSTNSEEIIEGEYNTVMLAIGRDACTRKIGLETVGVKINEKTGKIPVTDEEQTNVPYIYAIGDILEDKVELTPVAIQAGRLLAQRLYAGSTVKCDYENVPTTVFTPLEYGACGLSEEKAVEKFGEENIEVYHSYFWPLEWTIPSRDNNKCYAKIICNTKDNERVVGFHVLGPNAGEVTQGFAAALKCGLTKKQLDSTIGIHPVCAEVFTTLSVTKRSGASILQAGC

SEQ ID NO: 8662 - protein, 499 aa, Homo sapiens
  MOD_RES 498: note = Selenocysteine
MNGPEDLPKSYDYDLIIIGGGSGGLAAAKEAAQYGKKVMVLDFVTPTPLGTRWGLGGTCVNVGCIPKKLMHQAALLGQALQDSRNYGWKVEETVKHDWDRMIEAVQNHIGSLNWGYRVALREKKVVYENAYGQFIGPHRIKATNNKGKEKIYSAERFLIATGERPRYLGIPGDKEYCISSDDLFSLPYCPGKTLVVGASYVALECAGFLAGIGLDVTVMVRSILLRGFDQDMANKIGEHMEEHGIKFIRQFVPIKVEQIEAGTPGRLRVVAQSTNSEEIIEGEYNTVMLAIGRDACTRKIGLETVGVKINEKTGKIPVTDEEQTNVPYIYAIGDILEDKVELTPVAIQAGRLLAQRLYAGSTVKCDYENVPTTVFTPLEYGACGLSEEKAVEKFGEENIEVYHSYFWPLEWTIPSRDNNKCYAKIICNTKDNERVVGFHVLGPNAGEVTQGFAAALKCGLTKKQLDSTIGIHPVCAEVFTTLSVTKRSGASILQAGCCG

SEQ ID NO: 8663 - protein, 499 aa, Homo sapiens; identical to SEQ ID NO: 8662
  MOD_RES 498: note = Selenocysteine

SEQ ID NO: 8664 - protein, 649 aa, Homo sapiens
  MOD_RES 648: note = Selenocysteine
MGCAEGKAVAAAAPTELQTKGKNGDGRRRSAKDHHPGKTLPENPAGFTSTATADSRALLQAYIDGHSVVIFSRSTCTRCTEVKKLFKSLCVPYFVLELDQTEDGRALEGTLSELAAETDLPVVFVKQRKIGGHGPTLKAYQEGRLQKLLKMNGPEDLPKSYDYDLIIIGGGSGGLAAAKEAAQYGKKVMVLDFVTPTPLGTRWGLGGTCVNVGCIPKKLMHQAALLGQALQDSRNYGWKVEETVKHDWDRMIEAVQNHIGSLNWGYRVALREKKVVYENAYGQFIGPHRIKATNNKGKEKIYSAERFLIATGERPRYLGIPGDKEYCISSDDLFSLPYCPGKTLVVGASYVALECAGFLAGIGLDVTVMVRSILLRGFDQDMANKIGEHMEEHGIKFIRQFVPIKVEQIEAGTPGRLRVVAQSTNSEEIIEGEYNTVMLAIGRDACTRKIGLETVGVKINEKTGKIPVTDEEQTNVPYIYAIGDILEDKVELTPVAIQAGRLLAQRLYAGSTVKCDYENVPTTVFTPLEYGACGLSEEKAVEKFGEENIEVYHSYFWPLEWTIPSRDNNKCYAKIICNTKDNERVVGFHVLGPNAGEVTQGFAAALKCGLTKKQLDSTIGIHPVCAEVFTTLSVTKRSGASILQAGCCG

SEQ ID NO: 8665 - protein, 70 aa, Homo sapiens
MNGPEDLPKSYDYDLIIIGGGSGGLAAAKEAAQYGKKVMVLDFVTPTPLGTRWGLGGTCVNVGCIPKKLM

SEQ ID NO: 8666 - protein, 543 aa, Homo sapiens
  MOD_RES 542: note = Selenocysteine
MLSRLVLNSWAQAIIRPRPPKVLGLQVTTFSEAYQEGRLQKLLKMNGPEDLPKSYDYDLIIIGGGSGGLAAAKEAAQYGKKVMVLDFVTPTPLGTRWGLGGTCVNVGCIPKKLMHQAALLGQALQDSRNYGWKVEETVKHDWDRMIEAVQNHIGSLNWGYRVALREKKVVYENAYGQFIGPHRIKATNNKGKEKIYSAERFLIATGERPRYLGIPGDKEYCISSDDLFSLPYCPGKTLVVGASYVALECAGFLAGIGLDVTVMVRSILLRGFDQDMANKIGEHMEEHGIKFIRQFVPIKVEQIEAGTPGRLRVVAQSTNSEEIIEGEYNTVMLAIGRDACTRKIGLETVGVKINEKTGKIPVTDEEQTNVPYIYAIGDILEDKVELTPVAIQAGRLLAQRLYAGSTVKCDYENVPTTVFTPLEYGACGLSEEKAVEKFGEENIEVYHSYFWPLEWTIPSRDNNKCYAKIICNTKDNERVVGFHVLGPNAGEVTQGFAAALKCGLTKKQLDSTIGIHPVCAEVFTTLSVTKRSGASILQAGCCG

SEQ ID NO: 8667 - protein, 104 aa, Homo sapiens
MNGPEDLPKSYDYDLIIIGGGSGGLAAAKEAAQYGKKVMVLDFVTPTPLGTRWGLGGTCVNVGCIPKKLMHQAALLGQALQDSRNYGWKVEETVKHDWDRMIEA

SEQ ID NO: 8668 - protein, 551 aa, Homo sapiens
  MOD_RES 550: note = Selenocysteine
MSCEDGRALEGTLSELAAETDLPVVFVKQRKIGGHGPTLKAYQEGRLQKLLKMNGPEDLPKSYDYDLIIIGGGSGGLAAAKEAAQYGKKVMVLDFVTPTPLGTRWGLGGTCVNVGCIPKKLMHQAALLGQALQDSRNYGWKVEETVKHDWDRMIEAVQNHIGSLNWGYRVALREKKVVYENAYGQFIGPHRIKATNNKGKEKIYSAERFLIATGERPRYLGIPGDKEYCISSDDLFSLPYCPGKTLVVGASYVALECAGFLAGIGLDVTVMVRSILLRGFDQDMANKIGEHMEEHGIKFIRQFVPIKVEQIEAGTPGRLRVVAQSTNSEEIIEGEYNTVMLAIGRDACTRKIGLETVGVKINEKTGKIPVTDEEQTNVPYIYAIGDILEDKVELTPVAIQAGRLLAQRLYAGSTVKCDYENVPTTVFTPLEYGACGLSEEKAVEKFGEENIEVYHSYFWPLEWTIPSRDNNKCYAKIICNTKDNERVVGFHVLGPNAGEVTQGFAAALKCGLTKKQLDSTIGIHPVCAEVFTTLSVTKRSGASILQAGCCG

SEQ ID NO: 8669 - protein, 568 aa, Homo sapiens
  MOD_RES 567: note = Selenocysteine
MPAMLPTGSHSAVLPPSHCSTAPPSTSQEPSSSADPKLCLSPPTSDSRQERNVQFGLAYQEGRLQKLLKMNGPEDLPKSYDYDLIIIGGGSGGLAAAKEAAQYGKKVMVLDFVTPTPLGTRWGLGGTCVNVGCIPKKLMHQAALLGQALQDSRNYGWKVEETVKHDWDRMIEAVQNHIGSLNWGYRVALREKKVVYENAYGQFIGPHRIKATNNKGKEKIYSAERFLIATGERPRYLGIPGDKEYCISSDDLFSLPYCPGKTLVVGASYVALECAGFLAGIGLDVTVMVRSILLRGFDQDMANKIGEHMEEHGIKFIRQFVPIKVEQIEAGTPGRLRVVAQSTNSEEIIEGEYNTVMLAIGRDACTRKIGLETVGVKINEKTGKIPVTDEEQTNVPYIYAIGDILEDKVELTPVAIQAGRLLAQRLYAGSTVKCDYENVPTTVFTPLEYGACGLSEEKAVEKFGEENIEVYHSYFWPLEWTIPSRDNNKCYAKIICNTKDNERVVGFHVLGPNAGEVTQGFAAALKCGLTKKQLDSTIGIHPVCAEVFTTLSVTKRSGASILQAGCCG

SEQ ID NO: 8670 - protein, 175 aa, Homo sapiens
MNGPEDLPKSYDYDLIIIGGGSGGLAAAKEAAQYGKKVMVLDFVTPTPLGTRWGLGGTCVNVGCIPKKLMHQAALLGQALQDSRNYGWKVEETVKHDWDRMIEAVQNHIGSLNWGYRVALREKKVVYENAYGQFIGPHRIKATNNKGKEKIYSAERFLIATGERPRYLGIPGDKE

SEQ ID NO: 8671 - protein, 53 aa, Homo sapiens
MNGPEDLPKSYDYDLIIIGGGSGGLAAAKEAAQYGKKVMVLDFVTPTPLGTRW

SEQ ID NO: 8672 - protein, 72 aa, Homo sapiens
MNGPEDLPKSYDYDLIIIGGGSGGLAAAKEAAQYGKKVMVLDFVTPTPLGTRWGLGGTCVNVGCIPKKLMHQ

SEQ ID NO: 8673 - protein, 139 aa, Homo sapiens
MLSRLVLNSWAQAIIRPRPPKVLGLQVTTFSEAYQEGRLQKLLKMNGPEDLPKSYDYDLIIIGGGSGGLAAAKEAAQYGKKVMVLDFVTPTPLGTRWGLGGTCVNVGCIPKKLMHQAALLGQALQDSRNYGWKVEETGM

SEQ ID NO: 8674 - protein, 459 aa, Homo sapiens [sequence omitted]

SEQ ID NO: 8675 - protein, 547 aa, Homo sapiens
MEDGRALEGTLSELAAETDLPVVFVKQRKIGGHGPTLKAYQEGRLQKLLKMNGPEDLPKSYDYDLIIIGGGSGGLAAAKEAAQYGKKVMVLDFVTPTPLGTRWGLGGTCVNVGCIPKKLMHQAALLGQALQDSRNYGWKVEETVKHDWDRMIEAVQNHIGSLNWGYRVALREKKVVYENAYGQFIGPHRIKATNNKGKEKIYSAERFLIATGERPRYLGIPGDKEYCISSDDLFSLPYCPGKTLVVGASYVALECAGFLAGIGLDVTVMVRSILLRGFDQDMANKIGEHMEEHGIKFIRQFVPIKVEQIEAGTPGRLRVVAQSTNSEEIIEGEYNTVMLAIGRDACTRKIGLETVGVKINEKTGKIPVTDEEQTNVPYIYAIGDILEDKVELTPVAIQAGRLLAQRLYAGSTVKCDYENVPTTVFTPLEYGACGLSEEKAVEKFGEENIEVYHSYFWPLEWTIPSRDNNKCYAKIICNTKDNERVVGFHVLGPNAGEVTQGFAAALKCGLTKKQLDSTIGIHPVCAEVFTTLSVTKRSGASILQAGC

SEQ ID NO: 8676 - protein, 314 aa, Homo sapiens
MGSQALPPGPMQTLIFFDMEATGLPFSQPKVTELCLLAVHRCALESPPTSQGPPPTVPPPPRVVDKLSLCVAPGKACSPAASEITGLSTAVLAAHGRQCFDDNLANLLLAFLRRQPQPWCLVAHNGDRYDFPLLQAELAMLGLTSALDGAFCVDSITALKALERASSPSEHGPRKSYSLGSIYTRLYGQSPPDSHTAEGDVLALLSICQWRPQALLRWVDAHARPFGTIRPMYGVTASARTKPRPSAVTTTAHLATTRNTSPSLGESRGTKDLPPVKDPGALSREGLLAPLGLLAILTLAVATLYGLSLATPGE

SEQ ID NO: 8677 - protein, 369 aa, Homo sapiens
MGPGARRQGRIVQGRPEMCFCPPPTPLPPLRILTLGTHTPTPCSSPGSAAGTYPTMGSQALPPGPMQTLIFFDMEATGLPFSQPKVTELCLLAVHRCALESPPTSQGPPPTVPPPPRVVDKLSLCVAPGKACSPAASEITGLSTAVLAAHGRQCFDDNLANLLLAFLRRQPQPWCLVAHNGDRYDFPLLQAELAMLGLTSALDGAFCVDSITALKALERASSPSEHGPRKSYSLGSIYTRLYGQSPPDSHTAEGDVLALLSICQWRPQALLRWVDAHARPFGTIRPMYGVTASARTKPRPSAVTTTAHLATTRNTSPSLGESRGTKDLPPVKDPGALSREGLLAPLGLLAILTLAVATLYGLSLATPGE

SEQ ID NO: 8678 - protein, 175 aa, Homo sapiens
MLGLTSALDGAFCVDSITALKALERASSPSEHGPRKSYSLGSIYTRLYGQSPPDSHTAEGDVLALLSICQWRPQALLRWVDAHARPFGTIRPMYGVTASARTKPRPSAVTTTAHLATTRNTSPSLGESRGTKDLPPVKDPGALSREGLLAPLGLLAILTLAVATLYGLSLATPGE

SEQ ID NO: 8679 - protein, 314 aa, Homo sapiens; identical to SEQ ID NO: 8676

SEQ ID NO: 8680 - protein, 304 aa, Homo sapiens
MQTLIFFDMEATGLPFSQPKVTELCLLAVHRCALESPPTSQGPPPTVPPPPRVVDKLSLCVAPGKACSPAASEITGLSTAVLAAHGRQCFDDNLANLLLAFLRRQPQPWCLVAHNGDRYDFPLLQAELAMLGLTSALDGAFCVDSITALKALERASSPSEHGPRKSYSLGSIYTRLYGQSPPDSHTAEGDVLALLSICQWRPQALLRWVDAHARPFGTIRPMYGVTASARTKPRPSAVTTTAHLATTRNTSPSLGESRGTKDLPPVKDPGALSREGLLAPLGLLAILTLAVATLYGLSLATPGE

SEQ ID NO: 8681 - protein, 175 aa, Homo sapiens; identical to SEQ ID NO: 8678

SEQ ID NO: 8682 - protein, 1170 aa, Homo sapiens
MGLAWGLGVLFLMHVCGTNRIPESGGDNSVFDIFELTGAARKGSGRRLVKGPDPSSPAFRIEDANLIPPVPDDKFQDLVDAVRAEKGFLLLASLRQMKKTRGTLLALERKDHSGQVFSVVSNGKAGTLDLSLTVQGKQHVVSVEEALLATGQWKSITLFVQEDRAQLYIDCEKMENAELDVPIQSVFTRDLASIARLRIAKGGVNDNFQGVLQNVRFVFGTTPEDILRNKGCSSSTSVLLTLDNNVVNGSSPAIRTNYIGHKTKDLQAICGISCDELSSMVLELRGLRTIVTTLQDSIRKVTEENKELANELRRPPLCYHNGVQYRNNEEWTVDSCTECHCQNSVTICKKVSCPIMPCSNATVPDGECCPRCWPSDSADDGWSPWSEWTSCSTSCGNGIQQRGRSCDSLNNRCEGSSVQTRTCHIQECDKRFKQDGGWSHWSPWSSCSVTCGDGVITRIRLCNSPSPQMNGKPCEGEARETKACKKDACPINGGWGPWSPWDICSVTCGGGVQKRSRLCNNPTPQFGGKDCVGDVTENQICNKQDCPIDGCLSNPCFAGVKCTSYPDGSWKCGACPPGYSGNGIQCTDVDECKEVPDACFNHNGEHRCENTDPGYNCLPCPPRFTGSQPFGQGVEHATANKQVCKPRNPCTDGTHDCNKNAKCNYLGHYSDPMYRCECKPGYAGNGIICGEDTDLDGWPNENLVCVANATYHCKKDNCPNLPNSGQEDYDKDGIGDACDDDDDNDKIPDDRDNCPFHYNPAQYDYDRDDVGDRCDNCPYNHNPDQADTDNNGEGDACAADIDGDGILNERDNCQYVYNVDQRDTDMDGVGDQCDNCPLEHNPDQLDSDSDRIGDTCDNNQDIDEDGHQNNLDNCPYVPNANQADHDKDGKGDACDHDDDNDGIPDDKDNCRLVPNPDQKDSDGDGRGDACKDDFDHDSVPDIDDICPENVDISETDFRRFQMIPLDPKGTSQNDPNWVVRHQGKELVQTVNCDPGLAVGYDEFNAVDFSGTFFINTERDDDYAGFVFGYQSSSRFYVVMWKQVTQSYWDTNPTRAQGYSGLSVKVVNSTTGPGEHLRNALWHTGNTPGQVRTLWHDPRHIGWKDFTAYRWRLSHRPKTGFIRVVMYEGKKIMADSGPIYDKTYAGGRLGLFVFSQEMVFFSDLKYECRDP

SEQ ID NO: 8683 - protein, 94 aa, Homo sapiens
MGLAWGLGVLFLMHVCGTNRIPESGGDNSVFDIFELTGAARKGSGRRLVKGPDPSSPAFRIEDANLIPPVPDDKFQDLVDAVRAEKGFLLLASL

SEQ ID NO: 8684 - protein, 166 aa, Homo sapiens
MAAGNVVLVPLVTVEMASSAQMLMSAKKCLMPASTTMESTGVRTRTPATTACPAPHASPAHSPSARVSNMPRPTNRCASPIPLCLCHRAGCYCEAISEQWTQKHFQACQRREDSLELANKTTLTSSFRNTGSRGQSTKGRAHTRDDCMKKIWRNCYMFGTKSFSGD

SEQ ID NO: 8685 - protein, 1172 aa, Homo sapiens
MVWRLVLLALWVWPSTQAGHQDKDTTFDLFSISNINRKTIGAKQFRGPDPGVPAYRFVRFDYIPPVNADDLSKITKIMRQKEGFFLTAQLKQDGKSRGTLLALEGPGLSQRQFEIVSNGPADTLDLTYWIDGTRHVVSLEDVGLADSQWKNVTVQVAGETYSLHVGCDLIDSFALDEPFYEHLQAEKSRMYVAKGSARESHFRGLLQNVHLVFENSVEDILSKKGCQQGQGAEINAISENTETLRLGPHVTTEYVGPSSERRPEVCERSCEELGNMVQELSGLHVLVNQLSENLKRVSNDNQFLWELIGGPPKTRNMSACWQDGRFFAENETWVVDSCTTCTCKKFKTICHQITCPPATCASPSFVEGECCPSCLHSVDGEEGWSPWAEWTQCSVTCGSGTQQRGRSCDVTSNTCLGPSIQTRACSLSKCDTRIRQDGGWSHWSPWSSCSVTCGVGNITRIRLCNSPVPQMGGKNCKGSGRETKACQGAPCPIDGRWSPWSPWSACTVTCAGGIRERTRVCNSPEPQYGGKACVGDVQERQMCNKRSCPVDGCLSNPCFPGAQCSSFPDGSWSCGSCPVGFLGNGTHCEDLDECALVPDICFSTSKVPRCVNTQPGFHCLPCPPRYRGNQPVGVGLEAAKTEKQVCEPENPCKDKTHNCHKHAECIYLGHFSDPMYKCECQTGYAGDGLICGEDSDLDGWPNLNLVCATNATYHCIKDNCPHLPNSGQEDFDKDGIGDACDDDDDNDGVTDEKDNCQLLFNPRQADYDKDEVGDRCDNCPYVHNPAQIDTDNNGEGDACSVDIDGDDVFNERDNCPYVYNTDQRDTDGDGVGDHCDNCPLVHNPDQTDVDNDLVGDQCDNNEDIDDDGHQNNQDNCPYISNANQADHDRDGQGDACDPDDDNDGVPDDRDNCRLVFNPDQEDLDGDGRGDICKDDFDNDNIPDIDDVCPENNAISETDFRNFQMVPLDPKGTTQIDPNWVIRHQGKELVQTANSDPGIAVGFDEFGSVDFSGTFYVNTDRDDDYAGFVFGYQSSSRFYVVMWKQVTQTYWEDQPTRAYGYSGVSLKVVNSTTGTGEHLRNALWHTGNTPGQVRTLWHDPRNIGWKDYTAYRWHLTHRPKTGYIRVLVHEGKQVMADSGPIYDQTYAGGRLGLFVFSQEMVYFSDLKYECRDI

SEQ ID NO: 8686 - protein, 430 aa, Homo sapiens
DDDNDGVTDEKDNCQLLFNPRQADYDKDEVGDRCDNCPYVHNPAQIDTDNNGEGDACSVDIDGDDVFNERDNCPYVYNTDQRDTDGDGVGDHCDNCPLVHNPDQTDVDNDLVGDQCDNNEDIDDDGHQNNQDNCPYISNANQADHDRDGQGDACDPDDDNDGVPDDRDNCRLVFNPDQEDLDGDGRGDICKDDFDNDNIPDIDDVCPENNAISETDFRNFQMVPLDPKGTTQIDPNWVIRHQGKELVQTANSDPGIAVGFDEFGSVDFSGTFYVNTDRDDDYAGFVFGYQSSSRFYVVMWKQVTQTYWEDQPTRAYGYSGVSLKVVNSTTGTGEHLRNALWHTGNTPGQVRTLWHDPRNIGWKDYTAYRWHLTHRPKTGYIRVLVHEGKQVMADSGPIYDQTYAGGRLGLFVFSQEMVYFSDLKYECRVI

SEQ ID NO: 8687 - protein, 83 aa, Homo sapiens
MVWRLVLLALWVWPSTQAGHQDKDTTFDLFSISNINRKTIGAKQFRGPDPGVPAYRFVRFDYIPPVNADDLSKITKIMRQKEG

SEQ ID NO: 8688 - protein, 482 aa, Homo sapiens
MAALMTPGTGAPPAPGDFSGEGSQGLPDPSPEPKQLPELIRMKRDGGRLSEADIRGFVAAVVNGSAQGAQIGAMLMAIRLRGMDLEETSVLTQALAQSGQQLEWPEAWRQQLVDKHSTGGVGDKVSLVLAPALAACGCKVPMISGRGLGHTGGTLDKLESIPGFNVIQSPEQMQVLLDQAGCCIVGQSEQLVPADGILYAARDVTATVDSLPLITASILSKKLVEGLSALVVDVKFGGAAVFPNQEQARELAKTLVGVGASLGLRVAAALTAMDKPLGRCVGHALEVEEALLCMDGAGPPDLRDLVTTLGGALLWLSGHAGTQAQGAARVAAALDDGSALGRFERMLAAQGVDPGLARALCSGSPAERRQLLPRAREQEELLAPADGTVELVRALPLALVLHELGAGRSRAGEPLRLGVGAELLVDVGQRLRRGTPWLRVHRDGPALSGPQSRALQEALVLSDRAPFAAPSPFAELVLPPQQ

SEQ ID NO: 8689 - protein, 482 aa, Homo sapiens; identical to SEQ ID NO: 8688

SEQ ID NO: 8690 - protein, 482 aa, Homo sapiens; identical to SEQ ID NO: 8688

SEQ ID NO: 8691 - protein, 410 aa, Homo sapiens
MEAENAGSYSLQQAQAFYTFPFQQLMAEAPNMAVVNEQQMPEEVPAPAPAQEPVQEAPKGRKRKPRTTEPKQPVEPKKPVESKKSGKSAKSKEKQEKITDTFKVKRKVDRFNGVSEAELLTKTLPDILTFNLDIVIIGINPGLMAAYKGHHYPGPGNHFWKCLFMSGLSEVQLNHMDDHTLPGKYGIGFTNMVERTTPGSKDLSSKEFREGGRILVQKLQKYQPRIAVFNGKCIYEIFSKEVFGVKVKNLEFGLQPHKIPDTETLCYVMPSSSARCAQFPRAQDKVHYYIKLKDLRDQLKGIERNMDVQEVQYTFDLQLAQEDAKKMAVKEEKYDPGYEAAYGGAYGENPCSSEPCGFSSNGLIESVELRGESAFSGIPNGQWMTQSFTDQIPSFSNHCGTQEQEEESHA

SEQ ID NO: 8692 - protein, 206 aa, Homo sapiens
MITLYQGSMVLDLPTWWKGPRPAAKISPGIYEIFSKEVFGVKVKNLEFGLQPHKIPDTETLCYVMPSSSARCAQFPRAQDKVHYYIKLKDLRDQLKGIERNMDVQEVQYTFDLQLAQEDAKKMAVKEEKYDPGYEAAYGGAYGENPCSSEPCGFSSNGLIESVELRGESAFSGIPNGQWMTQSFTDQIPSFSNHCGTQEQEEESHA

SEQ ID NO: 8693 - protein, 1097 aa, Homo sapiens
MSSCRSLCCGDISQSAVLFLCQGTLAMLDWQNGSMGRSGEALLLDTAHVLFTLSSQIKEPTLEMFLSRILASWTNSAIQVLESSSPSLTDSLNGNSSIVGRLLEYVYTHWEHPLDALRHQTKIMFKNLLQMHRLTVEGADFVPDPFFVELTESLLRLEWHIKGKYTCLGCLVECIGVEHILAIDKTIPSQILEVMGDQSLVPYASDLLETMFRNHKSHLKSQTAESSWIDQWHETWVSPLLFILCEGNLDQKSYVIDYYLPKLLSYSPESLQYMVKILQTSIDAKTGQEQSFPSLGSCNSRGALGALMACLRIARAHGHLQSATDTWENLVSDARIKQGLIHQHCQVRIDTLGLLCESNRSTEIVSMEEMQWIQFFITYNLNSQSPGVRQQICSLLKKLFCRIQESSQVLYKLEQSKSKREPENELTKQHPSVSLQQYKNFMSSICNSLFEALFPGSSYSTRFSALTILGSIAEVFHVPEGRIYTVYQLSHDIDVGRFQTLMECFTSTFEDVKILAFDLLMKLSKTAVHFQDSGKLQGLFQAALELSTSTKPYDCVTASYLLNFLIWQDALPSSLSAYLTQQVACDNGDRPAAVVERNTLMVIKCLMENLEEEVSQAENSLLQAAAAFPMYGRVHCITGALQKLSLNSLQLVSEWRPVVEKLLLMSYRLSTVVSPVIQSSSPEGLIPMDTDSESASRLQMILNEIQPRDTNDYFNQAKILKEHDSFDMKDLNASVVNIDTSTEIKGKEVKTCDVTAQMVLVCCWRSMKEVALLLGMLCQLLPMQPVPESSDGLLTVEQVKEIGDYFKQHLLQSRHRGAFELAYTGFVKLTEVLNRCPNVSLQKLPEQWLWSVLEEIKCSDPSSKLCATRRSAGIPFYIQALLASEPKKGRMDLLKITMKELISLAGPTDDIQSTVPQVHALNILRALFRDTRLGENIIPYVADGAKAAILGFTSPVWAVRNSSTLLFSALITRIFGVKRAKDEHSKTNRMTGREFFSRFPELYPFLLKQLETVANTVDSDMGEPNRHPSMFLLLLVLERLYASPMDGTSSALSMGPFVPFIMRVLLCCPGWSAVARSQLTATSTSWVQAILLPQPPE

SEQ ID NO: 8694 - protein, 1880 aa, Homo sapiens
MGVKKKKEMQVAALTICHQDLETLKSFADVEGKNLASLLLHCVQLTDGVSQIHYIKQIVPLLEKADKNGMCDPTIQSCLDILAGIYLSLSLKNPLKKVLASSLNSLPDFFLPEAMHRFTSRLQEELNTTDLYSYRKVTDNISSCMENFNLGRASVNNLLKNVLHFLQKSLIEILEENRKCAGNHIIQTQLMNDLLVGIRVSMMLVQKVQDFQGNLWKTSDSPIWQNMCGLLSIFTKVLSDDDLLQTVQSTSGLAIILFIKTMFHPSEKIPHLISSVLLRSVDCTSVPEWFMSSCRSLCCGDISQSAVLFLCQGTLAMLDWQNGSMGRSGEALLLDTAHVLFTLSSQIKEPTLEMFLSRILASWTNSAIQVLESSSPSLTDSLNGNSSIVGRLLEYVYTHWEHPLDALRHQTKIMFKNLLQMHRLTVEGADFVPDPFFVELTESLLRLEWHIKGKYTCLGCLVECIGVEHILAIDKTIPSQILEVMGDQSLVPYASDLLETMFRNHKSHLKSQTAESSWIDQWHETWVSPLLFILCEGNLDQKSYVIDYYLPKLLSYSPESLQYMVKILQTSIDAKTGQEQSFPSLGSCNSRGALGALMACLRIARAHGHLQSATDTWENLVSDARIKQGLIHQHCQVRIDTLGLLCESNRSTEIVSMEEMQWIQFFITYNLNSQSPGVRQQICSLLKKKLFCRIQESSQVLYKLEQSKSKREPENELTKQHPSVSLQQYKNFMSSICNSLFEALFPGSSYSTRFSALTILGSIAEVFHVPEGRIYTVYQLSHDIDVGRFQTLMECFTSTFEDVKILAFDLLMKLSKTAVHFQDSGKLQGLFQAALELSTSTKPYDCVTASYLLNFLIWQDALPSSLSAYLTQQVACDNGDRPAAVVERNTLMVIKCLMENLEEEVSQAENSLLQAAAAFPMYGRVHCITGALQKLSLNSLQLVSEWRPVVEKLLLMSYRLSTVVSPVIQSSSPEGLIPMDTDSESASRLQMILNEIQPRDTNDYFNQAKILKEHDSFDMKDLNASVVNIDTSTEIKGKEVKTCDVTAQMVLVCCWRSMKEVALLLGMLCQLLPMQPVPESSDGLLTVEQVKEIGDYFKQHLLQSRHRGAFELAYTGFVKLTEVLNRCPNVSLQKLPEQWLWSVLEEIKCSDPSSKLCATRRSAGIPFYIQALLASEPKKGRMDLLKITMKELISLAGPTDDIQSTVPQVHALNILRALFRDTRLGENIIPYVADGAKAAILGFTSPVWAVRNSSTLLFSALITRIFGVKRAKDEHSKTNRCGHSPVYHSREMAARALVPFVMIDHIPNTIRTLLSTLPSCTDQCFRQNHIHGTLLQVFHLLQAYSDSKHGTNSDFQHELTDITVCTKAKLWLAKRQNPCLVTRAVYIDILFLLTCCLNRSAKDNQPVLESLGFWEEVRGIISGSELITGFPWAFKVPGLPQYLQSLTRLAIAAVWAAAAKSGERETNVPISFSQLLESAFPEVRSLTLEALLEKFLAAASGLGEKGVPPLLCNMGEKFLLLAMKENHPECFCKILKILHCMDPGEWLPQTEHCVHLTPKEFLIWTMDIASNERSEIQSVALRLASKVISHHMQTCVENRELIAAELKQWVQLVILSCEDHLPTESRLAVVEVLTSTTPLFLTNPHPILELQDTLALWKCVLTLLQSEEQAVRDAATETVTTAMSQENTCQSTEFAFCQVDASIALALALAVLCDLLQQWDQLAPGLPILLGWLLGESDDLVACVESMHQVEEDYLFEKAEVNFWAETLIFVKYLCKHLFCLLSKSGWRPPSPEMLCHLQRMVSEQCHLLSQFFRELPPAAEFVKTVEFTRLRIQEERTLACLRLLAFLEGKEGEDTLVLSVWDSYAESRQLTLPRTEAAC

SEQ ID NO: 8695 - protein, 1953 aa, Homo sapiens
MGVKKKKEMQVAALTICHQDLETLKSFADVEGKNLASLLLHCVQLTDGVSQIHYIKQIVPLLEKADKNGMCDPTIQSCLDILAGIYLSLSLKNPLKKVLASSLNSLPDFFLPEAMHRFTSRLQEELNTTDLYSYRKVTDNISSCMENFNLGRASVNNLLKNVLHFLQKSLIEILEENRKCAGNHIIQTQLMNDLLVGIRVSMMLVQKVQDFQGNLWKTSDSPIWQNMCGLLSIFTKVLSDDDLLQTVQSTSGLAIILFIKTMFHPSEKIPHLISSVLLRSVDCTSVPEWFMSSCRSLCCGDISQSAVLFLCQGTLAMLDWQNGSMGRSGEALLLDTAHVLFTLSSQIKEPTLEMFLSRILASWTNSAIQVLESSSPSLTDSLNGNSSIVGRLLEYVYTHWEHPLDALRHQTKIMFKNLLQMHRLTVEGADFVPDPFFVELTESLLRLEWHIKGKYTCLGCLVECIGVEHILAIDKTIPSQILEVMGDQSLVPYASDLLETMFRNHKSHLKSQTAESSWIDQWHETWVSPLLFILCEGNLDQKSYVIDYYLPKLLSYSPESLQYMVKILQTSIDAKTGQEQSFPSLGSCNSRGALGALMACLRIARAHGHLQSATDTWENLVSDARIKQGLIHQHCQVRIDTLGLLCESNRSTEIVSMEEMQWIQFFITYNLNSQSPGVRQQICSLLKKLFCRIQESSQVLYKLEQSKSKREPENELTKQHPSVSLQQYKNFMSSICNSLFEALFPGSSYSTRFSALTILGSIAEVFHVPEGRIYTVYQLSHDIDVGRFQTLMECFTSTFEDVKILAFDLLMKLSKTAVHFQDSGKLQGLFQAALELSTSTKPYDCVTASYLLNFLIWQDALPSSLSAYLTQQVACDNGDRPAAVVERNTLMVIKCLMENLEEEVSQAENSLLQAAAAFPMYGRVHCITGALQKLSLNSLQLVSEWRPVVEKLLLMSYRLSTVVSPVIQSSSPEGLIPMDTDSESASRLQMILNEIQPRDTNDYFNQAKILKEHDSFDMKDLNASVVNIDTSTEIKGKEVKTCDVTAQMVLVCCWRSMKEVALLLGMLCQLLPMQPVPESSDGLLTVEQVKEIGDYFKQHLLQSRHRGAFELAYTGFVKLTEVLNRCPNVSLQKLPEQWLWSVLEEIKCSDPSSKLCATRRSAGIPFYIQALLASEPKKGRMDLLKITMKELISLAGPTDDIQSTVPQVHALNILRALFRDTRLGENIIPYVADGAKAAILGFTSPVWAVRNSSTLLFSALITRIFGVKRAKDEHSKTNRMTGREFFSRFPELYPFLLKQLETVANTVDSDMGEPNRHPSMFLLLLVLERLYASPMDGTSSALSMGPFVPFIMRCGHSPVYHSREMAARALVPFVMIDHIPNTIRTLLSTLPSCTDQCFRQNHIHGTLLQVFHLLQAYSDSKHGTNSDFQHELTDITVCTKAKLWLAKRQNPCLVTRAVYIDILFLLTCCLNRSAKDNQPVLESLGFWEEVRGIISGSELITGFPWAFKVPGLPQYLQSLTRLAIAAVWAAAAKSGERETNVPISFSQLLESAFPEVRSLTLEALLEKFLAAASGLGEKGVPPLLCNMGEKFLLLAMKENHPECFCKILKILHCMDPGEWLPQTEHCVHLTPKEFLIWTMDIASNERSEIQSVALRLASKVISHHMQTCVENRELIAAELKQWVQLVILSCEDHLPTESRLAVVEVLTSTTPLFLTNPHPILELQDTLALWKCVLTLLQSEEQAVRDAATETVTTAMSQENTCQSTEFAFCQVDASIALALALAVLCDLLQQWDQLAPGLPILLGWLLGESDDLVACVESMHQVEEDYLFEKAEVNFWAETLIFVKYLCKHLFCLLSKSGWRPPSPEMLCHLQRMVSEQCHLLSQFFRELPPAAEFVKTVEFTRLRIQEERTLACLRLLAFLEGKEGEDTLVLSVWDSYAESRQLTLPRTEAAC

SEQ ID NO: 8696 - protein, 1953 aa, Homo sapiens; identical to SEQ ID NO: 8695

SEQ ID NO: 8697 - protein, 1634 aa, Homo sapiens
MSSCRSLCCGDISQSAVLFLCQGTLAMLDWQNGSMGRSGEALLLDTAHVLFTLSSQIKEPTLEMFLSRILASWTNSAIQVLESSSPSLTDSLNGNSSIVGRLLEYVYTHWEHPLDALRHQTKIMFKNLLQMHRLTVEGADFVPDPFFVELTESLLRLEWHIKGKYTCLGCLVECIGVEHILAIDKTIPSQILEVMGDQSLVPYASDLLETMFRNHKSHLKSQTAESSWIDQWHETWVSPLLFILCEGNLDQKSYVIDYYLPKLLSYSPESLQYMVKILQTSIDAKTGQEQSFPSLGSCNSRGALGALMACLRIARAHGHLQSATDTWENLVSDARIKQGLIHQHCQVRIDTLGLLCESNRSTEIVSMEEMQWIQFFITYNLNSQSPGVRQQICSLLKKLFCRIQESSQVLYKLEQSKSKREPENELTKQHPSVSLQQYKNFMSSICNSLFEALFPGSSYSTRFSALTILGSIAEVFHVPEGRIYTVYQLSHDIDVGRFQTLMECFTSTFEDVKILAFDLLMKLSKTAVHFQDSGKLQGLFQAALELSTSTKPYDCVTASYLLNFLIWQDALPSSLSAYLTQQVACDNGDRPAAVVERNTLMVIKCLMENLEEEVSQAENSLLQAAAAFPMYGRVHCITGALQKLSLNSLQLVSEWRPVVEKLLLMSYRLSTVVSPVIQSSSPEGLIPMDTDSESASRLQMILNEIQPRDTNDYFNQAKILKEHDSFDMKDLNASVVNIDTSTEIKGKEVKTCDVTAQMVLVCCWRSMKEVALLLGMLCQLLPMQPVPESSDGLLTVEQVKEIGDYFKQHLLQSRHRGAFELAYTGFVKLTEVLNRCPNVSLQKLPEQWLWSVLEEIKCSDPSSKLCATRRSAGIPFYIQALLASEPKKGRMDLLKITMKELISLAGPTDDIQSTVPQVHALNILRALFRDTRLGENIIPYVADGAKAAILGFTSPVWASQMTGREFFSRFPELYPFLLKQLETVANTVDSDMGEPNRHPSMFLLLLVLERLYASPMDGTSSALSMGPFVPFIMRCGHSPVYHSREMAARALVPFVMIDHIPNTIRTLLSTLPSCTDQCFRQNHIHGTLLQVFHLLQAYSDSKHGTNSDFQHELTDITVCTKAKLWLAKRQNPCLVTRAVYIDILFLLTCCLNRSAKDNQPVLESLGFWEEVRGIISGSELITGFPWAFKVPGLPQYLQSLTRLAIAAVWAAAAKSGERETNVPISFSQLLESAFPEVRSLTLEALLEKFLAAASGLGEKGVPPLLCNMGEKFLLLAMKENHPECFCKILKILHCMDPGEWLPQTEHCVHLTPKEFLIWTMDIASNERSEIQSVALRLASKVISHHMQTCVENRELIAAELKQWVQLVILSCEDHLPTESRLAVVEVLTSTTPLFLTNPHPILELQDTLALWKCVLTLLQSEEQAVRDAATETVTTAMSQENTCQSTEFAFCQVDASIALALALAVLCDLLQQWDQLAPGLPILLGWLLGESDDLVACVESMHQVEEDYLFEKAEVNFWAETLIFVKYLCKHLFCLLSKSGWRPPSPEMLCHLQRMVSEQCHLLSQFFRELPPAAEFVKTVEFTRLRIQEERTLACLRLLAFLEGKEGEDTLVLSVWDSYAESRQLTLPRTEAAC

SEQ ID NO: 8698 - protein, 894 aa, Homo sapiens
MGVKKKKEMQVAALTICHQDLETLKSFADVEGKNLASLLLHCVQLTDGVSQIHYIKQIVPLLEKADKNGMCDPTIQSCLDILAGIYLSLSLKNPLKKVLASSLNSLPDFFLPEAMHRFTSRLQEELNTTDLYSYRKVTDNISSCMENFNLGRASVNNLLKNVLHFLQKSLIEILEENRKCAGNHIIQTQLMNDLLVGIRVSMMLVQKVQDFQGNLWKTSDSPIWQNMCGLLSIFTKVLSDDDLLQTVQSTSGLAIILFIKTMFHPSEKIPHLISSVLLRSVDCTSVPEWFMSSCRSLCCGDISQSAVLFLCQGTLAMLDWQNGSMGRSGEALLLDTAHVLFTLSSQIKEPTLEMFLSRILASWTNSAIQVLESSSPSLTDSLNGNSSIVGRLLEYVYTHWEHPLDALRHQTKIMFKNLLQMHRLTVEGADFVPDPFFVELTESLLRLEWHIKGKYTCLGCLVECIGVEHILAIDKTIPSQILEVMGDQSLVPYASDLLETMFRNHKSHLKSQTAESSWIDQWHETWVSPLLFILCEGNLDQKSYVIDYYLPKLLSYSPESLQYMVKILQTSIDAKTGQEQSFPSLGSCNSRGALGALMACLRIARAHGHLQSATDTWENLVSDARIKQGLIHQHCQVRIDTLGLLCESNRSTEIVSMEEMQWIQFFITYNLNSQSPGVRQQICSLLKKLFCRIQESSQVLYKLEQSKSKREPENELTKQHPSVSLQQYKNFMSSICNSLFEALFPGSSYSTRFSALTILGSIAEVFHVPEGRIYTVYQLSHDIDVGRFQTLMECFTSTFEDVKILAFDLLMKLSKTAVHFQDSGKLQGLFQAALELSTSTKPYDCVTASYLLNFLIWQDALPSSLSAYLTQQVACDNGDRPAAVVERNTLMGLY

SEQ ID NO: 8699 - protein, 207 aa, Homo sapiens
MAPFEPLASGILLLLWLIAPSRACTCVPPHPQTAFCNSDLVIRAKFVGTPEVNQTTLYQRYEIKMTKMYKGFQALGDAADIRFVYTPAMESVCGYFHRSHNRSEEFLIAGKLQDGLLHITTCSFVAPWNSLSLAQRRGFTKTYTVGCEECTVFPCLSIPCKLQSGTHCLWTDQLLQGSEKGFQSRHLACLPREPGLCTWQSLRSQIA

SEQ ID NO: 8700 - protein, 143 aa, Homo sapiens
MTKMYKGFQALGDAADIRFVYTPAMESVCGYFHRSHNRSEEFLIAGKLQDGLLHITTCSFVAPWNSLSLAQRRGFTKTYTVGCEECTVFPCLSIPCKLQSGTHCLWTDQLLQGSEKGFQSRHLACLPREPGLCTWQSLRSQIA

SEQ ID NO: 8701 - protein, 261 aa, Homo sapiens
MPLTSGSSTPPPWRVSADTSTGPTTAARSFSLLVRHRPRALCHTNQSLGRGLATTRGRGSDGNGPTGNGDHPNFSLSEGRAFGSLAAQPITSCLSVPAPPFSLGKLQDGLLHITTCSFVAPWNSLSLAQRRGFTKTYTVGCEECTVSAWTLTSNGRSFPGPFPKSWACFLLPLAILCPCGCSPTLRAVPDLSCYFPKPETAPLQILAAPFPCVQYRVITCPSLVPLILPCDYSVIPLPVPEPPGLFLGSPECSPRTQSAVP

SEQ ID NO: 8702 - protein, 96 aa, Homo sapiens [sequence omitted]

SEQ ID NO: 8703 - protein, 165 aa, Homo sapiens
  VARIANT 1: note = MOD_RES - Any amino acid
XPRALCHTNQSLGRGLATTRGRGSDGNGPTGNGDHPNFSLSEGRAFGSLAAQPITSCLSVPAPPFSLGKLQDGLLHITTCSFVAPWNSLSLAQRRGFTKTYTVGCEECTVFPCLSIPCKLQSGTHCLWTDQLLQGSEKGFQSRHLACLPREPGLCTWQSLRSQIA

SEQ ID NO: 8704 - protein, 136 aa, Homo sapiens
MAPFEPLASGILLLLWLIAPSRACTCVPPHPQTAFCNSDLVIRAKFVGTPEVNQTTLYQRYEIKMTKMYKGFQALGDAADIRFVYTPAMESVCGYFHRSHNRSEEFLIAGEAPSPRPVPHQPVPGARPSNHEGARL

SEQ ID NO: 8705 - protein, 220 aa, Homo sapiens
MGAAARTLRLALGLLLLATLLRPADACSCSPVHPQQAFCNADVVIRAKAVSEKEVDSGNDIYGNPIKRIQYEIKQIKMFKGPEKDIEFIYTAPSSAVCGVSLDVGGKKEYLIAGKAEGDGKMHITLCDFIVPWDTLSTTQKKSLNHRYQMGCECKITRCPMIPCYISSPDECLWMDWVTEKNINGHQAKFFACIKRSDGSCAWYRGAAPPKQEFLDIEDP

SEQ ID NO: 8706 - protein, 143 aa, Homo sapiens
MFKGPEKDIEFIYTAPSSAVCGVSLDVGGKKEYLIAGKAEGDGKMHITLCDFIVPWDTLSTTQKKSLNHRYQMGCECKITRCPMIPCYISSPDECLWMDWVTEKNINGHQAKFFACIKRSDGSCAWYRGAAPPKQEFLDIEDP

SEQ ID NO: 8707 - protein, 211 aa, Homo sapiens
MTPWLGLIVLLGSWSLGDWGAEACTCSPSHPQDAFCNSDIVIRAKVVGKKLVKEGPFGTLVYTIKQMKMYRGFTKMPHVQYIHTEASESLCGLKLEVNKYQYLLTGRVYDGKMYTGLCNFVERWDQLTLSQRKGLNYRYHLGCNCKIKSCYYLPCFVTSKNECLWTDMLSNFGYPGYQSKHYACIRQKGGYCSWYRGWAPPDKSIINATDP

SEQ ID NO: 8708 - protein, 145 aa, Homo sapiens
MKMYRGFTKMPHVQYIHTEASESLCGLKLEVNKYQYLLTGRVYDGKMYTGLCNFVERWDQLTLSQRKGLNYRYHLGCNCKIKSCYYLPCFVTSKNECLWTDMLSNFGYPGYQSKHYACIRQKGGYCSWYRGWAPPDKSIINATDP

SEQ ID NO: 8709 - protein, 224 aa, Homo sapiens
MPGSPRPAPSWVLLLRLLALLRPPGLGEACSCAPAHPQQHICHSALVIRAKISSEKVVPASADPADTEKMLRYEIKQIKMFKGFEKVKDVQYIYTPFDSSLCGVKLEANSQKQYLLTGQVLSDGKVFIHLCNYIEPWEDLSLVQRESLNHHYHLNCGCQITTCYTVPCTISAPNECLWTDWLLERKLYGYQAQHYVCMKHVDGTCSWYRGHLPLRKEFVDIVQP

SEQ ID NO: 8710 - protein, 235 aa, Homo sapiens
MDPARPLGLSILLLFLTEAALGDAAQEPTGNNAEICLLPLDYGPCRALLLRYYYDRYTQSCRQFLYGGCEGNANNFYTWEACDDACWRIEKVPKVCRLQVSVDDQCEGSTEKYFFNLSSMTCEKFFSGGCHRNRIENRFPDEATCMGFCAPKKIPSFCYSPKDEGLCSANVTRYYFNPRYRTCDAFTYTGCGGNDNNFVSREDCKRACAKALKKKKKMPKLRFASRIRKIRKKQF

SEQ ID NO: 8711 - protein, 124 aa, Homo sapiens
MDPARPLGLSILLLFLTEAALGDAAQEPTGNNAEICLLPLDYGPCRALLLRYYYDRYTQSCRQFLYGGCEGNANNFYTWEACDDACWRIEKVPKLSSMTSLKKKKKMPKLRFASRIRKIRKKQF

SEQ ID NO: 8712 - protein, 501 aa, Homo sapiens
MAAASVTPPGSLELLQPGFSKTLLGTKLEAKYLCSACRNVLRRPFQAQCGHRYCSFCLASILSSGPQNCAACVHEGIYEEGISILESSSAFPDNAARREVESLPAVCPSDGCTWKGTLKEYESCHEGRCPLMLTECPACKGLVRLGEKERHLEHECPERSLSCRHCRAPCCGADVKAHHEVCPKFPLTCDGCGKKKIPREKFQDHVKTCGKCRVPCRFHAIGCLETVEGEKQQEHEVQWLREHLAMLLSSVLEAKPLLGDQSHAGSELLQRCESLEKKTATFENIVCVLNREVERVAMTAEACSRQHRLDQDKIEALSSKVQQLERSIGLKDLAMADLEQKVLEMEASTYDGVFIWKISDFARKRQEAVAGRIPAIFSPAFYTSRYGYKMCLRIYLNGDGTGRGTHLSLFFVVMKGPNDALLRWPFNQKVTLMLLDQNNREHVIDAFRPDVTSSSFQRPVNDMNIASGCPLFCPVSKMEAKNSYVRDDAIFIKAIVDLTGL

SEQ ID NO: 8713 - protein, 553 aa, Homo sapiens
MAAASVTPPGSLELLQPGFSKTLLGTKLEAKYLCSACRNVLRRPFQAQCGHRYCSFCLASILSSGPQNCAACVHEGIYEEGISILESSSAFPDNAARREVESLPAVCPSDGCTWKGTLKEYEVKMPACGMVTEAPAVGSRPRSPSSYDLVLHVPLTGAEACLMSVEEETELLLRSCHEGRCPLMLTECPACKGLVRLGEKERHLEHECPERSLSCRHCRAPCCGADVKAHHEVCPKFPLTCDGCGKKKIPREKFQDHVKTCGKCRVPCRFHAIGCLETVEGEKQQEHEVQWLREHLAMLLSSVLEAKPLLGDQSHAGSELLQRCESLEKKTATFENIVCVLNREVERVAMTAEACSRQHRLDQDKIEALSSKVQQLERSIGLKDLAMADLEQKVLEMEASTYDGVFIWKISDFARKRQEAVAGRIPAIFSPAFYTSRYGYKMCLRIYLNGDGTGRGTHLSLFFVVMKGPNDALLRWPFNQKVTLMLLDQNNREHVIDAFRPDVTSSSFQRPVNDMNIASGCPLFCPVSKMEAKNSYVRDDAIFIKAIVDLTGL

SEQ ID NO: 8714 - protein, 422 aa, Homo sapiens
MAAASVTPPGSLELLQPGFSKTLLGTKLEAKYLCSACRNVLRRPFQAQCGHRYCSFCLASILSSGPQNCAACVHEGIYEEGISILESSSAFPDNAARREVESLPAVCPSDGCTWKGTLKEYEVKMPACGMVTEAPAVGSRPRSPSSYDLVLHVPLTGAEACLMSVEEETELLLRSCHEGRCPLMLTECPACKGLVRLGEKERHLEHECPERSLSCRHCRAPCCGADVKRLDQDKIEALSSKVQQLERSIGLKDLAMADLEQKVLEMEASTYDGVFIWKISDFARKRQEAVAGRIPAIFSPAFYTSRYGYKMCLRIYLNGDGTGRGTHLSLFFVVMKGPNDALLRWPFNQKVTLMLLDQNNREHVIDAFRPDVTSSSFQRPVNDMNIASGCPLFCPVSKMEAKNSYVRDDAIFIKAIVDLTGL

SEQ ID NO: 8715 - protein, 121 aa, Homo sapiens
MAAASVTPPGSLELLQPGFSKTLLGTKLEAKYLCSACRNVLRRPFQAQCGHRYCSFCLASILSSGPQNCAACVHEGIYEEGISILESSSAFPDNAARREVESLPAVCPSDGCTWKGTLKEY

SEQ ID NO: 8716 - protein, 172 aa, Homo sapiens
MAAASVTPPGSLELLQPGFSKTLLGTKLEAKYLCSACRNVLRRPFQAQCGHRYCSFCLASILSSGPQNCAACVHEGIYEEGISILESSSAFPDNAARREVESLPAVCPSDGCTWKGTLKEYESCHEGRCPLMLTECPACKGLVRLGEKERHLEHECPERSLSCRHCRAPCCG

SEQ ID NO: 8717 - protein, 193 aa, Homo sapiens
MAAASVTPPGSLELLQPGFSKTLLGTKLEAKYLCSACRNVLRRPFQAQCGHRYCSFCLASILSSGPQNCAACVHEGIYEEGISILESSSAFPDNAARREVESLPAVCPSDGCTWKGTLKEYESCHEGRCPLMLTECPACKGLVRLGEKERHLEHECPERSLSCRHCRAPCCGADVKAHHEVCPKFPLTCDGCG

SEQ ID NO: 8718 - protein, 500 aa, Homo sapiens
VAGRALSSGRAATVGALFAGVTALMAAASVTPPGSLELLQPGFSKTLLGTKLEAKYLCSACRNVLRRPFQAQCGHRYCSFCLASILSSGPQNCAACVHEGIYEEGISILESSSAFPDNAARREVESLPAVCPSDGCTWKGTLKEYESCHEGRCPLMLTECPACKGLVRLGEKERHLEHECPERSLSCRHCRAPCCGADVKFQDHVKTCGKCRVPCRFHAIGCLETVEGEKQQEHEVQWLREHLAMLLSSVLEAKPLLGDQSHAGSELLQRCESLEKKTATFENIVCVLNREVERVAMTAEACSRQHRLDQDKIEALSSKVQQLERSIGLKDLAMADLEQKVLEMEASTYDGVFIWKISDFARKRQEAVAGRIPAIFSPAFYTSRYGYKMCLRIYLNGDGTGRGTHLSLFFVVMKGPNDALLRWPFNQKVTLMLLDQNNREHVIDAFRPDVTSSSFQRPVNDMNIASGCPLFCPVSKMEAKNSYVRDDAIFIKAIVDLTGL

SEQ ID NO: 8719 - protein, 501 aa, Homo sapiens; identical to SEQ ID NO: 8712

SEQ ID NO: 8720 - protein, 543 aa, Homo sapiens
MESSKKMDSPGALQTNPPLKLHTDRSAGTPVFVPEQGGYKEKFVKTVEDKYKCEKCHLVLCSPKQTECGHRFCESCMAALLSSSSPKCTACQESIVKDKVFKDNCCKREILALQIYCRNESRGCAEQLMLGHLLVHLKNDCHFEELPCVRPDCKEKVLRKDLRDHVEKACKYREATCSHCKSQVPMIALQKHEDTDCPCVVVSCPHKCSVQTLLRSEGTNQQIKAHEASSAVQHVNLLKEWSNSLEKKVSLLQNESVEKNKSIQSLHNQICSFEIEIERQKEMLRNNESKILHLQRVIDSQAEKLKELDKEIRPFRQNWEEADSMKSSVESLQNRVTELESVDKSAGQVARNTGLLESQLSRHDQMLSVHDIRLADMDLRFQVLETASYNGVLIWKIRDYKRRKQEAVMGKTLSLYSQPFYTGYFGYKMCARVYLNGDGMGKGTHLSLFFVIMRGEYDALLPWPFKQKVTLMLMDQGSSRRHLGDAFKPDPNSSSFKKPTGEMNIASGCPVFVAQTVLENGTYIKDDTIFIKVIVDTSDLPDP

SEQ ID NO: 8721 - protein, 543 aa, Homo sapiens; identical to SEQ ID NO: 8720

SEQ ID NO: 8722 - protein, 568 aa, Homo sapiens
MESSKKMDSPGALQTNPPLKLHTDRSAGTPVFVPEQGGYKEKFVKTVEDKYKCEKCHLVLCSPKQTECGHRFCESCMAALLSSSSPKCTACQESIVKDKVFKDNCCKREILALQIYCRNESRGCAEQLMLGHLLVHLKNDCHFEELPCVRPDCKEKVLRKDLRDHVEKACKYREATCSHCKSQVPMIALQKHEDTDCPCVVVSCPHKCSVQTLLRSELSAHLSECVNAPSTCSFKRYGCVFQGTNQQIKAHEASSAVQHVNLLKEWSNSLEKKVSLLQNESVEKNKSIQSLHNQICSFEIEIERQKEMLRNNESKILHLQRVIDSQAEKLKELDKEIRPFRQNWEEADSMKSSVESLQNRVTELESVDKSAGQVARNTGLLESQLSRHDQMLSVHDIRLADMDLRFQVLETASYNGVLIWKIRDYKRRKQEAVMGKTLSLYSQPFYTGYFGYKMCARVYLNGDGMGKGTHLSLFFVIMRGEYDALLPWPFKQKVTLMLMDQGSSRRHLGDAFKPDPNSSSFKKPTGEMNIASGCPVFVAQTVLENGTYIKDDTIFIKVIVDTSDLPDP

SEQ ID NO: 8723 - protein, 485 aa, Homo sapiens
MESSKKMDSPGALQTNPPLKLHTDRSAGTPVFVPEQGGYKEKFVKTVEDKYKCEKCHLVLCSPKQTECGHRFCESCMAALLSSSSPKCTACQESIVKDKVFKDNCCKREILALQIYCRNESRGCAEQLMLGHLLVHLKNDCHFEELPCVRPDCKEKVLRKDLRDHVEKACKYREATCSHCKSQVPMIALQVSLLQNESVEKNKSIQSLHNQICSFEIEIERQKEMLRNNESKILHLQRVIDSQAEKLKELDKEIRPFRQNWEEADSMKSSVESLQNRVTELESVDKSAGQVARNTGLLESQLSRHDQMLSVHDIRLADMDLRFQVLETASYNGVLIWKIRDYKRRKQEAVMGKTLSLYSQPFYTGYFGYKMCARVYLNGDGMGKGTHLSLFFVIMRGEYDALLPWPFKQKVTLMLMDQGSSRRHLGDAFKPDPNSSSFKKPTGEMNIASGCPVFVAQTVLENGTYIKDDTIFIKVIVDTSDLPDP

SEQ ID NO: 8724 - protein, 568 aa, Homo sapiens; identical to SEQ ID NO: 8722

SEQ ID NO: 8725 - protein, 94 aa, Homo sapiens
MESSKKMDSPGALQTNPPLKLHTDRSAGTPVFVPEQGGYKEKFVKTVEDKYKCEKCHLVLCSPKQTECGHRFCESCMAALLSSSSPKCTACQES

SEQ ID NO: 8726 - protein, 312 aa, Homo sapiens
MAAGQNGHEEWVGSAYLFVESSLDKVVLSDAYAHPQQKVAVYRALQAALAESGGSPDVLQMLKIHRSDPQLIVQLRFCGRQPCGRFLRAYREGALRAALQRSLAAALAQHSVPLQLELRAGAERLDALLADEERCLSCILAQQPDRLRDEELAELEDALRNLKCGSGARGGDGEVASAPLQPPVPSLSEVKPPPPPPPAQTFLFQGQPVVNRPLSLKDQQTFARSVGLKWRKVGRSLQRGCRALRDPALDSLAYEYEREGLYEQAFQLLRRFVQAEGRRATLQRLVEALEENELTSLAEDLLGLTDPNGGLA

SEQ ID NO: 8727 - protein, 274 aa, Homo sapiens
MATTVSTQRGPVYIGELPQDFLRITPTQQQRQVQLDAQAAQQLQYGGAVGTVGRLNITVVQAKLAKNYGMTRMDPYCRLRLGYAVYETPTAHNGAKNPRWNKVIHCTVPPGVDSFYLEIFDERAFSMDDRIAWTHITIPESLRQGKVEDKWYSLSGRQGDDKEGMINLVMSYALLPAAMVMPPQPVVLMPTVYQQGVGYVPITGMPAVCSPGMVPVALPPAAVNAQPRCSEEDLKAIQDMFPNMDQEVIRSVLEAQRGNKDAAINSLLQMGEEP

SEQ ID NO: 8728 - protein, 352 aa, Homo sapiens
QLSPSQAPAGAQEVARRVTVGSASHGGRRSTMATTVSTQRGPVYIGELPQDFLRITPTQQQRQVQLDAQAAQQLQYGGAVGTVGRLNITVVQAKLAKNYGMTRMDPYCRLRLGYAVYETPTAHNGAKNPRWNKVIHCTVPPGVDSFYLEIFDERAFSMDDRIAWTHITIPESLRQGKVEDKWYSLSGRQGDDKEGMINLVMSYALLPAAMVMPPQPVVLMPTVYQQGVGYVPITGMPAVCSPGMVPVALPPAAVNAQPRCSEEDLKAIQDMFPNMDQEVIRSVLEAQRGNKDAAIPSHLVLGGLSALSCPWDVRLSFSCRSGKCSCCREQLLLPGCWRWWSAFRFHSWHFVM

SEQ ID NO: 8729 - protein, 224 aa, Homo sapiens
MATTVSTQRGPAKLAKNYGMTRMDPYCRLRLGYAVYETPTAHNGAKNPRWNKVIHCTVPPGVDSFYLEIFDERAFSMDDRIAWTHITIPESLRQGKVEDKWYSLSGRQGDDKEGMINLVMSYALLPAAMVMPPQPVVLMPTVYQQGVGYVPITGMPAVCSPGMVPVALPPAAVNAQPRCSEEDLKAIQDMFPNMDQEVIRSVLEAQRGNKDAAINSLLQMGEEP

SEQ ID NO: 8730 - protein, 255 aa, Homo sapiens
MASSTSLPAPGSRPKKPLGKMADWFRQTLLKKPKKRPNSPESTSSDASQPTSQDSPLPPSLSSVTSPSLPPTHASDSGSSRWSKDYDVCVCHSEEDLVAAQDLVSYLEGSTASLRCFLQLRDATPGGAIVSELCQALSSSHCRVLLITPGFLQDPWCKYQMLQALTEAPGAEGCTIPLLSGLSRAAYPPELRFMYYVDGRGPDGGFRQVKEAVMRSNQVLKHLLYHGTPEIGVKLETENPCRASDSHKCDKRYRE

SEQ ID NO: 8731 - protein, 235 aa, Homo sapiens
MASSTSLPAPGSRPKKPLGKMADWFRQTLLKKPKKRPNSPESTSSDASQPTSQDSPLPPSLSSVTSPSLPPTHASDSGSSRWSKDYDVCVCHSEEDLVAAQDLVSYLEGSTASLRCFLQLRDATPGGAIVSELCQALSSSHCRVLLITPGFLQDPWCKYQMLQALTEAPGAEGCTIPLLSGLSRAAYPPELRFMYYVDGRGPDGGFRQVKEAVMRCKLLQEGEGERDSATVSDLL

SEQ ID NO: 8732 - protein, 221 aa, Homo sapiens
MASSTSLPAPGSRPKKPLGKMADWFRQTLLKKPKKRPNSPESTSSDASQPTSQDSPLPPSLSSVTSPSLPPTHASDSGSSRWSKDYDVCVCHSEEDLVAAQDLVSYLEGSTASLRCFLQLRDATPGGAIVSELCQALSSSHCRVLLITPGFLQDPWCKYQMLQALTEAPGAEGCTIPLLSGLSRAAYPPELRFMYYVDGRGPDGGFRQVKEAVMRYLQTLS

SEQ ID NO: 8733 - protein, 221 aa, Homo sapiens; identical to SEQ ID NO: 8732

SEQ ID NO: 8734 - protein, 221 aa, Homo sapiens; identical to SEQ ID NO: 8732

SEQ ID NO: 8735 - protein, 839 aa, Homo sapiens
MMSASRLAGTLIPAMAFLSCVRPESWEPCVEVVPNITYQCMELNFYKIPDNLPFSTKNLDLSFNPLRHLGSYSFFSFPELQVLDLSRCEIQTIEDGAYQSLSHLSTLILTGNPIQSLALGAFSGLSSLQKLVAVETNLASLENFPIGHLKTLKELNVAHNLIQSFKLPEYFSNLTNLEHLDLSSNKIQSIYCTDLRVLHQMPLLNLSLDLSLNPMNFIQPGAFKEIRLHKLTLRNNFDSLNVMKTCIQGLAGLEVHRLVLGEFRNEGNLEKFDKSALEGLCNLTIEEFRLAYLDYYLDDIIDLFNCLTNVSSFSLVSVTIERVKDFSYNFGWQHLELVNCKFGQFPTLKLKSLKRLTFTSNKGGNAFSEVDLPSLEFLDLSRNGLSFKGCCSQSDFGTTSLKYLDLSFNGVITMSSNFLGLEQLEHLDFQHSNLKQMSEFSVFLSLRNLIYLDISHTHTRVAFNGIFNGLSSLEVLKMAGNSFQENFLPDIFTELRNLTFLDLSQCQLEQLSPTAFNSLSSLQVLNMSHNNFFSLDTFPYKCLNSLQVLDYSLNHIMTSKKQELQHFPSSLAFLNLTQNDFACTCEHQSFLQWIKDQRQLLVEVERMECATPSDKQGMPVLSLNITCQMNKTIIGVSVLSVLVVSVVAVLVYKFYFHLMLLAGCIKYGRGENIYDAFVIYSSQDEDWVRNELVKNLEEGVPPFQLCLHYRDFIPGVAIAANIIHEGFHKSRKVIVVVSQHFIQSRWCIFEYEIAQTWQFLSSRAGIIFIVLQKVEKTLLRQQVELYRLLSRNTYLEWEDSVLGRHIFWRRLRKALLDGKSWNPEGTVGTGCNWQEATSI

SEQ ID NO: 8736 - protein, 799 aa, Homo sapiens
MELNFYKIPDNLPFSTKNLDLSFNPLRHLGSYSFFSFPELQVLDLSRCEIQTIEDGAYQSLSHLSTLILTGNPIQSLALGAFSGLSSLQKLVAVETNLASLENFPIGHLKTLKELNVAHNLIQSFKLPEYFSNLTNLEHLDLSSNKIQSIYCTDLRVLHQMPLLNLSLDLSLNPMNFIQPGAFKEIRLHKLTLRNNFDSLNVMKTCIQGLAGLEVHRLVLGEFRNEGNLEKFDKSALEGLCNLTIEEFRLAYLDYYLDDIIDLFNCLTNVSSFSLVSVTIERVKDFSYNFGWQHLELVNCKFGQFPTLKLKSLKRLTFTSNKGGNAFSEVDLPSLEFLDLSRNGLSFKGCCSQSDFGTTSLKYLDLSFNGVITMSSNFLGLEQLEHLDFQHSNLKQMSEFSVFLSLRNLIYLDISHTHTRVAFNGIFNGLSSLEVLKMAGNSFQENFLPDIFTELRNLTFLDLSQCQLEQLSPTAFNSLSSLQVLNMSHNNFFSLDTFPYKCLNSLQVLDYSLNHIMTSKKQELQHFPSSLAFLNLTQNDFACTCEHQSFLQWIKDQRQLLVEVERMECATPSDKQGMPVLSLNITCQMNKTIIGVSVLSVLVVSVVAVLVYKFYFHLMLLAGCIKYGRGENIYDAFVIYSSQDEDWVRNELVKNLEEGVPPFQLCLHYRDFIPGVAIAANIIHEGFHKSRKVIVVVSQHFIQSRWCIFEYEIAQTWQFLSSRAGIIFIVLQKVEKTLLRQQVELYRLLSRNTYLEWEDSVLGRHIFWRRLRKALLDGKSWNPEGTVGTGCNWQEATSI

SEQ ID NO: 8737 - protein, 858 aa, Homo sapiens [sequence omitted]

SEQ ID NO: 8738 - protein, 858 aa, Homo sapiens [sequence omitted]

SEQ ID NO: 8739 - protein, 21 aa, Homo sapiens
MGDHLDLLLGVVLMAGPVFGI

SEQ ID NO: 8740 - protein, 858 aa, Homo sapiens [sequence omitted]

SEQ ID NO: 8741 - protein, 1611 aa, Homo sapiens
QVSPSHPVNENMQVNKIKKNEDAKKRLSVERIYQKKTQLEHILLRPDTYIGSVELVTQQMWVYDEDVGINYREVTFVPGLYKIFDEILVNAADNKQRDPKMSCIRVTIDPENNLISIWNNGKGIPVVEHKVEKMYVPALIFGQLLTSSNYDDDEKKVTGGRNGYGAKLCNIFSTKFTVETASREYKKMFKQTWMDNMGRAGEMELKPFNGEDYTCITFQPDLSKFKMQSLDKDIVALMVRRAYDIAGSTKDVKVFLNGNKLPVKGFRSYVDMYLKDKLDETGNSLKVIHEQVNHRWEVCLTMSEKGFQQISFVNSIATSKGGRHVDYVADQIVTKLVDVVKKKNKGGVAVKAHQRLECSGTISAHCNLRLLGFSDSLASASRVAEITDMHHHIQLIFVFLIEMGFYHVGQAGLELLASLDPPSSASCVSHCTQLFVSNFIYLFLIFLRRSFTFVTQAGVQCTISPTSSSVLAQFFESFLFVAIGCGIVESILNWVKFKAQVQLNKKCSAVKHNRIKGIPKLDDANDAGGRNSTECTLILTEGDSAKTLAVSGLGVVGRDKYGVFPLRGKILNVREASHKQIMENAEINNIIKIVGLQYKKNYEDEDSLKTLRYGKIMIMTDQDQDGSHIKGLLINFIHHNWPSLLRHRFLEEFITPIVKVSKNKQEMAFYSLPEFEEWKSSTPNHKKWKVKYYKGLGTSTSKEAKEYFADMKRHRIQFKYSGPEDDAAISLAFSKKQIDDRKEWLTNFMEDRRQRKLLGLPEDYLYGQTTTYLTYNDFINKELILFSNSDNERSIPSMVDGLKPGQRKVLFTCFKRNDKREVKVAQLAGSVAEMSSYHHGEMSLMMTIINLAQNFVGSNNLNLLQPIGQFGTRLHGGKDSASPRYIFTMLSSLARLLFPPKDDHTLKFLYDDNQRVEPEWYIPIIPMVLINGAEGIGTGWSCKIPNFDVREIVNNIRRLMDGEEPLPMLPSYKNFKGTIEELAPNQYVISGEVAILNSTTIEISELPVRTWTQTYKEQVLEPMLNGTEKTPPLITDYREYHTDTTVKFVVKMTEEKLAEAERVGLHKVFKLQTSLTCNSMVLFDHVGCLKKYDTVLDILRDFFELRLKYYGLRKEWLLGMLGAESAKLNNQARFILEKIDGKIIIENKPKKELIKVLIQRGYDSDPVKAWKEAQQKVPDEEENEESDNEKETEKSDSVTDSGPTFNYLLDMPLWYLTKEKKDELCRLRNEKEQELDTLKRKSPSDLWKEDLATFIEELEAVEAKEKQDEQVGLPGKGGKAKGKKTQMAEVLPSPRGQRVIPRITIEMKAEAEKKNKKKIKNENTEGSPQEDGVELEGLKQRLEKKQKREPGTKTKKQTTLAFKPIKKGKKRNPWSDSESDRSSDESNFDVPPRETEPRRAATKTKFTMDLDSDEDFSDFDEKTDDEDFVPSDASPPKTKTSPKLSNKELKPQKSVVSDLEADDVKGSVPLSSSPPATHFPDETEITNPVPKKNVTVKKTAAKSQSSTSTTGAKKRAAPKGTKRDPALNSGVSQKPDPAKTKNRRKRKPSTSDDSDSNFEKIVSKAVTSKKSKGESDDFHMDFDSAVAPRAKSVRAKKPIKYLEESDEDDLF

SEQ ID NO: 8742 - protein, 1554 aa, Homo sapiens
QVSPSHPVNENMQVNKIKKNEDAKKRLSVERIYQKKTQLEHILLRPDTYIGSVELVTQQMWVYDEDVGINYREVTFVPGLYKIFDEILVNAADNKQRDPKMSCIRVTIDPENNLISIWNNGKGIPVVEHKVEKMYVPALIFGQLLTSSNYDDDEKKVTGGRNGYGAKLCNIFSTKFTVETASREYKKMFKQTWMDNMGRAGEMELKPFNGEDYTCITFQPDLSKFKMQSLDKDIVALMVRRAYDIAGSTKDVKVFLNGNKLPVKGFRSYVDMYLKDKLDETGNSLKVIHEQVNHRWEVCLTMSEKGFQQISFVNSIATSKGGRHVDYVADQIVTKLVDVVKKKNKGGVAVKAHQVKNHMWIFVNALIENPTFDSQTKENMTLQPKSFGSTCQLSEKFIKAAHLYSRFLIDPFFPNMIPNMNLFQAIGCGIVESILNWVKFKAQVQLNKKCSAVKHNRIKGIPKLDDANDAGGRNSTECTLILTEGDSAKTLAVSGLGVVGRDKYGVFPLRGKILNVREASHKQIMENAEINNIIKIVGLQYKKNYEDEDSLKTLRYGKIMIMTDQDQDGSHIKGLLINFIHHNWPSLLRHRFLEEFITPIVKVSKNKQEMAFYSLPEFEEWKSSTPNHKKWKVKYYKGLGTSTSKEAKEYFADMKRHRIQFKYSGPEDDAAISLAFSKKQIDDRKEWLTNFMEDRRQRKLLGLPEDYLYGQTTTYLTYNDFINKELILFSNSDNERSIPSMVDGLKPGQRKVLFTCFKRNDKREVKVAQLAGSVAEMSSYHHGEMSLMMTIINLAQNFVGSNNLNLLQPIGQFGTRLHGGKDSASPRYIFTMLSSLARLLFPPKDDHTLKFLYDDNQRVEPEWYIPIIPMVLINGAEGIGTGWSCKIPNFDVREIVNNIRRLMDGEEPLPMLPSYKNFKGTIEELAPNQYVISGEVAILNSTTIEISELPVRTWTQTYKEQVLEPMLNGTEKTPPLITDYREYHTDTTVKFVVKMTEEKLAEAERVGLHKVFKLQTSLTCNSMVLFDHVGCLKKYDTVLDILRDFFELRLKYYGLRKEWLLGMLGAESAKLNNQARFILEKIDGKIIIENKPKKELIKVLIQRGYDSDPVKAWKEAQQKVPDEEENEESDNEKETEKSDSVTDSGPTFNYLLDMPLWYLTKEKKDELCRLRNEKEQELDTLKRKSPSDLWKEDLATFIEELEAVEAKEKQDEQVGLPGKGGKAKGKKTQMAEVLPSPRGQRVIPRITIEMKAEAEKKNKKKIKNENTEGSPQEDGVELEGLKQRLEKKQKREPGTKTKKQTTLAFKPIKKGKKRNPWSDSESDRSSDESNFDVPPRETEPRRAATKTKFTMDLDSDEDFSDFDEKTDDEDFVPSDASPPKTKTSPKLSNKELKPQKSVVSDLEADDVKGSVPLSSSPPATHFPDETEITNPVPKKNVTVKKTAAKSQSSTSTTGAKKRAAPKGTKRDPALNSGVSQKPDPAKTKNRRKRKPSTSDDSDSNFEKIVSKAVTSKKSKGESDDFHMDFDSAVAPRAKSVRAKKPIKYLEESDEDDLF

SEQ ID NO: 8743 - protein, 1568 aa, Homo sapiens
MEVSPLQPVNENMQVNKIKKNEDAKKRLSVERIYQKKTQLEHILLRPDTYIGSVELVTQQMWVYDEDVGINYREVTFVPGLYKIFDEILVNAADNKQRDPKMSCIRVTIDPENNLISIWNNGKGIPVVEHKVEKMYVPALIFGQLLTSSNYDDDEKKVTGGRNGYGAKLCNIFSTKFTVETASREYKKMFKQAITWMDNMGRAGEMELKPFNGEDYTCITFQPDLSKFKMQSLDKDIVALMVRRAYDIAGSTKDVKVFLNGNKLPVKGFRSYVDMYLKDKLDETGNSLKVIHEQVNHRWEVCLTMSEKGFQQISFVNSIATSKVILFLNYMIYLYIYVFLLFLIYKVDLNIGLAYFTGGRHVDYVADQIVTKLVDVVKKKNKGGVAVKAHQVKNHMWIFVNALIENPTFDSQTKENMTLQPKSFGSTCQLSEKFIKAAIGCGIVESILNWVKFKAQVQLNKKCSAVKHNRIKGIPKLDDANDAGGRNSTECTLILTEGDSAKTLAVSGLGVVGRDKYGVFPLRGKILNVREASHKQIMENAEINNIIKIVGLQYKKNYEDEDSLKTLRYGKIMIMTDQDQDGSHIKGLLINFIHHNWPSLLRHRFLEEFITPIVKVSKNKQEMAFYSLPEFEEWKSSTPNHKKWKVKYYKGLGTSTSKEAKEYFADMKRHRIQFKYSGPEDDAAISLAFSKKQIDDRKEWLTNFMEDRRQRKLLGLPEDYLYGQTTTYLTYNDFINKELILFSNSDNERSIPSMVDGLKPGQRKVLFTCFKRNDKREVKVAQLAGSVAEMSSYHHGEMSLMMTIINLAQNFVGSNNLNLLQPIGQFGTRLHGGKDSASPRYIFTMLSSLARLLFPPKDDHTLKFLYDDNQRVEPEWYIPIIPMVLINGAEGIGTGWSCKIPNFDVREIVNNIRRLMDGEEPLPMLPSYKNFKGTIEELAPNQYVISGEVAILNSTTIEISELPVRTWTQTYKEQVLEPMLNGTEKTPPLITDYREYHTDTTVKFVVKMTEEKLAEAERVGLHKVFKLQTSLTCNSMVLFDHVGCLKKYDTVLDILRDFFELRLKYYGLRKEWLLGMLGAESAKLNNQARFILEKIDGKIIIENKPKKELIKVLIQRGYDSDPVKAWKEAQQKVPDEEENEESDNEKETEKSDSVTDSGPTFNYLLDMPLWYLTKEKKDELCRLRNEKEQELDTLKRKSPSDLWKEDLATFIEELEAVEAKEKQDEQVGLPGKGGKAKGKKTQMAEVLPSPRGQRVIPRITIEMKAEAEKKNKKKIKNENTEGSPQEDGVELEGLKQRLEKKQKREPGTKTKKQTTLAFKPIKKGKKRNPWSDSESDRSSDESNFDVPPRETEPRRAATKTKFTMDLDSDEDFSDFDEKTDDEDFVPSDASPPKTKTSPKQNCNKELKPQKSVVSDLEADDVKGSVPLSSSPPATHFPDETEITNPVPKKNVTVKKTAAKSQSSTSTTGAKKRAAPKGTKRDPALNSGVSQKPDPAKTKNRRKRKPSTSDDSDSNFEKIVSKAVTSKKSKGESDDFHMDFDSAVAPRAKSVRAKKPIKYLEESDEDDLF

SEQ ID NO: 8744 - protein, 1531 aa, Homo sapiens
MEVSPLQPVNENMQVNKIKKNEDAKKRLSVERIYQKKTQLEHILLRPDTYIGSVELVTQQMWVYDEDVGINYREVTFVPGLYKIFDEILVNAADNKQRDPKMSCIRVTIDPENNLISIWNNGKGIPVVEHKVEKMYVPALIFGQLLTSSNYDDDEKKVTGGRNGYGAKLCNIFSTKFTVETASREYKKMFKQTWMDNMGRAGEMELKPFNGEDYTCITFQPDLSKFKMQSLDKDIVALMVRRAYDIAGSTKDVKVFLNGNKLPVKGFRSYVDMYLKDKLDETGNSLKVIHEQVNHRWEVCLTMSEKGFQQISFVNSIATSKGGRHVDYVADQIVTKLVDVVKKKNKGGVAVKAHQVKNHMWIFVNALIENPTFDSQTKENMTLQPKSFGSTCQLSEKFIKAAIGCGIVESILNWVKFKAQVQLNKKCSAVKHNRIKGIPKLDDANDAGGRNSTECTLILTEGDSAKTLAVSGLGVVGRDKYGVFPLRGKILNVREASHKQIMENAEINNIIKIVGLQYKKNYEDEDSLKTLRYGKIMIMTDQDQDGSHIKGLLINFIHHNWPSLLRHRFLEEFITPIVKVSKNKQEMAFYSLPEFEEWKSSTPNHKKWKVKYYKGLGTSTSKEAKEYFADMKRHRIQFKYSGPEDDAAISLAFSKKQIDDRKEWLTNFMEDRRQRKLLGLPEDYLYGQTTTYLTYNDFINKELILFSNSDNERSIPSMVDGLKPGQRKVLFTCFKRNDKREVKVAQLAGSVAEMSSYHHGEMSLMMTIINLAQNFVGSNNLNLLQPIGQFGTRLHGGKDSASPRYIFTMLSSLARLLFPPKDDHTLKFLYDDNQRVEPEWYIPIIPMVLINGAEGIGTGWSCKIPNFDVREIVNNIRRLMDGEEPLPMLPSYKNFKGTIEELAPNQYVISGEVAILNSTTIEISELPVRTWTQTYKEQVLEPMLNGTEKTPPLITDYREYHTDTTVKFVVKMTEEKLAEAERVGLHKVFKLQTSLTCNSMVLFDHVGCLKKYDTVLDILRDFFELRLKYYGLRKEWLLGMLGAESAKLNNQARFILEKIDGKIIIENKPKKELIKVLIQRGYDSDPVKAWKEAQQKVPDEEENEESDNEKETEKSDSVTDSGPTFNYLLDMPLWYLTKEKKDELCRLRNEKEQELDTLKRKSPSDLWKEDLATFIEELEAVEAKEKQDEQVGLPGKGGKAKGKKTQMAEVLPSPRGQRVIPRITIEMKAEAEKKNKKKIKNENTEGSPQEDGVELEGLKQRLEKKQKREPGTKTKKQTTLAFKPIKKGKKRNPWSDSESDRSSDESNFDVPPRETEPRRAATKTKFTMDLDSDEDFSDFDEKTDDEDFVPSDASPPKTKTSPKLSNKELKPQKSVVSDLEADDVKGSVPLSSSPPATHFPDETEITNPVPKKNVTVKKTAAKSQSSTSTTGAKKRAAPKGTKRDPALNSGVSQKPDPAKTKNRRKRKPSTSDDSDSNFEKIVSKAVTSKKSKGESDDFHMDFDSAVAPRAKSVRAKKPIKYLEESDEDDLF

SEQ ID NO: 8745 - protein, 1626 aa, Homo sapiens
MAKSGGCGAGAGVGGGNGALTWVTLFDQNNAAKKEESETANKNDSSKKLSVERVYQKKTQLEHILLRPDTYIGSVEPLTQFMWVYDEDVGMNCREVTFVPGLYKIFDEILVNAADNKQRDKNMTCIKVSIDPESNIISIWNNGKGIPVVEHKVEKVYVPALIFGQLLTSSNYDDDEKKVTGGRNGYGAKLCNIFSTKFTVETACKEYKHSFKQTWMNNMMKTSEAKIKHFDGEDYTCITFQPDLSKFKMEKLDKDIVALMTRRAYDLAGSCRGVKVMFNGKKLPVNGFRSYVDLYVKDKLDETGVALKVIHELANERWDVCLTLSEKGFQQISFVNSIATTKGGRHVDYVVDQVVGKLIEVVKKKNKAGVSVKPFQVKNHIWVFINCLIENPTFDSQTKENMTLQPKSFGSKCQLSEKFFKAASNCGIVESILNWVKFKAQTQLNKKCSSVKYSKIKGIPKLDDANDAGGKHSLECTLILTEGDSAKSLAVSGLGVIGRDRYGVFPLRGKILNVREASHKQIMENAEINNIIKIVGLQYKKSYDDAESLKTLRYGKIMIMTDQDQDGSHIKGLLINFIHHNWPSLLKHGFLEEFITPIVKASKNKQELSFYSIPEFDEWKKHIENQKAWKIKYYKGLGTSTAKEAKEYFADMERHRILFRYAGPEDDAAITLAFSKKKIDDRKEWLTNFMEDRRQRRLHGLPEQFLYGTATKHLTYNDFINKELILFSNSDNERSIPSLVDGFKPGQRKVLFTCFKRNDKREVKVAQLAGSVAEMSAYHHGEQALMMTIVNLAQNFVGSNNINLLQPIGQFGTRLHGGKDAASPRYIFTMLSTLARLLFPAVDDNLLKFLYDDNQRVEPEWYIPIIPMVLINGAEGIGTGWACKLPNYDAREIVNNVRRMLDGLDPHPMLPNYKNFKGTIQELGQNQYAVSGEIFVVDRNTVEITELPVRTWTQVYKEQVLEPMLNGTDKTPALISDYKEYHTDTTVKFVVKMTEEKLAQAEAAGLHKVFKLQTTLTCNSMVLFDHMGCLKKYETVQDILKEFFDLRLSYYGLRKEWLVGMLGAESTKLNNQARFILEKIQGKITIENRSKKDLIQMLVQRGYESDPVKAWKEAQEKAAEEDETQNQHDDSSSDSGTPSGPDFNYILNMSLWSLTKEKVEELIKQRDAKGREVNDLKRKSPSDLWKEDLAAFVEELDKVESQEREDVLAGMSGKAIKGKVGKPKVKKLQLEETMPSPYGRRIIPEITAMKADASKKLLKKKKGDLDTAAVKVEFDEEFSGAPVEGAGEEALTPSVPINKGPKPKREKKEPGTRVRKTPTSSGKPSAKKVKKRNPWSDDESKSESDLEETEPVVIPRDSLLRRAAAERPKYTFDFSEEEDDDADDDDDDNNDLEELKVKASPITNDGEDEFVPSDGLDKDEYTFSPGKSKATPEKSLHDKKSQDFGNLFSFPSYSQKSEDDSAKFDSNEEDSASVFSPSFGLKQTDKVPSKTVAAKKGKPSSDTVPKPKRAPKQKKVVEAVNSDSDSEFGIPKKTTTPKGKGRGAKKRKASGSENEGDYNPGRKTSKTTSKKPKKTSFDQDSDVDIFPSDFPTEPPSLPRTGRARKEVKYFAESDEEEDDVDFAMFN

SEQ ID NO: 8746 - protein, 1150 aa, Homo sapiens
MAKSGGCGAGAGVGGGNGALTWVNNAAKKEESETANKNDSSKKLSVERVYQKKTQLEHILLRPDTYIGSVEPLTQFMWVYDEDVGMNCREVTFVPGLYKIFDEILVNAADNKQRDKNMTCIKVSIDPESNIISIWNNGKGIPVVEHKVEKVYVPALIFGQLLTSSNYDDDEKKVTGGRNGYGAKLCNIFSTKFTVETACKEYKHSFKQTWMNNMMKTSEAKIKHFDGEDYTCITFQPDLSKFKMEKLDKDIVALMTRRAYDLAGSCRGVKVMFNGKKLPVNGFRSYVDLYVKDKLDETGVALKVIHELANERWDVCLTLSEKGFQQISFVNSIATTKGGRHVDYVVDQVVGKLIEVVKKKNKAGVSVKPFQVKNHIWVFINCLIENPTFDSQTKENMTLQPKSFGSKCQLSEKFFKAASNCGIVESILNWVKFKAQTQLNKKCSSVKYSKIKGIPKLDDANDAGGKHSLECTLILTEGDSAKSLAVSGLGVIGRDRYGVFPLRGKILNVREASHKQIMENAEINNIIKIVGLQYKKSYDDAESLKTLRYGKIMIMTDQDQDGSHIKGLLINFIHHNWPSLLKHGFLEEFITPIVKASKNKQELSFYSIPEFDEWKKHIENQKAWKIKYYKGLGTSTAKEAKEYFADMERHRILFRYAGPEDDAAITLAFSKKKIDDRKEWLTNFMEDRRQRRLHGLPEQFLYGTATKHLTYNDFINKELILFSNSDNERSIPSLVDGFKPGQRKVLFTCFKRNDKREVKVAQLAGSVAEMSAYHHGEQALMMTIVNLAQNFVGSNNINLLQPIGQFGTRLHGGKDAASPRYIFTMLSTLARLLFPAVDDNLLKFLYDDNQRVEPEWYIPIIPMVLINGAEGIGTGWACKLPNYDAREIVNNVRRMLDGLDPHPMLPNYKNFKGTIQELGQNQYAVSGEIFVVDRNTVEITELPVRTWTQVYKEQVLEPMLNGTDKTPALISDYKEYHTDTTVKFVVKMTEEKLAQAEAAGLHKVFKLQTTLTCNSMVLFDHMGCLKKYETVQDILKEFFDLRLSYYGLRKEWLVGMLGAESTKLNNQARFILEKIQGKITIENRSKKDLIQMLVQRGYESDPVKAWKEAQEKAAEEDETQNQHDDSSSDSGTPSGPDFNYILNMSLWSLT

SEQ ID NO: 8747 - protein, 1621 aa, Homo sapiens
MAKSGGCGAGAGVGGGNGALTWVNNAAKKEESETANKNDSSKKLSVERVYQKKTQLEHILLRPDTYIGSVEPLTQFMWVYDEDVGMNCREVTFVPGLYKIFDEILVNAADNKQRDKNMTCIKVSIDPESNIISIWNNGKGIPVVEHKVEKVYVPALIFGQLLTSSNYDDDEKKVTGGRNGYGAKLCNIFSTKFTVETACKEYKHSFKQTWMNNMMKTSEAKIKHFDGEDYTCITFQPDLSKFKMEKLDKDIVALMTRRAYDLAGSCRGVKVMFNGKKLPVNGFRSYVDLYVKDKLDETGVALKVIHELANERWDVCLTLSEKGFQQISFVNSIATTKGGRHVDYVVDQVVGKLIEVVKKKNKAGVSVKPFQVKNHIWVFINCLIENPTFDSQTKENMTLQPKSFGSKCQLSEKFFKAASNCGIVESILNWVKFKAQTQLNKKCSSVKYSKIKGIPKLDDANDAGGKHSLECTLILTEGDSAKSLAVSGLGVIGRDRYGVFPLRGKILNVREASHKQIMENAEINNIIKIVGLQYKKSYDDAESLKTLRYGKIMIMTDQDQDGSHIKGLLINFIHHNWPSLLKHGFLEEFITPIVKASKNKQELSFYSIPEFDEWKKHIENQKAWKIKYYKGLGTSTAKEAKEYFADMERHRILFRYAGPEDDAAITLAFSKKKIDDRKEWLTNFMEDRRQRRLHGLPEQFLYGTATKHLTYNDFINKELILFSNSDNERSIPSLVDGFKPGQRKVLFTCFKRNDKREVKVAQLAGSVAEMSAYHHGEQALMMTIVNLAQNFVGSNNINLLQPIGQFGTRLHGGKDAASPRYIFTMLSTLARLLFPAVDDNLLKFLYDDNQRVEPEWYIPIIPMVLINGAEGIGTGWACKLPNYDAREIVNNVRRMLDGLDPHPMLPNYKNFKGTIQELGQNQYAVSGEIFVVDRNTVEITELPVRTWTQVYKEQVLEPMLNGTDKTPALISDYKEYHTDTTVKFVVKMTEEKLAQAEAAGLHKVFKLQTTLTCNSMVLFDHMGCLKKYETVQDILKEFFDLRLSYYGLRKEWLVGMLGAESTKLNNQARFILEKIQGKITIENRSKKDLIQMLVQRGYESDPVKAWKEAQEKAAEEDETQNQHDDSSSDSGTPSGPDFNYILNMSLWSLTKEKVEELIKQRDAKGREVNDLKRKSPSDLWKEDLAAFVEELDKVESQEREDVLAGMSGKAIKGKVGKPKVKKLQLEETMPSPYGRRIIPEITAMKADASKKLLKKKKGDLDTAAVKVEFDEEFSGAPVEGAGEEALTPSVPINKGPKPKREKKEPGTRVRKTPTSSGKPSAKKVKKRNPWSDDESKSESDLEETEPVVIPRDSLLRRAAAERPKYTFDFSEEEDDDADDDDDDNNDLEELKVKASPITNDGEDEFVPSDGLDKDEYTFSPGKSKATPEKSLHDKKSQDFGNLFSFPSYSQKSEDDSAKFDSNEEDSASVFSPSFGLKQTDKVPSKTVAAKKGKPSSDTVPKPKRAPKQKKVVEAVNSDSDSEFGIPKKTTTPKGKGRGAKKRKASGSENEGDYNPGRKTSKTTSKKPKKTSFDQDSDVDIFPSDFPTEPPSLPRTGRARKEVKYFAESDEEEDDVDFAMFN

SEQ ID NO: 8748 - protein, 57 aa, Homo sapiens
TLFDQNNAAKKEESETANKNDSSKKLSVERVYQKKTQLEHILLRPDTYIGSVEPLTQ

SEQ ID NO: 8749 - protein, 478 aa, Homo sapiens
MSLWSLTKEKVEELIKQRDAKGREVNDLKRKSPSDLWKEDLAAFVEELDKVESQEREDVLAGMSGKAIKGKVGKPKVKKLQLEETMPSPYGRRIIPEITAMKADASKKLLKKKKGDLDTAAVKVEFDEEFSGAPVEGAGEEALTPSVPINKGPKPKREKKEPGTRVRKTPTSSGKPSAKKVKKRNPWSDDESKSESDLEETEPVVIPRDSLLRRAAAERPKYTFDFSEEEDDDADDDDDDNNDLEELKVKASPITNDGEDEFVPSDGLDKDEYTFSPGKSKATPEKSLHDKKSQDFGNLFSFPSYSQKSEDDSAKFDSNEEDSASVFSPSFGLKQTDKVPSKTVAAKKGKPSSDTVPKPKRAPKQKKVVEAVNSDSDSEFGIPKKTTTPKGKGRGAKKRKASGSENEGDYNPGRKTSKTTSKKPKKTSFDQDSDVDIFPSDFPTEPPSLPRTGRARKEVKYFAESDEEEDDVDFAMFN

SEQ ID NO: 8750 - protein, 478 aa, Homo sapiens; identical to SEQ ID NO: 8749

SEQ ID NO: 8751 - protein, 1001 aa, Homo sapiens
MIFPVARYALRWLRRPEDRAFSRAAMEMALRGVRKVLCVAEKNDAAKGIADLLSNGRMRRREGLSKFNKIYEFDYHLYGQNVTMVMTSVSGHLLAHDFQMQFRKWQSCNPLVLFEAEIEKYCPENFVDIKKTLERETRQCQALVIWTDCDREGENIGFEIIHVCKAVKPNLQVLRARFSEITPHAVRTACENLTEPDQRVSDAVDVRQELDLRIGAAFTRFQTLRLQRIFPEVLAEQLISYGSCQFPTLGFVVERFKAIQAFVPEIFHRIKVTHDHKDGIVEFNWKRHRLFNHTACLVLYQLCVEDPMATVVEVRSKPKSKWRPQALDTVELEKLASRKLRINAKETMRIAEKLYTQGYISYPRTETNIFPRDLNLTVLVEQQTPDPRWGAFAQSILERGGPTPRNGNKSDQAHPPIHPTKYTNNLQGDEQRLYEFIVRHFLACCSQDAQGQETTVEIDIAQERFVAHGLMILARNYLDVYPYDHWSDKILPVYEQGSHFQPSTVEMVDGETSPPKLLTEADLIALMEKHGIGTDATHAEHIETIKARMYVGLTPDKRFLPGHLGMGLVEGYDSMGYEMSKPDLRAELEADLKLICDGKKDKFVVLRQQVQKYKQVFIEAVAKAKKLDEALAQYFGNGTELAQQEDIYPAMPEPIRKCPQCNKDMVLKTKKNGGFYLSCMGFPECRSAVWLPDSVLEASRDSSVCPVCQPHPVYRLKLKFKRGSLPPTMPLEFVCCIGGCDDTLREILDLRFSGGPPRASQPSGRLQANQSLNRMDNSQHPQPADSRQTGSSKALAQTLPPPTAAGESNSVTCNCGQEAVLLTVRKEGPNRGRQFFKCNGGSCNFFLWADSPNPGAGGPPALAYRPLGASLGCPPGPGIHLGGFGNPGDGSGSGTSCLCSQPSVTRTVQKDGPNKGRQFHTCAKPREQQCGFFQWVDENTAPGTSGAPSWTGDRGRTLESEARSKRPRASSSDMGSTAKKPRKCSLCHQPGHTRPFCPQNR

SEQ ID NO: 8752 - protein, 389 aa, Homo sapiens
  VARIANT 1: note = MOD_RES - Any amino acid
XSRAAMEMALRGVRKVLCVAEKNDAAKGIADLLSNGRMRRREGLSKFNKIYEFDYHLYGQNVTMVMTSVSGHLLAHDFQMQFRKWQSCNPLVLFEAEIEKYCPENFVDIKKTLERETRQCQALVIWTDCDREGENIGFEIIHVCKAVKPNLQVLRARFSEITPHAVRTACENLTEPDQRVSDAVDVRQELDLRIGAAFTRFQTLRLQRIFPEVLAEQLISYGSCQFPTLGFVVERFKAIQAFVPEIFHRIKVTHDHKDGIVEFNWKRHRLFNHTACLVLYQLCVEDPMATVVEVRSKPKSKWRPQALDTVELEKLASRKLRINAKETMRIAEKLYTQGYISYPRTETNIFPRDLNLTVLVEQQTPDPRWGAFAQSILERGGPTPRNGNK

SEQ ID NO: 8753 - protein, 531 aa, Homo sapiens
MILARNYLDVYPYDHWSDKILPVYEQGSHFQPSTVEMVDGETSPPKLLTEADLIALMEKHGIGTDATHAEHIETIKARMYVGLTPDKRFLPGHLGMGLVEGYDSMGYEMSKPDLRAELEADLKLICDGKKDKFVVLRQQVQKYKQVFIEAVAKAKKLDEALAQYFGNGTELAQQEDIYPAMPEPIRKCPQCNKDMVLKTKKNGGFYLSCMGFPECRSAVWLPDSVLEASRDSSVCPVCQPHPVYRLKLKFKRGSLPPTMPLEFVCCIGGCDDTLREILDLRFSGGPPRASQPSGRLQANQSLNRMDNSQHPQPADSRQTGSSKALAQTLPPPTAAGESNSVTCNCGQEAVLLTVRKEGPNRGRQFFKCNGGSCNFFLWADSPNPGAGGPPALAYRPLGASLGCPPGPGIHLGGFGNPGDGSGSGTSCLCSQPSVTRTVQKDGPNKGRQFHTCAKPREQQCGFFQWVDENTAPGTSGAPSWTGDRGRTLESEARSKRPRASSSDMGSTAKKPRKCSLCHQPGHTRPFCPQNR

SEQ ID NO: 8754 - protein, 906 aa, Homo sapiens
MNLIIICMARQSCNPLVLFEAEIEKYCPENFVDIKKTLERETRQCQALVIWTDCDREGENIGFEIIHVCKAVKPNLQVLRARFSEITPHAVRTACENLTEPDQRVSDAVDVRQELDLRIGAAFTRFQTLRLQRIFPEVLAEQLISYGSCQFPTLGFVVERFKAIQAFVPEIFHRIKVTHDHKDGIVEFNWKRHRLFNHTACLVLYQLCVEDPMATVVEVRSKPKSKWRPQALDTVELEKLASRKLRINAKETMRIAEKLYTQGYISYPRTETNIFPRDLNLTVLVEQQTPDPRWGAFAQSILERGGPTPRNGNKSDQAHPPIHPTKYTNNLQGDEQRLYEFIVRHFLACCSQDAQGQETTVEIDIAQERFVAHGLMILARNYLDVYPYDHWSDKILPVYEQGSHFQPSTVEMVDGETSPPKLLTEADLIALMEKHGIGTDATHAEHIETIKARMYVGLTPDKRFLPGHLGMGLVEGYDSMGYEMSKPDLRAELEADLKLICDGKKDKFVVLRQQVQKYKQVFIEAVAKAKKLDEALAQYFGNGTELAQQEDIYPAMPEPIRKCPQCNKDMVLKTKKNGGFYLSCMGFPECRSAVWLPDSVLEASRDSSVCPVCQPHPVYRLKLKFKRGSLPPTMPLEFVCCIGGCDDTLREILDLRFSGGPPRASQPSGRLQANQSLNRMDNSQHPQPADSRQTGSSKALAQTLPPPTAAGESNSVTCNCGQEAVLLTVRKEGPNRGRQFFKCNGGSCNFFLWADSPNPGAGGPPALAYRPLGASLGCPPGPGIHLGGFGNPGDGSGSGTSCLCSQPSVTRTVQKDGPNKGRQFHTCAKPREQQCGFFQWVDENTAPGTSGAPSWTGDRGRTLESEARSKRPRASSSDMGSTAKKPRKCSLCHQPGHTRPFCPQNR

SEQ ID NO: 8755 - protein, 862 aa, Homo sapiens
MKTVLMVAEKPSLAQSIAKILSRGSLSSHKGLNGACSVHEYTGTFAGQPVRFKMTSVCGHVMTLDFLGKYNKWDKVDPAELFSQAPTEKKEANPKLNMVKFLQVEGRGCDYIVLWLDCDKEGENICFEVLDAVLPVMNKAHGGEKTVFRARFSSITDTDICNAMACLGEPDHNEALSVDARQELDLRIGCAFTRFQTKYFQGKYGDLDSSLISFGPCQTPTLGFCVERHDKIQSFKPETYWVLQAKVNTDKDRSLLLDWDRVRVFDREIAQMFLNMTKLEKEAQVEATSRKEKAKQRPLALNTVEMLRVASSSLGMGPQHAMQTAERLYTQGYISYPRTETTHYPENFDLKGSLRQQANHPYWADTVKRLLAEGINRPRKGHDAGDHPPITPMKSATEAELGGDAWRLYEYITRHFIATVSHDCKYLQSTISFRIGPELFTCSGKTVLSPGFTEVMPWQSVPLEESLPTCQRGDAFPVGEVKMLEKQTNPPDYLTEAELITLMEKHGIGTDASIPVHINNICQRNYVTVESGRRLKPTNLGIVLVHGYYKIDAELVLPTIRSAVEKQLNLIAQGKADYRQVLGHTLDVFKRKFHYFVDSIAGMDELMEVSFSPLAATGKPLSRCGKCHRFMKYIQAKPSRLHCSHCDETYTLPQNGTIKLYKELRCPLDDFELVLWSSGSRGKSYPLCPYCYNHPPFRDMKKGMGCNECTHPSCQHSLSMLGIGQCVECESGVLVLDPTSGPKWKVACNKCNVVAHCFENAHRVRVSADTCSVCEAALLDVDFNKAKSPLPGDETQHMGCVFCDPVFQELVELKHAASCHPMHRGGPGRRQGRGRGRARRPPGKPNPRRPKDKMSALAAYFV

SEQ ID NO: 8756 - protein, 862 aa, Homo sapiens; identical to SEQ ID NO: 8755

SEQ ID NO: 8757 - protein, 282 aa, Homo sapiens
MFLNMTKLEKEAQVEATSRKEKAKQRPLALNTVEMLRVASSSLGMGPQHAMQTAERLYTQGYISYPRTETTHYPENFDLKGSLRQQANHPYWADTVKRLLAEGINRPRKGHDAGDHPPITPMKSATEAELGGDAWRLYEYITRHFIATVSHDCKYLQSTISFRIGPELFTCSGKTVLSPGFTEVMPWQSVPLEESLPTCQRGDAFPVGEVKMLEKQTNPPDYLTEAELITLMEKHGIGGCACPGPRAGSVSSTQASSLLTKLPRQPCVPSPAPLHGLVSGNW

SEQ ID NO: 8758 - protein, 246 aa, Homo sapiens
MKTVLMVAEKPSLAQSIAKILSRGSLSSHKGLNGACSVHEYTGTFAGQPVRFKMTSVCGHVMTLDFLGKYNKWDKVDPAELFSQAPTEKKEANPKLNMVKFLQVEGRGCDYIVLWLDCDKEGENICFEVLDAVLPVMNKAHGGEKTVFRARFSSITDTDICNAMACLGEPDHNEALSVDARQELDLRIGCAFTRFQTKYFQGKYGDLDSSLISFGPCQTPTLGFCVERHDKIQSFKPETYWVLQAK

SEQ ID NO: 8759 - protein, 121 aa, Homo sapiens
MKTVLMVAEKPSLAQSIAKILSRGSLSSHKGLNGACSVHEYTGTFAGQPVRFKMTSVCGHVMTLDFLGKYNKWDKVDPAELFSQAPTEKKEANPKLNMVKFLQVEGRGCDYIVLWLDCDKE

SEQ ID NO: 8760 - protein, 21 aa, Homo sapiens
MKTVLMVAEKPSLAQSIAKIL

SEQ ID NO: 8761 - protein, 42 aa, Homo sapiens
MKTVLMVAEKPSLAQSIAKILSRGSLSSHKGLNGACSVHEYT

SEQ ID NO: 8762 - protein, 122 aa, Homo sapiens
MKTVLMVAEKPSLAQSIAKILSRGSLSSHKGLNGACSVHEYTGTFAGQPVRFKMTSVCGHVMTLDFLGKYNKWDKVDPAELFSQAPTEKKEANPKLNMVKFLQVEGRGCDYIVLWLDCDKEG

SEQ ID NO: 8763 - protein, 47 aa, Homo sapiens
MKTVLMVAEKPSLAQSIAKILSRGSLSSHKGLNGACSVHEYTGTFAG

SEQ ID NO: 8764 - protein, 132 aa, Homo sapiens
MKTVLMVAEKPSLAQSIAKILSRGSLSSHKGLNGACSVHEYTGTFAGQPVRFKMTSVCGHVMTLDFLGKYNKWDKVDPAELFSQAPTEKKEANPKLPQASVCTQAAPGVRPHPCPPAAARVADRVVPCGPVT

SEQ ID NO: 8765 - protein, 60 aa, Homo sapiens
MKTVLMVAEKPSLAQSIAKILSRGSLSSHKGLNGACSVHEYTGTFAGQPVRFKMTSVCGH

SEQ ID NO: 8766 - protein, 61 aa, Homo sapiens
MKTVLMVAEKPSLAQSIAKILSRGSLSSHKGLNGACSVHEYTGTFAGQPVRFKMTSVCGHV

SEQ ID NO: 8767 - protein, 525 aa, Homo sapiens
  VARIANT 1: note = MOD_RES - Any amino acid
XLDSSLISFGPCQTPTLGFCVERHDKIQSFKPETYWVLQAKVNTDKDRSLLLDWDRVRVFDREIAQMFLNMTKLEKEAQVEATSRKEKAKQRPLALNTVEMLRVASSSLGMGPQHAMQTAERLYTQGYISYPRTETTHYPENFDLKGSLRQQANHPYWADTVKRLLAEGINRPRKGHDAGDHPPITPMKSATEAELGGDAWRLYEYITRHFIATVSHDCKYLQSTISFRIGPELFTCSGKTVLSPGFTEVMPWQSVPLEESLPTCQRGDAFPVGEVKMLEKQTNPPDYLTEAELITLMEKHGIGTDASIPVHINNICQRNYVTVESGRRLKPTNLGIVLVHGYYKIDAELVLPTIRSAVEKQLNLIAQGKADYRQVLGHTLDVFKRKFHYFVDSIAGMDELMEVSFSPLAATGKPLSRCGKCHRFMKYIQAKPSRLHCSHCDETYTLPQNGTIKLYKELRCPLDDFELVLWSSGSRGKSYPLCPYCYNHPPFRDMKKGECSHSLLSTGSCSLFSVPTPALHQAGL

SEQ ID NO: 8768 - protein, 576 aa, Homo sapiens
MDVRFYPAAAGDPASLDFAQCLGYYGYSKFGNNNNYMNMAEANNAFFAASEQTFHTPSLGDEEFEIPPITPPPESDPALGMPDVLLPFQALSDPLPSQGSEFTPQFPPQSLDLPSITISRNLVEQDGVLHSSGLHMDQSHTQVSQYRQDPSLIMRSIVHMTDAARSGVMPPAQLTTINQSQLSAQLGLNLGGASMPHTSPSPPASKSATPSPSSSINEEDADEANRAIGEKRAAPDSGKKPKTPKKKKKKDPNEPQKPVSAYALFFRDTQAAIKGQNPNATFGEVSKIVASMWDSLGEEQKQVYKRKTEAAKKEYLKALAAYRASLVSKAAAESAEAQTIRSVQQTLASTNLTSSLLLNTPLSQHGTVSASPQTLQQSLPRSIAPKPLTMRLPMNQIVTSVTIAANMPSNIGAPLISSMGTTMVGSAPSTQVSPSVQTQQHQMQLQQQQQQQQQQMQQMQQQQLQQHQMHQQIQQQMQQQHFQHHMQQHLQQQQQHLQQQINQQQLQQQLQQRLQLQQLQHMQHQSQPSPRQHSPVASQITSPIPAIGSPQPASQQHQSQIQSQTQTQVLSQVSIF

SEQ ID NO: 8769 - protein, 571 aa, Homo sapiens
MKCQPRSGARRIEERLHYLITTYLKFGNNNNYMNMAEANNAFFAASETFHTPSLGDEEFEIPPITPPPESDPALGMPDVLLPFQALSDPLPSQGSEFTPQFPPQSLDLPSITISRNLVEQDGVLHSSGLHMDQSHTQVSQYRQDPSLIMRSIVHMTDAARSGVMPPAQLTTINQSQLSAQLGLNLGGASMPHTSPSPPASKSATPSPSSSINEEDADEANRAIGEKRAAPDSGKKPKTPKKKKKKDPNEPQKPVSAYALFFRDTQAAIKGQNPNATFGEVSKIVASMWDSLGEEQKQVYKRKTEAAKKEYLKALAAYRASLVSKAAAESAEAQTIRSVQQTLASTNLTSSLLLNTPLSQHGTVSASPQTLQQSLPRSIAPKPLTMRLPMNQIVTSVTIAANMPSNIGAPLISSMGTTMVGSAPSTQVSPSVQTQQHQMQLQQQQQQQQQQMQQMQQQQLQQHQMHQQIQQQMQQQHFQHHMQQHLQQQQQHLQQQINQQQLQQQLQQRLQLQQLQHMQHQSQPSPRQHSPVASQITSPIPAIGSPQPASQQHQSQIQSQTQTQVLSQVSIF

SEQ ID NO: 8770 - protein, 1938 aa, Homo sapiens
MQSFREQSSYHGNQQSYPQEVHGSSRLEEFSPRQAQMFQNFGGTGGSSGSSGSGSGGGRRGAAAAAAAMASETSGHQGYQGFRKEAGDFYYMAGNKDPVTTGTPQPPQRRPSGPVQSYGPPQGSSFGNQYGSEGHVGQFQAQHSGLGGVSHYQQDYTGPFSPGSAQYQQQASSQQQQQQVQQLRQQLYQSHQPLPQATGQPASSSSHLQPMQRPSTLPSSAAGYQLRVGQFGQHYQSSASSSSSSSFPSPQRFSQSGQSYDGSYNVNAGSQYEGHNVGSNAQAYGTQSNYSYQPQSMKNFEQAKIPQGTQQGQQQQQPQQQQHPSQHVMQYTNAATKLPLQSQVGQYNQPEVPVRSPMQFHQNFSPISNPSPAASVVQSPSCSSTPSPLMQTGENLQCGQGSVPMGSRNRILQLMPQLSPTPSMMPSPNSHAAGFKGFGLEGVPEKRLTDPGLSSLSALSTQVANLPNTVQHMLLSDALTPQKKTSKRPSSSKKADSCTNSEGSSQPEEQLKSPMAESLDGGCSSSSEDQGERVRQLSGQSTSSDTTYKGGASEKAGSSPAQGAQNEPPRLNASPAAREEATSPGAKDMPLSSDGNPKVNEKTVGVIVSREAMTGRVEKPGGQDKGSQEDDPAATQRPPSNGGAKETSHASLPQPEPPGGGGSKGNKNGDNNSNHNGEGNGQSGHSAAGPGFTSRTEPSKSPGSLRYSYKDSFGSAVPRNVSGFPQYPTGQEKGDFTGHGERKGRNEKFPSLLQEVLQGYHHHPDRRYSRSTQEHQGMAGSLEGTTRPNVLVSQTNELASRGLLNKSIGSLLENPHWGPWERKSSSTAPEMKQINLTDYPIPRKFEIEPQSSAHEPGGSLSERRSVICDISPLRQIVRDPGAHSLGHMSADTRIGRNDRLNPTLSQSVILPGGLVSMETKLKSQSGQIKEEDFEQSKSQASFNNKKSGDHCHPPSIKHESYRGNASPGAATHDSLSDYGPQDSRPTPMRRVPGRVGGREGMRGRSPSQYHDFAEKLKMSPGRSRGPGGDPHHMNPHMTFSERANRSSLHTPFSPNSETLASAYHANTRAHAYGDPNAGLNSQLHYKRQMYQQQPEEYKDWSSGSAQGVIAAAQHRQEGPRKSPRQQQFLDRVRSPLKNDKDGMMYGPPVGTYHDPSAQEAGRCLMSSDGLPNKGMELKHGSQKLQESCWDLSRQTSPAKSSGPPGMSSQKRYGPPHETDGHGLAEATQSSKPGSVMLRLPGQEDHSSQNPLIMRRRVRSFISPIPSKRQSQDVKNSSTEDKGRLLHSSKEGADKAFNSYAHLSHSQDIKSIPKRDSSKDLPSPDSRNCPAVTLTSPAKTKILPPRKGRGLKLEAIVQKITSPNIRRSASSNSAEAGGDTVTLDDILSLKSGPPEGGSVAVQDADIEKRKGEVASDLVSPANQELHVEKPLPRSSEEWRGSVDDKVKTETHAETVTAGKEPPGAMTSTTSQKPGSNQGRPDGSLGGTAPLIFPDSKNVPPVGILAPEANPKAEEKENDTVTISPKQEGFPPKGYFPSGKKKGRPIGSVNKQKKQQQPPPPPPQPPQIPEGSADGEPKPKKQRQRRERRKPGAQPRKRKTKQAVPIVEPQEPEIKLKYATQPLDKTDAKNKSFYPYIHVVNKCELGAVCTIINAEEEEQTKLVRGRKGQRSLTPPPSSTESKALPASSFMLQGPVVTESSVMGHLVCCLCGKWASYRNMGDLFGPFYPQDYAATLPKNPPPKRATEMQSKVKVRHKSASNGSKTDTEEEEEQQQQQKEQRSLAAHPRFKRRHRSEDCGGGPRSLSRGLPCKKAATEGSSEKTVLDSKPSVPTTSEGGPELELQIPELPLDSNEFWVHEGCILWANGIYLVCGRLYGLQEALEIAREMKCSHCQEAGATLGCYNKGCSFRYHYPCAIDADCLLHEENFSVRCPKHKVRLWR

SEQ ID NO: 8771 - protein, 1960 aa, Homo sapiens [sequence omitted]

SEQ ID NO: 8772 - protein, 179 aa, Homo sapiens
MSTGSLSDVEDLQEVEMLECDGLKMDSNKEFVTSNESTEESSNCENGSPQKGRGGLGKRRKAPTKKSPLSGVSQEGKQVQRNAANARERARMRVLSKAFSRLKTTLPWVPPDTKLSKLDTLRLASSYIAHLRQILANDKYENGYIHPVNLTWPFMVAGKPESDLKEVVTASRLCGTTAS

SEQ ID NO: 8773 - protein, 179 aa, Homo sapiens; identical to SEQ ID NO: 8772

SEQ ID NO: 8774 - protein, 654 aa, Homo sapiens
MNQPQRMAPVGTDKELSDLLDFSMMFPLPVTNGKGRPASLAGAQFGGSGLEDRPSSGSWGSGDQSSSSFDPSRTFSEGTHFTESHSSLSSSTFLGPGLGGKSGERGAYASFGRDAGVGGLTQAGFLSGELALNSPGPLSPSGMKGTSQYYPSYSGSSRRRAADGSLDTQPKKVRKVPPGLPSSVYPPSSGEDYGRDATAYPSAKTPSSTYPAPFYVADGSLHPSAELWSPPGQAGFGPMLGGGSSPLPLPPGSGPVGSSGSSSTFGGLHQHERMGYQLHGAEVNGGLPSASSFSSAPGATYGGVSSHTPPVSGADSLLGSRGTTAGSSGDALGKALASIYSPDHSSNNFSSSPSTPVGSPQGLAGTSQWPRAGAPGALSPSYDGGLHGLQSKIEDHLDEAIHVLRSHAVGTAGDMHTLLPGHGALASGFTGPMSLGGRHAGLVGGSHPEDGLAGSTSLMHNHAALPSQPGTLPDLSRPPDSYSGLGRAGATAAASEIKREEKEDEENTSAADHSEEEKKELKAPRARTSPDEDEDDLLPPEQKAEREKERRVANNARERLRVRDINEAFKELGRMCQLHLNSEKPQTKLLILHQAVSVILNLEQQVRERNLNPKAACLKRREEEKVSGVVGDPQMVLSAPHPGLSEAHNPAGHM

SEQ ID NO: 8775 - protein, 651 aa, Homo sapiens
MNQPQRMAPVGTDKELSDLLDFSMMFPLPVTNGKGRPASLAGAQFGGSGLEDRPSSGSWGSGDQSSSSFDPSRTFSEGTHFTESHSSLSSSTFLGPGLGGKSGERGAYASFGRDAGVGGLTQAGFLSGELALNSPGPLSPSGMKGTSQYYPSYSGSSRRRAADGSLDTQPKKVRKVPPGLPSSVYPPSSGEDYGRDATAYPSAKTPSSTYPAPFYVADGSLHPSAELWSPPGQAGFGPMLGGGSSPLPLPPGSGPVGSSGSSSTFGGLHQHERMGYQLHGAEVNGGLPSASSFSSAPGATYGGVSSHTPPVSGADSLLGSRGTTAGSSGDALGKALASIYSPDHSSNNFSSSPSTPVGSPQGLAGTSQWPRAGAPGALSPSYDGGLHGLQSKIEDHLDEAIHVLRSHAVGTAGDMHTLLPGHGALASGFTGPMSLGGRHAGLVGGSHPEDGLAGSTSLMHNHAALPSQPGTLPDLSRPPDSYSGLGRAGATAAASEIKREEKEDEENTSAADHSEEEKKELKAPRARTSSTDEVLSLEEKDLRDRERRMANNARERVRVRDINEAFRELGRMCQMHLKSDKAQTKLLILQQAVQVILGLEQQVRERNLNPKAACLKRREEEKVSGVVGDPQMVLSAPHPGLSEAHNPAGHM

SEQ ID NO: 8776 - protein, 658 aa, Homo sapiens
MNQPQRMAPVGTDKELSDLLDFSMMFPLPVTNGKGRPASLAGAQFGGSGKSGERGAYASFGRDAGVGGLTQAGFLSGELALNSPGPLSPSGMKGTSQYYPSYSGSSRRRAADGSLDTQPKKVRKVPPGLPSSVYPPSSGEDYGRDATAYPSAKTPSSTYPAPFYVADGSLHPSAELWSPPGQAGFGPMLGGGSSPLPLPPGSGPVGSSGSSSTFGGLHQHERMGYQLHGAEVNGGLPSASSFSSAPGATYGGVSSHTPPVSGADSLLGSRGTTAGSSGDALGKALASIYSPDHSSNNFSSSPSTPVGSPQGLAGTSQWPRAGAPGALSPSYDGGLHGLQSKIEDHLDEAIHVLRSHAVGTAGDMHTLLPGHGALASGFTGPMSLGGRHAGLVGGSHPEDGLAGSTSLMHNHAALPSQPGTLPDLSRPPDSYSGLGRAGATAAASEIKREEKEDEENTSAADHSEEEKKELKAPRARTRCQPTPRHSPPSPHQDAHVHRPHAHRTHTGRPSAGPTLFPQPHCLPLAPSRRPPHSPDEDEDDLLPPEQKAEREKERRVANNARERLRVRDINEAFKELGRMCQLHLNSEKPQTKLLILHQAVSVILNLEQQVRERNLNPKAACLKRREEEKVSGVVGDPQMVLSAPHPGLSEAHNPAGHM

SEQ ID NO: 8777 - protein, 651 aa, Homo sapiens; identical to SEQ ID NO: 8775

SEQ ID NO: 8778 - protein, 157 aa, Homo sapiens
MGYQLHGAEVNGGLPSASSFSSAPGATYGGVSSHTPPVSGADSLLGSRGTTAGSSGDALGKALASIYSPDHSSNNFSSSPSTPVGSPQGLAGTSQWPRAGAPGALSPSYDGGLHGLVGGSHPEDGLAGSTSLMHNHAALPSQPGTLPDLSRPPDSYS

SEQ ID NO: 8779 - protein, 671 aa, Homo sapiens
MHHQQRMAALGTDKELSDLLDFSAMFSPPVSSGKNGPTSLASGHFTGSNVEDRSSSGSWGNGGHPSPSRNYGDGTPYDHMTSRDLGSHDNLSPPFVNSRIQSKTERGSYSSYGRESNLQGCHQQSLLGGDMDMGNPGTLSPTKPGSQYYQYSSNNPRRRPLHSSAMEVQTKKVRKVPPGLPSSVYAPSASTADYNRDSPGYPSSKPATSTFPSSFFMQDGHHSSDPWSSSSGMNQPGYAGMLGNSSHIPQSSSYCSLHPHERLSYPSHSSADINSSLPPMSTFHRSGTNHYSTSSCTPPANGTDSIMANRGSGAAGSSQTGDALGKALASIYSPDHTNNSFSSNPSTPVGSPPSLSAGTAVWSRNGGQASSSPNYEGPLHSLQSRIEDRLERLDDAIHVLRNHAVGPSTAMPGGHGDMHGIIGPSHNGAMGGLGSGYGTGLLSANRHSLMVGTHREDGVALRGSHSLLPNQVPVPQLPVQSATSPDLNPPQDPYRGMPPGLQGQSVSSGSSEIKSDDEGDENLQDTKSSEDKKLDDDKKDIKSITRSRSSNNDDEDLTPEQKAEREKERRMANNARERLRVRDINEAFKELGRMVQLHLKSDKPQTKLLILHQAVAVILSLEQQVRERNLNPKAACLKRREEEKVSSEPPPLSLAGPHPGMGDASNHMGQM

SEQ ID NO: 8780 - protein, 667 aa, Homo sapiens
MHHQQRMAALGTDKELSDLLDFSAMFSPPVSSGKNGPTSLASGHFTGSNVEDRSSSGSWGNGGHPSPSRNYGDGTPYDHMTSRDLGSHDNLSPPFVNSRIQSKTERGSYSSYGRESNLQGCHQQSLLGGDMDMGNPGTLSPTKPGSQYYQYSSNNPRRRPLHSSAMEVQTKKVRKVPPGLPSSVYAPSASTADYNRDSPGYPSSKPATSTFPSSFFMQDGHHSSDPWSSSSGMNQPGYAGMLGNSSHIPQSSSYCSLHPHERLSYPSHSSADINSSLPPMSTFHRSGTNHYSTSSCTPPANGTDSIMANRGSGAAGSSQTGDALGKALASIYSPDHTNNSFSSNPSTPVGSPPSLSAGTAVWSRNGGQASSSPNYEGPLHSLQSRIEDRLERLDDAIHVLRNHAVGPSTAMPGGHGDMHGIIGPSHNGAMGGLGSGYGTGLLSANRHSLMVGTHREDGVALRGSHSLLPNQVPVPQLPVQSATSPDLNPPQDPYRGMPPGLQGQSVSSGSSEIKSDDEGDENLQDTKSSEDKKLDDDKKDIKSITSNNDDEDLTPEQKAEREKERRMANNARERLRVRDINEAFKELGRMVQLHLKSDKPQTKLLILHQAVAVILSLEQQVRERNLNPKAACLKRREEEKVSSEPPPLSLAGPHPGMGDASNHMGQM

SEQ ID NO: 8781 - protein, 773 aa, Homo sapiens
MFSKRLEKIAQVPLLFPFIFIILTNYSKMEGAVESQPSFFKTSQDIVTCTWVENCYSSFSRRPLEQMFCKHQSKNIISWTGMVAHTCNPSTLGGQGLCDFAKMHHQQRMAALGTDKELSDLLDFSAMFSPPVSSGKNGPTSLASGHFTGSNVEDRSSSGSWGNGGHPSPSRNYGDGTPYDHMTSRDLGSHDNLSPPFVNSRIQSKTERGSYSSYGRESNLQGCHQQSLLGGDMDMGNPGTLSPTKPGSQYYQYSSNNPRRRPLHSSAMEVQTKKVRKVPPGLPSSVYAPSASTADYNRDSPGYPSSKPATSTFPSSFFMQDGHHSSDPWSSSSGMNQPGYAGMLGNSSHIPQSSSYCSLHPHERLSYPSHSSADINSSLPPMSTFHRSGTNHYSTSSCTPPANGTDSIMANRGSGAAGSSQTGDALGKALASIYSPDHTNNSFSSNPSTPVGSPPSLSAGTAVWSRNGGQASSSPNYEGPLHSLQSRIEDRLERLDDAIHVLRNHAVGPSTAMPGGHGDMHGIIGPSHNGAMGGLGSGYGTGLLSANRHSLMVGTHREDGVALRGSHSLLPNQVPVPQLPVQSATSPDLNPPQDPYRGMPPGLQGQSVSSGSSEIKSDDEGDENLQDTKSSEDKKLDDDKKDIKSITRSRSSNNDDEDLTPEQKAEREKERRMANNARERLRVRDINEAFKELGRMVQLHLKSDKPQTKLLILHQAVAVILSLEQQVRERNLNPKAACLKRREEEKVSSEPPPLSLAGPHPGMGDASNHMGQM

SEQ ID NO: 8782 - protein, 511 aa, Homo sapiens
MYCAYTIPGMGGNSLMYYYNGKAVYAPSASTADYNRDSPGYPSSKPATSTFPSSFFMQDGHHSSDPWSSSSGMNQPGYAGMLGNSSHIPQSSSYCSLHPHERLSYPSHSSADINSSLPPMSTFHRSGTNHYSTSSCTPPANGTDSIMANRGSGAAGSSQTGDALGKALASIYSPDHTNNSFSSNPSTPVGSPPSLSAGTAVWSRNGGQASSSPNYEGPLHSLQSRIEDRLERLDDAIHVLRNHAVGPSTAMPGGHGDMHGIIGPSHNGAMGGLGSGYGTGLLSANRHSLMVGTHREDGVALRGSHSLLPNQVPVPQLPVQSATSPDLNPPQDPYRGMPPGLQGQSVSSGSSEIKSDDEGDENLQDTKSSEDKKLDDDKKDIKSITRSRSSNNDDEDLTPEQKAEREKERRMANNARERLRVRDINEAFKELGRMVQLHLKSDKPQTKLLILHQAVAVILSLEQQVRERNLNPKAACLKRREEEKVSSEPPPLSLAGPHPGMGDASNHMGQM

SEQ ID NO: 8783 - protein, 647 aa, Homo sapiens
MFSPPVSSGKNGPTSLASGHFTGSNVEDRSSSGSWGNGGHPSPSRNYGDGTPYDHMTSRDLGSHDNLSPPFVNSRIQSKTERGSYSSYGRESNLQGCHQQSLLGGDMDMGNPGTLSPTKPGSQYYQYSSNNPRRRPLHSSAMEVQTKKVRKVPPGLPSSVYAPSASTADYNRDSPGYPSSKPATSTFPSSFFMQDGHHSSDPWSSSSGMNQPGYAGMLGNSSHIPQSSSYCSLHPHERLSYPSHSSADINSSLPPMSTFHRSGTNHYSTSSCTPPANGTDSIMANRGSGAAGSSQTGDALGKALASIYSPDHTNNSFSSNPSTPVGSPPSLSAGTAVWSRNGGQASSSPNYEGPLHSLQSRIEDRLERLDDAIHVLRNHAVGPSTAMPGGHGDMHGIIGPSHNGAMGGLGSGYGTGLLSANRHSLMVGTHREDGVALRGSHSLLPNQVPVPQLPVQSATSPDLNPPQDPYRGMPPGLQGQSVSSGSSEIKSDDEGDENLQDTKSSEDKKLDDDKKDIKSITRSRSSNNDDEDLTPEQKAEREKERRMANNARERLRVRDINEAFKELGRMVQLHLKSDKPQTKLLILHQAVAVILSLEQQVRERNLNPKAACLKRREEEKVSSEPPPLSLAGPHPGMGDASNHMGQM

SEQ ID NO: 8784 - protein, 537 aa, Homo sapiens
MDMGNPGTLSPTKPGSQYYQYSSNNPRRRPLHSSAMEVQTKKVRKVPPGLPSSVYAPSASTADYNRDSPGYPSSKPATSTFPSSFFMQDGHHSSDPWSSSSGMNQPGYAGMLGNSSHIPQSSSYCSLHPHERLSYPSHSSADINSSLPPMSTFHRSGTNHYSTSSCTPPANGTDSIMANRGSGAAGSSQTGDALGKALASIYSPDHTNNSFSSNPSTPVGSPPSLSAGTAVWSRNGGQASSSPNYEGPLHSLQSRIEDRLERLDDAIHVLRNHAVGPSTAMPGGHGDMHGIIGPSHNGAMGGLGSGYGTGLLSANRHSLMVGTHREDGVALRGSHSLLPNQVPVPQLPVQSATSPDLNPPQDPYRGMPPGLQGQSVSSGSSEIKSDDEGDENLQDTKSSEDKKLDDDKKDIKSITSNNDDEDLTPEQKAEREKERRMANNARERLRVRDINEAFKELGRMVQLHLKSDKPQTKLLILHQAVAVILSLEQQVRERNLNPKAACLKRREEEKVSSEPPPLSLAGPHPGMGDASNHMGQM

SEQ ID NO: 8785 - protein, 643 aa, Homo sapiens
MFSPPVSSGKNGPTSLASGHFTGSNVEDRSSSGSWGNGGHPSPSRNYGDGTPYDHMTSRDLGSHDNLSPPFVNSRIQSKTERGSYSSYGRESNLQGCHQQSLLGGDMDMGNPGTLSPTKPGSQYYQYSSNNPRRRPLHSSAMEVQTKKVRKVPPGLPSSVYAPSASTADYNRDSPGYPSSKPATSTFPSSFFMQDGHHSSDPWSSSSGMNQPGYAGMLGNSSHIPQSSSYCSLHPHERLSYPSHSSADINSSLPPMSTFHRSGTNHYSTSSCTPPANGTDSIMANRGSGAAGSSQTGDALGKALASIYSPDHTNNSFSSNPSTPVGSPPSLSAGTAVWSRNGGQASSSPNYEGPLHSLQSRIEDRLERLDDAIHVLRNHAVGPSTAMPGGHGDMHGIIGPSHNGAMGGLGSGYGTGLLSANRHSLMVGTHREDGVALRGSHSLLPNQVPVPQLPVQSATSPDLNPPQDPYRGMPPGLQGQSVSSGSSEIKSDDEGDENLQDTKSSEDKKLDDDKKDIKSITSNNDDEDLTPEQKAEREKERRMANNARERLRVRDINEAFKELGRMVQLHLKSDKPQTKLLILHQAVAVILSLEQQVRERNLNPKAACLKRREEEKVSSEPPPLSLAGPHPGMGDASNHMGQM

SEQ ID NO: 8786 - protein, 625 aa, Homo sapiens
MEEDSRDVEDRSSSGSWGNGGHPSPSRNYGDGTPYDHMTSRDLGSHDNLSPPFVNSRIQSKTERGSYSSYGRESNLQGCHQQSLLGGDMDMGNPGTLSPTKPGSQYYQYSSNNPRRRPLHSSAMEVQTKKVRKVPPGLPSSVYAPSASTADYNRDSPGYPSSKPATSTFPSSFFMQDGHHSSDPWSSSSGMNQPGYAGMLGNSSHIPQSSSYCSLHPHERLSYPSHSSADINSSLPPMSTFHRSGTNHYSTSSCTPPANGTDSIMANRGSGAAGSSQTGDALGKALASIYSPDHTNNSFSSNPSTPVGSPPSLSAGTAVWSRNGGQASSSPNYEGPLHSLQSRIEDRLERLDDAIHVLRNHAVGPSTAMPGGHGDMHGIIGPSHNGAMGGLGSGYGTGLLSANRHSLMVGTHREDGVALRGSHSLLPNQVPVPQLPVQSATSPDLNPPQDPYRGMPPGLQGQSVSSGSSEIKSDDEGDENLQDTKSSEDKKLDDDKKDIKSITSNNDDEDLTPEQKAEREKERRMANNARERLRVRDINEAFKELGRMVQLHLKSDKPQTKLLILHQAVAVILSLEQQVRERNLNPKAACLKRREEEKVSSEPPPLSLAGPHPGMGDASNHMGQM

SEQ ID NO: 8787 - protein, 600 aa, Homo sapiens
MKDIFFQFIIARVRKCYSLSCLHTLPVVPTLRKTERGSYSSYGRESNLQGCHQSLLGGDMDMGNPGTLSPTKPGSQYYQYSSNNPRRRPLHSSAMEVQTKKVRKVPPGLPSSVYAPSASTADYNRDSPGYPSSKPATSTFPSSFFMQDGHHSSDPWSSSSGMNQPGYAGMLGNSSHIPQSSSYCSLHPHERLSYPSHSSADINSSLPPMSTFHRSGTNHYSTSSCTPPANGTDSIMANRGSGAAGSSQTGDALGKALASIYSPDHTNNSFSSNPSTPVGSPPSLSAGTAVWSRNGGQASSSPNYEGPLHSLQSRIEDRLERLDDAIHVLRNHAVGPSTAMPGGHGDMHGIIGPSHNGAMGGLGSGYGTGLLSANRHSLMVGTHREDGVALRGSHSLLPNQVPVPQLPVQSATSPDLNPPQDPYRGMPPGLQGQSVSSGSSEIKSDDEGDENLQDTKSSEDKKLDDDKKDIKSITRSRSSNNDDEDLTPEQKAEREKERRMANNARERLRVRDINEAFKELGRMVQLHLKSDKPQTKLLILHQAVAVILSLEQQVRERNLNPKAACLKRREEEKVSSEPPPLSLAGPHPGMGDASNHMGQM

SEQ ID NO: 8788 - protein, 410 aa, Homo sapiens
MAKDAGLIEANGELKVFIDQNLSPGKGVVSLVAVHPSTVNPLGKQLLPKTFGQSNVNIAQQVVIGTPQRPAASNTLVVGSPHTPSTHFASQNQPSDSSPWSAGKRNRKGEKNGKGLRHFSMKVCEKVQRKGTTSYNEVADELVAEFSAADNHILPNESAYDQKNIRRRVYDALNVLMAMNIISKEKKEIKWIGLPTNSAQECQNLEVERQRRLERIKQKQSQLQELILQQIAFKNLVQRNRHAEQQASRPPPPNSVIHLPFIIVNTSKKTVIDCSISNDKFEYLFNFDNTFEIHDDIEVLKRMGMACGLESGSCSAEDLKMARSLVPKALEPYVTEMAQGTVGGVFITTAGSTSNGTRFSASDLTNGADGMLATSSNGSQYSGSRVETPVSYVGEDDEEDDDFNENDEDD

SEQ ID NO: 8789 - protein, 236 aa, Homo sapiens
MAKDAGLIEANGELKVFIDQNLSPGKGVVSLVAVHPSTVNPLGKQLLPKTFGQSNVNIAQQVVIGTPQRPAASNTLVVGSPHTPSTHFASQNQPSDSSPWSAGKRNRKGEKNGKGLRHFSMKVCEKVQRKGTTSYNEVADELVAEFSAADNHILPNESAYDQKNIRRRVYDALNVLMAMNIISKEKKEIKWIGLPTNSAQECQNLEVERQRRLERIKQKQSQLQELILQQIAFKNL

SEQ ID NO: 8790 - protein, 159 aa, Homo sapiens [sequence omitted]

SEQ ID NO: 8791 - protein, 311 aa, Homo sapiens
MSTLPSKWKRNRKGEKNGKGLRHFSMKVCEKVQRKGTTSYNEVADELVAEFSAADNHILPNESAYDQKNIRRRVYDALNVLMAMNIISKEKKEIKWIGLPTNSAQECQNLEVERQRRLERIKQKQSQLQELILQQIAFKNLVQRNRHAEQQASRPPPPNSVIHLPFIIVNTSKKTVIDCSISNDKFEYLFNFDNTFEIHDDIEVLKRMGMACGLESGSCSAEDLKMARSLVPKALEPYVTEMAQGTVGGVFITTAGSTSNGTSDLTNGADGMLATSSNGSQYSGSRVETPVSYVGEDDEEDDDFNENDEDD

SEQ ID NO: 8792 - protein, 381 aa, Homo sapiens
MSTLPSKWKRNRKGEKNGKGLRHFSMKVCEKVQRKGTTSYNEVADELVAEFSAADNHILPNESAYDQKNIRRRVYDALNVLMAMNIISKEKKEIKWIGLPTNSAQECQNLEVERQRRLERIKQKQSQLQELILQQIAFKNLVQRNRHAEQQASRPPPPNSVIHLPFIIVNTSKKTVIDCSISNDKFEYLFNFDNTFEIHDDIEVLKRMGMACGLESGSCSAEDLKMARSLVPKALEPYVTEKTGLCDCTAGCPAPWRSVENTGQAKDIRKLLQPSVLWNCASFCWLPVRLVLFLFHDHSLIFFPFSEMAQGTVGGVFITTAGSTSNGTRFSASDLTNGADGMLATSSNGSQYSGSRVETPVSYVGEDDEEDDDFNENDEDD

SEQ ID NO: 8793 - protein, 386 aa, Homo sapiens
MIISTPQRLTSSGSVLIGSPYTPAPAMVTQTHIAEATGWVPGDRKRARKFIDSDFSESKRSKKGDKNGKGLRHFSMKVCEKVQRKGTTSYNEVADELVSEFTNSNNHLAADSQAYDQKNIRRRVYDALNVLMAMNIISKEKKEIKWIGLPTNSAQECQNLEIEKQRRIERIKQKRAQLQELLLQQIAFKNLVQRNRQNEQQNQGPPALNSTIQLPFIIINTSRKTVIDCSISSDKFEYLFNFDNTFEIHDDIEVLKRMGMSFGLESGKCSLEDLKLAKSLVPKALEGYITDISTGPSWLNQGLLLNSTQSVSNLDLTTGATLPQSSVNQGLCLDAEVALATGQFLAPNSHQSSSAASHCSESRGETPCSFNDEDEEDDEEDSSSPE

SEQ ID NO: 8794 - protein, 370 aa, Homo sapiens
MIISTPQRLTSSGSVLIGSPYTPAPAMVTQTHIAEATGWVPGKRSKKGDKNGKGLRHFSMKVCEKVQRKGTTSYNEVADELVSEFTNSNNHLAADSQAYDQKNIRRRVYDALNVLMAMNIISKEKKEIKWIGLPTNSAQECQNLEIEKQRRIERIKQKRAQLQELLLQQIAFKNLVQRNRQNEQQNQGPPALNSTIQLPFIIINTSRKTVIDCSISSDKFEYLFNFDNTFEIHDDIEVLKRMGMSFGLESGKCSLEDLKLAKSLVPKALEGYITDISTGPSWLNQGLLLNSTQSVSNLDLTTGATLPQSSVNQGLCLDAEVALATGQFLAPNSHQSSSAASHCSESRGETPCSFNDEDEEDDEEDSSSPE

SEQ ID NO: 8795 - protein, 418 aa, Homo sapiens
MQPEGIIFEAENKPSPGTESAGTFILDLSATSRTIISTPQRLTSSGSVLIGSPYTPAPAMVTQTHIAEATGWVPGDRKRARKFIDSDFSESKRSKKGDKNGKGLRHFSMKVCEKVQRKGTTSYNEVADELVSEFTNSNNHLAADSAYDQKNIRRRVYDALNVLMAMNIISKEKKEIKWIGLPTNSAQECQNLEIEKQRRIERIKQKRAQLQELLLQQIAFKNLVQRNRQNEQQNQGPPALNSTIQLPFIIINTSRKTVIDCSISSDKFEYLFNFDNTFEIHDDIEVLKRMGMSFGLESGKCSLEDLKLAKSLVPKALEGYITDISTGPSWLNQGLLLNSTQSVSNLDLTTGATLPQSSVNQGLCLDAEVALATGQFLAPNSHQSSSAASHCSESRGETPCSFNDEDEEDDEEDSSSPE

SEQ ID NO: 8796 - protein, 386 aa, Homo sapiens; identical to SEQ ID NO: 8793

SEQ ID NO: 8797 - protein, 86 aa, Homo sapiens
MTAKNVGLTSTNAEVRGFIDQNLSPTKGNISFVAFPVSNTNSPTKILPKTLGPINVNVGPQMIISTPQRLTSSGSVLIGSPYTPAP

SEQ ID NO: 8798 - protein, 46 aa, Homo sapiens
MIISTPQRLTSSGSVLIGSPYTPAPAMVTQTHIAEATGWVPGDRKR

SEQ ID NO: 8799 - protein, 385 aa, Homo sapiens
MIISTPQRLTSSGSVLIGSPYTPAPAMVTQTHIAEATGWVPGDRKRARKFIDSDFSESKRSKKGDKNGKGLRHFSMKVCEKVQRKGTTSYNEVADELVSEFTNSNNHLAADSAYDQKNIRRRVYDALNVLMAMNIISKEKKEIKWIGLPTNSAQECQNLEIEKQRRIERIKQKRAQLQELLLQQIAFKNLVQRNRQNEQQNQGPPALNSTIQLPFIIINTSRKTVIDCSISSDKFEYLFNFDNTFEIHDDIEVLKRMGMSFGLESGKCSLEDLKLAKSLVPKALEGYITDISTGPSWLNQGLLLNSTQSVSNLDLTTGATLPQSSVNQGLCLDAEVALATGQFLAPNSHQSSSAASHCSESRGETPCSFNDEDEEDDEEDSSSPE

SEQ ID NO: 8800 - protein, 89 aa, Homo sapiens
MIISTPQRLTSSGSVLIGSPYTPAPAMVTQTHIAEATGWVPGDRKRARKFIDSDFSESKRSKKGDKNGKGLRHFSMKVCEKVQRKGTTS

SEQ ID NO: 8801 - protein, 446 aa, Homo sapiens
MTAKNVGLTSTNAEVRGFIDQNLSPTKGNISFVAFPVSNTNSPTKILPKTLGPINVNVGPQMIISTPQRLTSSGSVLIGSPYTPAPAMVTQTHIAEATGWVPGDRKRARKFIDSDFSESKRSKKGDKNGKGLRHFSMKVCEKVQRKGTTSYNEVADELVSEFTNSNNHLAADSAYDQKNIRRRVYDALNVLMAMNIISKEKKEIKWIGLPTNSAQECQNLEIEKQRRIERIKQKRAQLQELLLQQIAFKNLVQRNRQNEQQNQGPPALNSTIQLPFIIINTSRKTVIDCSISSDKFEYLFNFDNTFEIHDDIEVLKRMGMSFGLESGKCSLEDLKLAKSLVPKALEGYITDISTGPSWLNQGLLLNSTQSVSNLDLTTGATLPQSSVNQGLCLDAEVALATGQFLAPNSHQSSSAASHCSESRGETPCSFNDEDEEDDEEDSSSPE

SEQ ID NO: 8802 - protein, 27 aa, Homo sapiens
MIISTPQRLTSSGSVLIGSPYTPAPAM

SEQ ID NO: 8803 - protein, 349 aa, Homo sapiens
MLDPKCDRKRARKFIDSDFSESKRSKKGDKNGKGLRHFSMKVCEKVQRKGTTSYNEVADELVSEFTNSNNHLAADSAYDQKNIRRRVYDALNVLMAMNIISKEKKEIKWIGLPTNSAQECQNLEIEKQRRIERIKQKRAQLQELLLQQIAFKNLVQRNRQNEQQNQGPPALNSTIQLPFIIINTSRKTVIDCSISSDKFEYLFNFDNTFEIHDDIEVLKRMGMSFGLESGKCSLEDLKLAKSLVPKALEGYITDISTGPSWLNQGLLLNSTQSVSNLDLTTGATLPQSSVNQGLCLDAEVALATGQFLAPNSHQSSSAASHCSESRGETPCSFNDEDEEDDEEDSSSPE

SEQ ID NO: 8804 - protein, 220 aa, Homo sapiens
MIISTPQRLTSSGSVLIGSPYTPAPAMVTQTHIAEATGWVPGDRKRARKFIDSDFSESKRSKKGDKNGKGLRHFSMKVCEKVQRKGTTSYNEVADELVSEFTNSNNHLAADSAYDQKNIRRRVYDALNVLMAMNIISKEKKEIKWIGLPTNSAQECQNLEIEKQRRIERIKQKRAQLQELLLQQIAFKNLVQRNRQNEQQNQGPPALNSTIQLPFIIINT

SEQ ID NO: 8805 - protein, 386 aa, Homo sapiens; identical to SEQ ID NO: 8793

SEQ ID NO: 8806 - protein, 310 aa, Homo sapiens
MKVCEKVQRKGTTSYNEVADELVSEFTNSNNHLAADSAYDQKNIRRRVYDALNVLMAMNIISKEKKEIKWIGLPTNSAQECQNLEIEKQRRIERIKQKRAQLQELLLQQIAFKNLVQRNRQNEQQNQGPPALNSTIQLPFIIINTSRKTVIDCSISSDKFEYLFNFDNTFEIHDDIEVLKRMGMSFGLESGKCSLEDLKLAKSLVPKALEGYITDISTGPSWLNQGLLLNSTQSVSNLDLTTGATLPQSSVNQGLCLDAEVALATGQFLAPNSHQSSSAASHCSESRGETPCSFNDEDEEDDEEDSSSPE

SEQ ID NO: 8807 - protein, 444 aa, Homo sapiens
MPRSGAPKERPAEPLTPPPSYGHQPQTGSGESSGASGDKDHLYSTVCKPRSPKPAAPAAPPFSSSSGVLGTGLCELDRLLQELNATQFNITDEIMSQFPSSKVASGEQKEDQSEDKKRPSLPSSPSPGLPKASATSATLELDRLMASLSDFRVQNHLPASGPTQPPVVSSTNEGSPSPPEPTGKGSLDTMLGLLQSDLSRRGVPTQAKGLCGSCNKPIAGQVVTALGRAWHPEHFVCGGCSTALGGSSFFEKDGAPFCPECYFERFSPRCGFCNQPIRHKMVTALGTHWHPEHFCCVSCGEPFGDEGFHEREGRPYCRRDFLQLFAPRCQGCQGPILDNYISALSALWHPDCFVCRECFAPFSGGSFFEHEGRPLCENHFHARRGSLCATCGLPVTGRCVSALGRRFHPDHFTCTFCLRPLTKGSFQERAGKPYCQPCFLKLFG

SEQ ID NO: 8808 - protein, 444 aa, Homo sapiens; identical to SEQ ID NO: 8807

SEQ ID NO: 8809 - protein, 461 aa, Homo sapiens
MEDLDALLSDLETTTSHMPRSGAPKERPAEPLTPPPSYGHQPQTGSGESSGASGDKDHLYSTVCKPRSPKPAAPAAPPFSSSSGVLGTGLCELDRLLQELNATQFNITDEIMSQFPSSKVASGEQKEDQSEDKKRPSLPSSPSPGLPKASATSATLELDRLMASLSDFRVQNHLPASGPTQPPVVSSTNEGSPSPPEPTGKGSLDTMLGLLQSDLSRRGVPTQAKGLCGSCNKPIAGQVVTALGRAWHPEHFVCGGCSTALGGSSFFEKDGAPFCPECYFERFSPRCGFCNQPIRHKMVTALGTHWHPEHFCCVSCGEPFGDEGFHEREGRPYCRRDFLQLFAPRCQGCQGPILDNYISALSALWHPDCFVCRECFAPFSGGSFFEHEGRPLCENHFHARRGSLCATCGLPVTGRCVSALGRRFHPDHFTCTFCLRPLTKGSFQERAGKPYCQPCFLKLFG

SEQ ID NO: 8810 - protein, 260 aa, Homo sapiens
MVWPALWELYRELGLFQGPALGLRNHLGRKLRRRKKKKAKRTTNWKIITDRPGFHDESAIYPVGYCSTRIYASMKCPDQKCLYTCQIKDGGVQPQFEIVPEDDPQNAIVSSSADACHAELLRTISTTMGKLMPNLLPAGADFFGFSHPAIHNLIQSCPGARKCINYQWVKFDVCKPGDGQLPEGLPENDAAMSFEAFQRQIFDEDQNDPLLPGSLDLPELQPAAFVSSYQPMYLTHEPLVDTHLQHLKSPSQGSPIQSSD

SEQ ID NO: 8811 - protein, 411 aa, Homo sapiens
MSLLDGLASSPRAPLQSSKARMKKLPKKSQNEKYRLKYLRLRKAAKATVFENAAICDEIARLEEKFLKAKEERRYLLKKLLQLQALTEGEVQAAAPSHSSSLPLTYGVASSVGTIQGAGPISGPSTGAEEPFGKKTKKEKKEKGKENNKLEVLKKTCKKKKMAGGARKLVQPIALDPSGRPVFPIGLGGLTVYSLGEIITDRPGFHDESAIYPVGYCSTRIYASMKCPDQKCLYTCQIKDGGVQPQFEIVPEDDPQNAIVSSSADACHAELLRTISTTMGKLMPNLLPAGADFFGFSHPAIHNLIQSCPGARKCINYQWVKFDVCKPGDGQLPEGLPENDAAMSFEAFQRQIFDEDQNDPLLPGSLDLPELQPAAFVSSYQPMYLTHEPLVDTHLQHLKSPSQGSPIQSSD

SEQ ID NO: 8812 - protein, 426 aa, Homo sapiens
MEAAVAAPRPRLLLLVLAAAAAAAAALLPGATALQCFCHLCTKDNFTCVTDGLCFVSVTETTDKVIHNSMCIAEIDLIPRDRPFVCAPSSKTGSVTTTYCCNQDHCNKIELPTTGLPLLVQRTIARTIVLQESIGKGRFGEVWRGKWRGEEVAVKIFSSREERSWFREAEIYQTVMLRHENILGFIAADNKDNGTWTQLWLVSDYHEHGSLFDYLNRYTVTVEGMIKLALSTASGLAHLHMEIVGTQGKPAIAHRDLKSKNILVKKNGTCCIADLGLAVRHDSATDTIDIAPNHRVGTKRYMAPEVLDDSINMKHFESFKRADIYAMGLVFWEIARRCSIGGIHEDYQLPYYDLVPSDPSVEEMRKVVCEQKLRPNIPNRWQSCEALRVMAKIMRECWYANGAARLTALRIKKTLSQLSQQEGIKM

SEQ ID NO: 8813 - protein, 503 aa, Homo sapiens
MEAAVAAPRPRLLLLVLAAAAAAAAALLPGATALQCFCHLCTKDNFTCVTDGLCFVSVTETTDKVIHNSMCIAEIDLIPRDRPFVCAPSSKTGSVTTTYCCNQDHCNKIELPTTVKSSPGLGPVELAAVIAGPVCFVCISLMLMVYICHNRTVIHHRVPNEEDPSLDRPFISEGTTLKDLIYDMTTSGSGSGLPLLVQRTIARTIVLQESIGKGRFGEVWRGKWRGEEVAVKIFSSREERSWFREAEIYQTVMLRHENILGFIAADNKDNGTWTQLWLVSDYHEHGSLFDYLNRYTVTVEGMIKLALSTASGLAHLHMEIVGTQGKPAIAHRDLKSKNILVKKNGTCCIADLGLAVRHDSATDTIDIAPNHRVGTKRYMAPEVLDDSINMKHFESFKRADIYAMGLVFWEIARRCSIGGIHEDYQLPYYDLVPSDPSVEEMRKVVCEQKLRPNIPNRWQSCEALRVMAKIMRECWYANGAARLTALRIKKTLSQLSQQEGIKM

SEQ ID NO: 8814 - protein, 465 aa, Homo sapiens
MEAAVAAPRPRLLLLVLAAAAAAAAALLPGATALQCFCHLCTKDNFTCVTDGLCFVSVTETTDKVIHNSMCIAEIDLIPRDRPFVCAPSSKTGSVTTTYCCNQDHCNKIELPTTVKSSPGLGPVELAAVIAGPVCFVCISLMLMVYICHNRTVIHHRVPNEEDPSLDRPFISEGTTLKDLIYDMTTSGSGSGLPLLVQRTIARTIVLQESIGKGRFGEVWRGKWRGEEVAVKIFSSREERSWFREAEIYQTVMLRHENILGFIAADNKDNGTWTQLWLVSDYHEHGSLFDYLNRYTVTVEGMIKLALSTASGLAHLHMEIVGTQGKPAIAPNHRVGTKRYMAPEVLDDSINMKHFESFKRADIYAMGLVFWEIARRCSIGGIHEDYQLPYYDLVPSDPSVEEMRKVVCEQKLRPNIPNRWQSCEALRVMAKIMRECWYANGAARLTALRIKKTLSQLSQQEGIKM

SEQ ID NO: 8815 - protein, 71 aa, Homo sapiens
MEAAVAAPRPRLLLASTSLQCFCHLCTKDNFTCVTDGLCFVSVTETTDKVIHNSMCIAEIDLIPRDRPFVC

SEQ ID NO: 8816 - protein, 434 aa, Homo sapiens
MCIAEIDLIPRDRPFVCAPSSKTGSVTTTYCCNQDHCNKIELPTTVKSSPGLGPVELAAVIAGPVCFVCISLMLMVYICHNRTVIHHRVPNEEDPSLDRPFISEGTTLKDLIYDMTTSGSGSGLPLLVQRTIARTIVLQESIGKGRFGEVWRGKWRGEEVAVKIFSSREERSWFREAEIYQTVMLRHENILGFIAADNKDNGTWTQLWLVSDYHEHGSLFDYLNRYTVTVEGMIKLALSTASGLAHLHMEIVGTQGKPAIAHRDLKSKNILVKKNGTCCIADLGLAVRHDSATDTIDIAPNHRVGTKRYMAPEVLDDSINMKHFESFKRADIYAMGLVFWEIARRCSIGGIHEDYQLPYYDLVPSDPSVEEMRKVVCEQKLRPNIPNRWQSCEALRVMAKIMRECWYANGAARLTALRIKKTLSQLSQQEGIKM

SEQ ID NO: 8817 - protein, 136 aa, Homo sapiens
MKDSNRCCCGQFTNQHIPPLPSATPSKNEEESKQVETQPEKWSVAKHTQSYPTDSYGVLEFQGGGYSNKAMVRKAFRHGATRITAFIGGQSPSPKLQIPGLLHGCGSIFLDISLKNQEIYLCTWLLAMRLGNWTPL

SEQ ID NO: 8818 - protein, 1625 aa, Homo sapiens
MGQKSWIEKTFCKRECIFVIPSMKDSNRCCCGQFTNQHIPPLPSATPSKNEEESKQVETQPEKWSVAKHTQSYPTDSYGVLEFQGGGYSNKAMYIRVSYDTKPDSLLHLMVKDWQLELPKLLISVHGGLQNFEMQPKLKQVFGKGLIKAAMTTGAWIFTGGVSTGVISHVGDALKDHSSKSRGRVCAIGIAPWGIVENKEDLVGKDVTRVYQTMSNPLSKLSVLNNSHTHFILADNGTLGKYGAEVKLRRLLEKHISLQKINTRLGQGVPLVGLVVEGGPNVVSIVLEYLQEEPPIPVVICDGSGRASDILSFAHKYCEEGGIINESLREQLLVTIQKTFNYNKAQSHQLFAIIMECMKKKELVTVFRMGSEGQQDIEMAILTALLKGTNVSAPDQLSLALAWNRVDIARSQIFVFGPHWPPLGSLAPPTDSKATEKEKKPPMATTKGGRGKGKGKKKGKVKEEVEEETDPRKIELLNWVNALEQAMLDALVLDRVDFVKLLIENGVNMQHFLTIPRLEELYNTRLGPPNTLHLLVRDVKKSNLPPDYHISLIDIGLVLEYLMGGAYRCNYTRKNFRTLYNNLFGPKRPKALKLLGMEDDEPPAKGKKKKKKKKEEEIDIDVDDPAVSRFQYPFHELMVWAVLMKRQKMAVFLWQRGEESMAKALVACKLYKAMAHESSESDLVDDISQDLDNNSKDFGQLALELLDQSYKHDEQIAMKLLTYELKNWSNSTCLKLAVAAKHRDFIAHTCSQMLLTDMWMGRLRMRKNPGLKVIMGILLPPTILFLEFRTYDDFSYQTSKENEDGKEKEEENTDANADAGSRKGDEENEHKKQRSIPIGTKICEFYNAPIVKFWFYTISYLGYLLLFNYVILVRMDGWPSLQEWIVISYIVSLALEKIREILMSEPGKLSQKIKVWLQEYWNITDLVAISTFMIGAILRLQNQPYMGYGRVIYCVDIIFWYIRVLDIFGVNKYLGPYVMMIGKMMIDMLYFVVIMLVVLMSFGVARQAILHPEEKPSWKLARNIFYMPYWMIYGEVFADQIDLYAMEINPPCGENLYDEEGKRLPPCIPGAWLTPALMACYLLVANILLVNLLIAVFNNTFFEVKSISNQVWKFQRYQLIMTFHDRPVLPPPMIILSHIYIIIMRLSGRCRKKREGDQEERDRGLKLFLSDEELKRLHEFEEQCVQEHFREKEDEQQSSSDERIRVTSERVENMSMRLEEINERETFMKTSLQTVDLRLAQLEELSNRMVNALENLAGIDRSDLIQARSRASSECEATYLLRQSSINSADGYSLYRYHFNGEELLFEDTSLSTSPGTGVRKKTCSFRIKEEKDVKTHLVPECQNSLHLSLGTSTSATPDGSHLAVDDLKNAEESKLGPDIGISKEDDERQTDSKKEETISPSLNKTDVIHGQDKSDVQNTQLTVETTNIEGTISYPLEETKITRYFPDETINACKTMKSRSFVYSRGRKLVGGVNQDVEYSSITDQQLTTEWQCQVQKITRSHSTDIPYIVSEAAVQAEHKEQFADMQDEHHVAEAIPRIPRLSLTITDRNGMENLLSVKPDQTLGFPSLRSKSLHGHPRNVKSIQGKLDRSGHASSVSSLVIVSGMTAEEKKVKKEKASTETEC

SEQ ID NO: 8819 - protein, 1603 aa, Homo sapiens
IKTSKRCCCGQFTNQHIPPLPSATPSKNEEESKQVETQPEKWSVAKHTQSYPTDSYGVLEFQGGGYSNKAMYIRVSYDTKPDSLLHLMVKDWQLELPKLLISVHGGLQNFEMQPKLKQVFGKGLIKAAMTTGAWIFTGGVSTGVISHVGDALKDHSSKSRGRVCAIGIAPWGIVENKEDLVGKDVTRVYQTMSNPLSKLSVLNNSHTHFILADNGTLGKYGAEVKLRRLLEKHISLQKINTRLGQGVPLVGLVVEGGPNVVSIVLEYLQEEPPIPVVICDGSGRASDILSFAHKYCEEGGIINESLREQLLVTIQKTFNYNKAQSHQLFAIIMECMKKKELVTVFRMGSEGQQDIEMAILTALLKGTNVSAPDQLSLALAWNRVDIARSQIFVFGPHWPPLGSLAPPTDSKATEKEKKPPMATTKGGRGKGKGKKKGKVKEEVEEETDPRKIELLNWVNALEQAMLDALVLDRVDFVKLLIENGVNMQHFLTIPRLEELYNTRLGPPNTLHLLVRDVKKSNLPPDYHISLIDIGLVLEYLMGGAYRCNYTRKNFRTLYNNLFGPKRPKALKLLGMEDDEPPAKGKKKKKKKKEEEIDIDVDDPAVSRFQYPFHELMVWAVLMKRQKMAVFLWQRGEESMAKALVACKLYKAMAHESSESDLVDDISQDLDNNSKDFGQLALELLDQSYKHDEQIAMKLLTYELKNWSNSTCLKLAVAAKHRDFIAHTCSQMLLTDMWMGRLRMRKNPGLKVIMGILLPPTILFLEFRTYDDFSYQTSKENEDGKEKEEENTDANADAGSRKGDEENEHKKQRSIPIGTKICEFYNAPIVKFWFYTISYLGYLLLFNYVILVRMDGWPSLQEWIVISYIVSLALEKIREILMSEPGKLSQKIKVWLQEYWNITDLVAISTFMIGAILRLQNQPYMGYGRVIYCVDIIFWYIRVLDIFGVNKYLGPYVMMIGKMMIDMLYFVVIMLVVLMSFGVARQAILHPEEKPSWKLARNIFYMPYWMIYGEVFADQIDLYAMEINPPCGENLYDEEGKRLPPCIPGAWLTPALMACYLLVANILLVNLLIAVFNNTFFEVKSISNQVWKFQRYQLIMTFHDRPVLPPPMIILSHIYIIIMRLSGRCRKKREGDQEERDRGLKLFLSDEELKRLHEFEEQCVQEHFREKEDEQQSSSDERIRVTSERVENMSMRLEEINERETFMKTSLQTVDLRLAQLEELSNRMVNALENLAGIDRSDLIQARSRASSECEATYLLRQSSINSADGYSLYRYHFNGEELLFEDTSLSTSPGTGVRKKTCSFRIKEEKDVKTHLVPECQNSLHLSLGTSTSATPDGSHLAVDDLKNAEESKLGPDIGISKEDDERQTDSKKEETISPSLNKTDVIHGQDKSDVQNTQLTVETTNIEGTISYPLEETKITRYFPDETINACKTMKSRSFVYSRGRKLVGGVNQDVEYSSITDQQLTTEWQCQVQKITRSHSTDIPYIVSEAAVQAEHKEQFADMQDEHHVAEAIPRIPRLSLTITDRNGMENLLSVKPDQTLGFPSLRSKSLHGHPRNVKSIQGKLDRSGHASSVSSLVIVSGMTAEEKKVKKEKASTETEC

SEQ ID NO: 8820 - protein, 1603 aa, Homo sapiens
MKDSNRCCCGQFTNQHIPPLPSATPSKNEEESKQVETQPEKWSVAKHTQSYPTDSYGVLEFQGGGYSNKAMYIRVSYDTKPDSLLHLMVKDWQLELPKLLISVHGGLQNFEMQPKLKQVFGKGLIKAAMTTGAWIFTGGVSTGVISHVGDALKDHSSKSRGRVCAIGIAPWGIVENKEDLVGKDVTRVYQTMSNPLSKLSVLNNSHTHFILADNGTLGKYGAEVKLRRLLEKHISLQKINTRLGQGVPLVGLVVEGGPNVVSIVLEYLQEEPPIPVVICDGSGRASDILSFAHKYCEEGGIINESLREQLLVTIQKTFNYNKAQSHQLFAIIMECMKKKELVTVFRMGSEGQQDIEMAILTALLKGTNVSAPDQLSLALAWNRVDIARSQIFVFGPHWPPLGSLAPPTDSKATEKEKKPPMATTKGGRGKGKGKKKGKVKEEVEEETDPRKIELLNWVNALEQAMLDALVLDRVDFVKLLIENGVNMQHFLTIPRLEELYNTRLGPPNTLHLLVRDVKKSNLPPDYHISLIDIGLVLEYLMGGAYRCNYTRKNFRTLYNNLFGPKRPKALKLLGMEDDEPPAKGKKKKKKKKEEEIDIDVDDPAVSRFQYPFHELMVWAVLMKRQKMAVFLWQRGEESMAKALVACKLYKAMAHESSESDLVDDISQDLDNNSKDFGQLALELLDQSYKHDEQIAMKLLTYELKNWSNSTCLKLAVAAKHRDFIAHTCSQMLLTDMWMGRLRMRKNPGLKVIMGILLPPTILFLEFRTYDDFSYQTSKENEDGKEKEEENTDANADAGSRKGDEENEHKKQRSIPIGTKICEFYNAPIVKFWFYTISYLGYLLLFNYVILVRMDGWPSLQEWIVISYIVSLALEKIREILMSEPGKLSQKIKVWLQEYWNITDLVAISTFMIGAILRLQNQPYMGYGRVIYCVDIIFWYIRVLDIFGVNKYLGPYVMMIGKMMIDMLYFVVIMLVVLMSFGVARQAILHPEEKPSWKLARNIFYMPYWMIYGEVFADQIDLYAMEINPPCGENLYDEEGKRLPPCIPGAWLTPALMACYLLVANILLVNLLIAVFNNTFFEVKSISNQVWKFQRYQLIMTFHDRPVLPPPMIILSHIYIIIMRLSGRCRKKREGDQEERDRGLKLFLSDEELKRLHEFEEQCVQEHFREKEDEQQSSSDERIRVTSERVENMSMRLEEINERETFMKTSLQTVDLRLAQLEELSNRMVNALENLAGIDRSDLIQARSRASSECEATYLLRQSSINSADGYSLYRYHFNGEELLFEDTSLSTSPGTGVRKKTCSFRIKEEKDVKTHLVPECQNSLHLSLGTSTSATPDGSHLAVDDLKNAEESKLGPDIGISKEDDERQTDSKKEETISPSLNKTDVIHGQDKSDVQNTQLTVETTNIEGTISYPLEETKITRYFPDETINACKTMKSRSFVYSRGRKLVGGVNQDVEYSSITDQQLTTEWQCQVQKITRSHSTDIPYIVSEAAVQAEHKEQFADMQDEHHVAEAIPRIPRLSLTITDRNGMENLLSVKPDQTLGFPSLRSKSLHGHPRNVKSIQGKLDRSGHASSVSSLVIVSGMTAEEKKVKKEKASTETEC

SEQ ID NO: 8821 - protein, 1642 aa, Homo sapiens
MSSFKRGSLKSSTSGSQKGQKSWIEKTFCKRECIFVIPSMKDSNRCCCGQFTNQHIPPLPSATPSKNEEESKQVETQPEKWSVAKHTQSYPTDSYGVLEFQGGGYSNKAMYIRVSYDTKPDSLLHLMVKDWQLELPKLLISVHGGLQNFEMQPKLKQVFGKGLIKAAMTTGAWIFTGGVSTGVISHVGDALKDHSSKSRGRVCAIGIAPWGIVENKEDLVGKDVTRVYQTMSNPLSKLSVLNNSHTHFILADNGTLGKYGAEVKLRRLLEKHISLQKINTRLGQGVPLVGLVVEGGPNVVSIVLEYLQEEPPIPVVICDGSGRASDILSFAHKYCEEGGIINESLREQLLVTIQKTFNYNKAQSHQLFAIIMECMKKKELVTVFRMGSEGQQDIEMAILTALLKGTNVSAPDQLSLALAWNRVDIARSQIFVFGPHWPPLGSLAPPTDSKATEKEKKPPMATTKGGRGKGKGKKKGKVKEEVEEETDPRKIELLNWVNALEQAMLDALVLDRVDFVKLLIENGVNMQHFLTIPRLEELYNTRLGPPNTLHLLVRDVKKSNLPPDYHISLIDIGLVLEYLMGGAYRCNYTRKNFRTLYNNLFGPKRPKALKLLGMEDDEPPAKGKKKKKKKKEEEIDIDVDDPAVSRFQYPFHELMVWAVLMKRQKMAVFLWQRGEESMAKALVACKLYKAMAHESSESDLVDDISQDLDNNSKDFGQLALELLDQSYKHDEQIAMKLLTYELKNWSNSTCLKLAVAAKHRDFIAHTCSQMLLTDMWMGRLRMRKNPGLKVIMGILLPPTILFLEFRTYDDFSYQTSKENEDGKEKEEENTDANADAGSRKGDEENEHKKQRSIPIGTKICEFYNAPIVKFWFYTISYLGYLLLFNYVILVRMDGWPSLQEWIVISYIVSLALEKIREILMSEPGKLSQKIKVWLQEYWNITDLVAISTFMIGAILRLQNQPYMGYGRVIYCVDIIFWYIRVLDIFGVNKYLGPYVMMIGKMMIDMLYFVVIMLVVLMSFGVARQAILHPEEKPSWKLARNIFYMPYWMIYGEVFADQIDLYAMEINPPCGENLYDEEGKRLPPCIPGAWLTPALMACYLLVANILLVNLLIAVFNNTFFEVKSISNQVWKFQRYQLIMTFHDRPVLPPPMIILSHIYIIIMRLSGRCRKKREGDQEERDRGLKLFLSDEELKRLHEFEEQCVQEHFREKEDEQQSSSDERIRVTSERVENMSMRLEEINERETFMKTSLQTVDLRLAQLEELSNRMVNALENLAGIDRSDLIQARSRASSECEATYLLRQSSINSADGYSLYRYHFNGEELLFEDTSLSTSPGTGVRKKTCSFRIKEEKDVKTHLVPECQNSLHLSLGTSTSATPDGSHLAVDDLKNAEESKLGPDIGISKEDDERQTDSKKEETISPSLNKTDVIHGQDKSDVQNTQLTVETTNIEGTISYPLEETKITRYFPDETINACKTMKSRSFVYSRGRKLVGGVNQDVEYSSITDQQLTTEWQCQVQKITRSHSTDIPYIVSEAAVQAEHKEQFADMQDEHHVAEAIPRIPRLSLTITDRNGMENLLSVKPDQTLGFPSLRSKSLHGHPRNVKSIQGKLDRSGHASSVSSLVIVSGMTAEEKKVKKEKASTETEC

SEQ ID NO: 8822 - protein, 1390 aa, Homo sapiens
MKDSNRCCCGQFTNQHIPPLPSATPSKNEEESKQVETQPEKWSVAKHTQSYPTDSYGVLEFQGGGYSNKAMYIRVSYDTKPDSLLHLMVKDWQLELPKLLISVHGGLQNFEMQPKLKQVFGKGLIKAAMTTGAWIFTGGVSTGVISHVGDALKDHSSKSRGRVCAIGIAPWGIVENKEDLVGKDVTRVYQTMSNPLSKLSVLNNSHTHFILADNGTLGKYGAEVKLRRLLEKHISLQKINTRLGQGVPLVGLVVEGGPNVVSIVLEYLQEEPPIPVVICDGSGRASDILSFAHKYCEEGGIINESLREQLLVTIQKTFNYNKAQSHQLFAIIMECMKKKELVTVFRMGSEGQQDIEMAILTALLKGTNVSAPDQLSLALAWNRVDIARSQIFVFGPHWPPLGSLAPPTDSKATEKEKKPPMATTKGGRGKGKGKKKGKVKEEVEEETDPRKIELLNWVNALEQAMLDALVLDRVDFVKLLIENGVNMQHFLTIPRLEELYNTRLGPPNTLHLLVRDVKKSNLPPDYHISLIDIGLVLEYLMGGAYRCNYTRKNFRTLYNNLFGPKRPKALKLLGMEDDEPPAKGKKKKKKKKEEEIDIDVDDPAVSRFQYPFHELMVWAVLMKRQKMAVFLWQRGEESMAKALVACKLYKAMAHESSESDLVDDISQDLDNNSKDFGQLALELLDQSYKHDEQIAMKLLTYELKNWSNSTCLKLAVAAKHRDFIAHTCSQMLLTDMWMGRLRMRKNPGLKVIMGILLPPTILFLEFRTYDDFSYQTSKENEDGKEKEEENTDANADAGSRKGDEENEHKKQRSIPIGTKICEFYNAPIVKFWFYTISYLGYLLLFNYVILVRMDGWPSLQEWIVISYIVSLALEKIREILMSEPGKLSQKIKVWLQEYWNITDLVAISTFMIGAILRLQNQPYMGYGRVIYCVDIIFWYIRVLDIFGVNKYLGPYVMMIGKMMIDMLYFVVIMLVVLMSFGVARQAILHPEEKPSWKLARNIFYMPYWMIYGEVFADQIDLYAMEINPPCGENLYDEEGKRLPPCIPGAWLTPALMACYLLVANILLVNLLIAVFNNTFFEVKSISNQVWKFQRYQLIMTFHDRPVLPPPMIILSHIYIIIMRLSGRCRKKREGDQEERDRGLKLFLSDEELKRLHEFEEQCVQEHFREKEDEQQSSSDERIRVTSERVENMSMRLEEINERETFMKTSLQTVDLRLAQLEELSNRMVNALENLAGIDRSDLIQARSRASSECEATYLLRQSSINSADGYSLYRYHFNGEELLFEDTSLSTSPGTGVRKKTCSFRIKEEKDVKTHLVPECQNSLHLSLGTSTSATPDGSHLAVDDLKNAEESKLGPDIGISKEDDERQTDSKKEETISPSLNKTDVIHGQ

SEQ ID NO: 8823 - protein, 1527 aa, Homo sapiens
MYIRVSYDTKPDSLLHLMVKDWQLELPKLLISVHGGLQNFEMQPKLKQVFGKGLIKAAMTTGAWIFTGGVSTGVISHVGDALKDHSSKSRGRVCAIGIAPWGIVENKEDLVGKDVTRVYQTMSNPLSKLSVLNNSHTHFILADNGTLGKYGAEVKLRRLLEKHISLQKINTRLGQGVPLVGLVVEGGPNVVSIVLEYLQEEPPIPVVICDGSGRASDILSFAHKIINESLREQLLVTIQKTFNYNKAQSHQLFAIIMECMKKKELVTVFRMGSEGQQDIEMAILTALLKGTNVSAPDQLSLALAWNRVDIARSQIFVFGPHWPPLGSLAPPTDSKATEKEKKPPMATTKGGRGKGKGKKKGKVKEEVEEETDPRKIELLNWVNALEQAMLDALVLDRVDFVKLLIENGVNMQHFLTIPRLEELYNTRLGPPNTLHLLVRDVKKSNLPPDYHISLIDIGLVLEYLMGGAYRCNYTRKNFRTLYNNLFGPKRPKALKLLGMEDDEPPAKGKKKKKKKKEEEIDIDVDDPAVSRFQYPFHELMVWAVLMKRQKMAVFLWQRGEESMAKALVACKLYKAMAHESSESDLVDDISQDLDNNSKDFGQLALELLDQSYKHDEQIAMKLLTYELKNWSNSTCLKLAVAAKHRDFIAHTCSQMLLTDMWMGRLRMRKNPGLKVIMGILLPPTILFLEFRTYDDFSYQTSKENEDGKEKEEENTDANADAGSRKGDEENEHKKQRSIPIGTKICEFYNAPIVKFWFYTISYLGYLLLFNYVILVRMDGWPSLQEWIVISYIVSLALEKIREILMSEPGKLSQKIKVWLQEYWNITDLVAISTFMIGAILRLQNQPYMGYGRVIYCVDIIFWYIRVLDIFGVNKYLGPYVMMIGKMMIDMLYFVVIMLVVLMSFGVARQAILHPEEKPSWKLARNIFYMPYWMIYGEVFADQIDLYAMEINPPCGENLYDEEGKRLPPCIPGAWLTPALMACYLLVANILLVNLLIAVFNNTFFEVKSISNQVWKFQRYQLIMTFHDRPVLPPPMIILSHIYIIIMRLSGRCRKKREGDQEERDRGLKLFLSDEELKRLHEFEEQCVQEHFREKEDEQQSSSDERIRVTSERVENMSMRLEEINERETFMKTSLQTVDLRLAQLEELSNRMVNALENLAGIDRSDLIQARSRASSECEATYLLRQSSINSADGYSLYRYHFNGEELLFEDTSLSTSPGTGVRKKTCSFRIKEEKDVKTHLVPECQNSLHLSLGTSTSATPDGSHLAVDDLKNAEESKLGPDIGISKEDDERQTDSKKEETISPSLNKTDVIHGQDKSDVQNTQLTVETTNIEGTISYPLEETKITRYFPDETINACKTMKSRSFVYSRGRKLVGGVNQDVEYSSITDQQLTTEWQCQVQKITRSHSTDIPYIVSEAAVQAEHKEQFADMQDEHHVAEAIPRIPRLSLTITDRNGMENLLSVKPDQTLGFPSLRSKSLHGHPRNVKSIQGKLDRSGHASSVSSLVIVSGMTAEEKKVKKEKASTETEC

SEQ ID NO: 8824 - protein, 492 aa, Homo sapiens
MALNSGSPPAIGPYYENHGYQPENPYPAQPTVVPTVYEVHPAQYYPSPVPQYAPRVLTQASNPVVCTQPKSPSGTVCTSKTKKALCITLTLGTFLVGAALAAGLLWKFMGSKCSNSGIECDSSGTCINPSNWCDGVSHCPGGEDENRCVRLYGPNFILQVYSSQRKSWHPVCQDDWNENYGRAACRDMGYKNNFYSSQGIVDDSGSTSFMKLNTSAGNVDIYKKLYHSDACSSKAVVSLRCIACGVNLNSSRQSRIVGGESALPGAWPWQVSLHVQNVHVCGGSIITPEWIVTAAHCVEKPLNNPWHWTAFAGILRQSFMFYGAGYQVEKVISHPNYDSKTKNNDIALMKLQKPLTFNDLVKPVCLPNPGMMLQPEQLCWISGWGATEEKGKTSEVLNAAKVLLIETQRCNSRYVYDNLITPAMICAGFLQGNVDSCQGDSGGPLVTSKNNIWWLIGDTSWGSGCAKAYRPGVYGNVMVFTDWIYRQMRADG

SEQ ID NO: 8825 - protein, 529 aa, Homo sapiens
MPPAPPGGESGCEERGAAGHIEHSRYLSLLDAVDNSKMALNSGSPPAIGPYYENHGYQPENPYPAQPTVVPTVYEVHPAQYYPSPVPQYAPRVLTQASNPVVCTQPKSPSGTVCTSKTKKALCITLTLGTFLVGAALAAGLLWKFMGSKCSNSGIECDSSGTCINPSNWCDGVSHCPGGEDENRCVRLYGPNFILQVYSSQRKSWHPVCQDDWNENYGRAACRDMGYKNNFYSSQGIVDDSGSTSFMKLNTSAGNVDIYKKLYHSDACSSKAVVSLRCIACGVNLNSSRQSRIVGGESALPGAWPWQVSLHVQNVHVCGGSIITPEWIVTAAHCVEKPLNNPWHWTAFAGILRQSFMFYGAGYQVEKVISHPNYDSKTKNNDIALMKLQKPLTFNDLVKPVCLPNPGMMLQPEQLCWISGWGATEEKGKTSEVLNAAKVLLIETQRCNSRYVYDNLITPAMICAGFLQGNVDSCQGDSGGPLVTSKNNIWWLIGDTSWGSGCAKAYRPGVYGNVMVFTDWIYRQMRADG

SEQ ID NO: 8826 - protein, 489 aa, Homo sapiens
MALNSGSPPAIGPYYENHGYQPENPYPAQPTVVPTVYEVHPAQYYPSPVPQYAPRVLTQASNPVVCTQPKSPSGTVCTSKTKKALCITLTLGTFLVGAALAAGLLWKFMGSKCSNSGIECDSSGTCINPSNWCDGVSHCPGGEDENRCVRLYGPNFILQVYSSQRKSWHPVCQDDWNENYGRAACRDMGYKNNFYSSQGIVDDSGSTSFMKLNTSAGNVDIYKKLYHSDACSSKAVVSLRCIACGVNLNSSRQSRIVGGESALPGAWPWQVSLHVQNVHVCGGSIITPEWIVTAAHCVEKPLNNPWHWTAFAGILRQSFMFYGAGYQVEKVISHPNYDSKTKNNDIALMKLQKPLTFNDLVKPVCLPNPGMMLQPEQLCWISGWGATEEKGKTSEVLNAAKVLLIETQRCNSRYVYDNLITPAMICAGFLQGNVDSCQGDSGGPLVTSKNNIWWLIGDTSWGSGCAKAYRPGVYGNVMVFTDWIYRQMR

SEQ ID NO: 8827 - protein, 79 aa, Homo sapiens
MALNSGSPPAIGPYYENHGYQPENPYPAQPTVVPTVYEVHPAQYYPSPVPQYAPRVLTQASNPVVCTQPKSPSGTVCTS

SEQ ID NO: 8828 - protein, 492 aa, Homo sapiens; identical to SEQ ID NO: 8824

SEQ ID NO: 8829 - protein, 238 aa, Homo sapiens
MYAPGGAGLPGGRRRRSPGGSALPKQPERSLASALPGALSITALCTALAEPAWLHIHGGTCSRQELGVSDVLGYVHPDLLKDFCMNPQTVLLLRVIAAFCFLGILCSLSAFLLDVFGPKHPALKITRRYAFAHILTVLQCATVIGFSYWASELILAQQQQHKKYHGSQVYVTFAVSFYLVAGAGGASILATAANLLRHYPTEEEEQALELLSEMEENEPYPAEYEVINQFQPPPAYTP

SEQ ID NO: 8830 - protein, 238 aa, Homo sapiens; identical to SEQ ID NO: 8829

SEQ ID NO: 8831 - protein, 1024 aa, Homo sapiens
MCARMAGRTTAAPRGPYGPWLCLLVALALDVVRVDCGQAPLDPVYLPAALELLDAPEHFRVQQVGHYPPANSSLSSRSETFLLLQPWPRAQPLLRASYPPFATQQVVPPRVTEPHQRPVPWDVRAVSVEAAVTPAEPYARVLFHLKGQDWPPGSGSLPCARLHATHPAGTAHQACRFQPSLGACVVELELPSHWFSQASTTRAELAYTLEPAAEGPGGCGSGEENDPGEQALPVGGVELRPADPPQYQEVPLDEAVTLRVPDMPVRPGQLFSATLLLRHNFTASLLTLRIKVKKGLHVTAARPAQPTLWTAKLDRFKGSRHHTTLITCHRAGLTEPDSSSPLELSEFLWVDFVVENSTGGGVAVTRPVTWQLEYPGQAPEAEKDKMVWEILVSERDIRALIPLAKAEELVNTAPLTGVPQHVPVRLVTVDGGGALVEVTEHVGCESANTQVLQVSEACDAVFVAGKESRGARGVRVDFWWRRLRASLRLTVWAPLLPLRIELTDTTLEQVRGWRVPGPAEGPAEPAAEASDEAERRARGCHLQYQRAGVRFLAPFAAHPLDGGRRLTHLLGPDWLLDVSHLVAPHARVLDSRVASLEGGRVVVGREPGVTSIEVRSPLSDSILGEQALAVTDDKVSVLELRVQPVMGISLTLSRGTAHPGEVTATCWAQSALPAPKQEVALSLWLSFSDHTVAPAELYDRRDLGLSVSAEEPGAILPAEEQGAQLGVVVSGAGAEGLPLHVALHPPEPCRRGRHRVPLASGTAWLGLPPASTPAPALPSSPAWSPPATEATMGGKRQVAGSVGGNTGVRGKFERAEEEARKEETEAREEEEEEEEEMVPAPQHVTELELGMYALLGVFCVAIFIFLVNGVVFVLRYQRKEPPDSATDPTSPQPHNWVWLGTDQEELSRQLDRQSPGPPKGEGSCPCESGGGGEAPTLAPGPPGGTTSSSSTLARKEAGGRRKRVEFVTFAPAPPAQSPEEPVGAPAVQSILVAGEEDIRWVCEDMGLKDPEELRNYMERIRGSS

SEQ ID NO: 8832 - protein, 1023 aa, Homo sapiens
MCARMAGRTTAAPRGPYGPWLCLLVALALDVVRVDCGQAPLDPVYLPAALELLDAPEHFRVQQVGHYPPANSSLSSRSETFLLLQPWPRAQPLLRASYPPFATQQVVPPRVTEPHQRPVPWDVRAVSVEAAVTPAEPYARVLFHLKGQDWPPGSGSLPCARLHATHPAGTAHQACRFQPSLGACVVELELPSHWFSQASTTRAELAYTLEPAAEGPGGCGSGEENDPGEQALPVGGVELRPADPPQYQEVPLDEAVTLRVPDMPVRPGQLFSATLLLRHNFTASLLTLRIKVKKGLHVTAARPAQPTLWTAKLDRFKGSRHHTTLITCHRAGLTEPDSSPLELSEFLWVDFVVENSTGGGVAVTRPVTWQLEYPGQAPEAEKDKMVWEILVSERDIRALIPLAKAEELVNTAPLTGVPQHVPVRLVTVDGGGALVEVTEHVGCESANTQVLQVSEACDAVFVAGKESRGARGVRVDFWWRRLRASLRLTVWAPLLPLRIELTDTTLEQVRGWRVPGPAEGPAEPAAEASDEAERRARGCHLQYQRAGVRFLAPFAAHPLDGGRRLTHLLGPDWLLDVSHLVAPHARVLDSRVASLEGGRVVVGREPGVTSIEVRSPLSDSILGEQALAVTDDKVSVLELRVQPVMGISLTLSRGTAHPGEVTATCWAQSALPAPKQEVALSLWLSFSDHTVAPAELYDRRDLGLSVSAEEPGAILPAEEQGAQLGVVVSGAGAEGLPLHVALHPPEPCRRGRHRVPLASGTAWLGLPPASTPAPALPSSPAWSPPATEATMGGKRQVAGSVGGNTGVRGKFERAEEEARKEETEAREEEEEEEEEMVPAPQHVTELELGMYALLGVFCVAIFIFLVNGVVFVLRYQRKEPPDSATDPTSPQPHNWVWLGTDQEELSRQLDRQSPGPPKGEGSCPCESGGGGEAPTLAPGPPGGTTSSSSTLARKEAGGRRKRVEFVTFAPAPPAQSPEEPVGAPAVQSILVAGEEDIRWVCEDMGLKDPEELRNYMERIRGSS

SEQ ID NO: 8833 - protein, 341 aa, Homo sapiens
MLPEQLYFLQSPPEEEPEYHPDASAQELNVRESDVRVCDESSCKYGGVCKEDGDGLKCACQFQCHTNYIPVCGSNGDTYQNECFLRRAACKHQKEITVIARGPCYSDNGSGSGEGEEEGSGAEVHRKHSKCGPCKYKAECDEDAENVGCVCNIDCSGYSFNPVCASDGSSYNNPCFVREASCIKQEQIDIRHLGHCTDTDDTSLLGKKDDGLQYRPDVKDASDQREDVYIGNHMPCPENLNGYCIHGKCEFIYSTQKASCRCESGYTGQHCEKTDFSILYVVPSRQKLTHVLIAAIIGAVQIAIIVAIVMCITRKCPKNNRGRRQKQNLGHFTSDTSSRMV

SEQ ID NO: 8834 - protein, 380 aa, Homo sapiens
MGAAAAEAPLRLPAAPPLAFCCYTSVLLLFAFSLPGSRASNQPPGGGGGSGGDCPGGKGKSINCSELNVRESDVRVCDESSCKYGGVCKEDGDGLKCACQFQCHTNYIPVCGSNGDTYQNECFLRRAACKHQKEITVIARGPCYSDNGSGSGEGEEEGSGAEVHRKHSKCGPCKYKAECDEDAENVGCVCNIDCSGYSFNPVCASDGSSYNNPCFVREASCIKQEQIDIRHLGHCTDTDDTSLLGKKDDGLQYRPDVKDASDQREDVYIGNHMPCPENLNGYCIHGKCEFIYSTQKASCRCESGYTGQHCEKTDFSILYVVPSRQKLTHVLIAAIIGAVQIAIIVAIVMCITRKCPKNNRGRRQKQNLGHFTSDTSSRMV

SEQ ID NO: 8835 - protein, 130 aa, Homo sapiens
MQERTGAATARRESLPQANNPEQLCKQRCINEASWTMKRVLSCVPEPTVVMAARALCMLGLVLALLSSSSAEEYVGLSANQCAVPAKDRVDCGYPHVTPKECNNRGCCFDSRIPGVPWCFKPLQEAECTF

SEQ ID NO: 8836 - protein, 94 aa, Homo sapiens
MKRVLSCVPEPTVVMAARALCMLGLVLALLSSSSAEEYVGLSANQCAVPAKDRVDCGYPHVTPKECNNRGCCFDSRIPGVPWCFKPLQEAECTF

SEQ ID NO: 8837 - protein, 498 aa, Homo sapiens
MALPTLPSYWCSQQRLNQQLARQREQEARLRQQWEQNSRYFRMSDICSSKQAEWSSKTSYQRSMHAYQREKMKEEKRRSLEARREKLRQLMQEEQDLLARELEELRLSMNLQERRIREQHGKLKSAKEEQRKLIAEQLLYEHWKKNNPKLREMELDLHQKHVVNSWEMQKEEKKQQEATAEQENKRYENEYERARREALERMKAEEERRQLEDKLQAEALLQQMEELKLKEVEATKLKKEQENLLKQRWELERLEEERKQMEAFRQKAELGRFLRHQYNAQLSRRTQQIQEELEADRRILQALLEKEDESQRLHLARREQVMADVAWMKQAIEEQLQLERAREAELQMLLREEAKEMWEKREAEWARERSARDRLMSEVLTGRQQQIQEKIEQNRRAQEESLKHREQLIRNLEEVRELARREKEESEKLKSARKQELEAQVAERRLQAWEADQQEEEEEEEARRVEQLSDALLQQEAETMAEQGYRPKPYGHPKIAWN

SEQ ID NO: 8838 - protein, 498 aa, Homo sapiens; identical to SEQ ID NO: 8837

SEQ ID NO: 8839 - protein, 174 aa, Homo sapiens
MALPTLPSYWCSQQRLNQQLARQREQEARLRQQWEQNSRYFRMSDICSSKQAEWSSKTSYQRSMHAYQREKMKEEKRRSLEARREKLRQLMQEEQDLLARELEELRLSMNLQERRIREQHGKLKSAKEEQRKLIAEQLLYEHWKKNNPKLREMELDLHQKHVVNSWEMQKEEKK

SEQ ID NO: 8840 - protein, 220 aa, Homo sapiens
MALPTLPSYWCSQQRLNQQLARQREQEARLRQQWEQNSRYFRMSDICSSKQAEWSSKTSYQRSMHAYQREKMKEEKRRSLEARREKLRQLMQEEQDLLARELEELRLSMNLQERRIREQHGKLKSAKEEQRKLIAEQLLYEHWKKNNPKLREMELDLHQKHVVNSWEMQKEEKKQQEATAEQENKRYENEYERARREALERMKAEEERRLSRTDGHKRNP

SEQ ID NO: 8841 - protein, 498 aa, Homo sapiens; identical to SEQ ID NO: 8837

SEQ ID NO: 8842 - protein, 1029 aa, Homo sapiens
MQTNEGEVSEESSSKVEQEDFVMEGHGKTPPPGEESKQEKEQEREEQLMEDKKRKKEDKKKKEATQKVTEQKTKVPEVTKPSLSQPTAASPIGSSPSPPVNGGNNAKRVAVPNGQPPSAARYMPREVPPRFRCQQDHKVLLKRGQPPPPSCMLLGGGAGPPPCTAPGANPNNAQVTGALLQSESGTAPVWSKSTPPAPDNGTSAWGEPNESSPGWGEMDDTGASTTGWGNTPANAPNAMKPNSKSMQDGWGESDGPVTGARHPSWEEEEDGGVWNTTGSQGSASSHNSASWGQGGKKQMKCSLKGGNNDSWMNPLAKQFSNMGLLSQTEDNPSSKMDLSVGSLSDKKFDVDKRAMNLGDFNDIMRKDRSGFRPPNSKDMGTTDSGPYFEKGGSHGLFGNSTAQSRGLHTPVQPLNSSPSLRAQVPPQFISPQVSASMLKQFPNSGLSPGLFNVGPQLSPQQIAMLSQLPQIPQFQLACQLLLQQQQQQQLLQNQRKISQAVRQQQEQQLARMVSALQQQQQQQQRQPGMKHSPSHPVGPKPHLDNMVPNALNVGLPDLQTKGPIPGYGSGFSSGGMDYGMVGGKEAGTESRFKQWTSMMEGLPSVATQEANMHKNGAIVAPGKTRGGSPYNQFDIIPGDTLGGHTGPAGDSWLPAKSPPTNKIGSKSSNASWPPEFQPGVPWKGIQNIDPESDPYVTPGSVLGGTATSPIVDTDHQLLRDNTTGSNSSLNTSLPSPGAWPYSASDNSFTNVHSTSAKFPDYKSTWSPDPIGHNPTHLSNKMWKNHISSRNTTPLPRPPPGLTNPKPSSPWSSTAPRSVRGWGTQDSRLASASTWSDGGSVRPSYWLVLHNLTPQIDGSTLRTICMQHGPLLTFHLNLTQGTALIRYSTKQEAAKAQTALHMCVLGNTTILAEFATDDEVSRFLAQAQPPTPAATPSAPAAGWQSLETGQNQSDPVGPALNLFGGSTGLGQWSSSAGGSSGADLAGASLWGPPNYSSSLWGVPTVEDPHRMGSPAPLLPGDLLGGGSDSI

SEQ ID NO: 8843 - protein, 1723 aa, Homo sapiens
MREKEQEREEQLMEDKKRKKEDKKKKEATQKVTEQKTKVPEVTKPSLSQPTAASPIGSSPSPPVNGGNNAKRVAVPNGQPPSAARYMPREVPPRFRCQQDHKVLLKRGQPPPPSCMLLGGGAGPPPCTAPGANPNNAQVTGALLQSESGTAPDSTLGGAAASNYANSTWGSGASSNNGTSPNPIHIWDKVIVDGSDMEEWPCIASKDTESSSENTTDNNSASNPGSEKSTLPGSTTSNKGKGSQCQSASSGNECNLGVWKSDPKAKSVQSSNSTTENNNGLGNWRNVSGQDRIGPGSGFSNFNPNSNPSAWPALVQEGTSRKGALETDNSNSSAQVSTVGQTSREQQSKMENAGVNFVVSGREQAQIHNTDGPKNGNTNSLNLSSPNPMENKGMPFGMGLGNTSRSTDAPSQSTGDRKTGSVGSWGAARGPSGTDTVSGQSNSGNNGNNGKEREDSWKGASVQKSTGSKNDSWDNNNRSTGGSWNFGPQDSNDNKWGEGNKMTSGVSQGEWKQPTGSDELKIGEWSGPNQPNSSTGAWDNQKGHPLPENQGNAQAPCWGRSSSSTGSEVGGQSTGSNHKAGSSDSHNSGRRSYRPTHPDCQAVLQTLLSRTDLDPRVLSNTGWGQTQIKQDTVWDIEEVPRPEGKSDKGTEGWESAATQTKNSGGWGDAPSQSNQMKSGWGELSASTEWKDPKNTGGWNDYKNNNSSNWGGGRPDEKTPSSWNENPSKDQGWGGGRQPNQGWSSGKNGWGEEVDQTKNSNWESSASKPVSGWGEGGQNEIGTWGNGGNASLASKGGWEDCKRSPAWNETGRQPNSWNKQHQQQQPPQQPPPPQPEASGSWGGPPPPPPGNVRPSNSSWSSGPQPATPKDEEPSGWEEPSPQSISRKMDIDDGTSAWGDPNSYNYKNVNLWDKNSQGGPAPREPNLPTPMTSKSASDSKSMQDGWGESDGPVTGARHPSWEEEEDGGVWNTTGSQGSASSHNSASWGQGGKKQMKCSLKGGNNDSWMNPLAKQFSNMGLLSQTEDNPSSKMDLSVGSLSDKKFDVDKRAMNLGDFNDIMRKDRSGFRPPNSKDMGTTDSGPYFEKGGSHGLFGNSTAQSRGLHTPVQPLNSSPSLRAQVPPQFISPQVSASMLKQFPNSGLSPGLFNVGPQLSPQQIAMLSQLPQIPQFQLACQLLLQQQQQQQLLQNQRKISQAVRQQQEQQLARMVSALQQQQQQQQRQPGMKHSPSHPVGPKPHLDNMVPNALNVGLPDLQTKGPIPGYGSGFSSGGMDYGMVGGKEAGTESRFKQWTSMMEGLPSVATQEANMHKNGAIVAPGKTRGGSPYNQFDIIPGDTLGGHTGPAGDSWLPAKSPPTNKIGSKSSNASWPPEFQPGVPWKGIQNIDPESDPYVTPGSVLGGTATSPIVDTDHQLLRDNTTGSNSSLNTSLPSPGAWPYSASDNSFTNVHSTSAKFPDYKSTWSPDPIGHNPTHLSNKMWKNHISSRNTTPLPRPPPGLTNPKPSSPWSSTAPRSVRGWGTQDSRLASASTWSDGGSVRPSYWLVLHNLTPQIDGSTLRTICMQHGPLLTFHLNLTQGTALIRYSTKQEAAKAQTALHMCVLGNTTILAEFATDDEVSRFLAQAQPPTPAATPSAPAAGWQSLETGQNQSDPVGPALNLFGGSTGLGQWSSSAGGSSGADLAGASLWGPPNYSSSLWGVPTVEDPHRMGSPAPLLPGDLLGGGSDSI

SEQ ID NO: 8844 - protein, 1723 aa, Homo sapiens
MREKEQEREEQLMEDKKRKKEDKKKKEATQKHSNQKTAMPEVTKPSLSQPTAASPIGSSPSPPVNGGNNAKRVAVPNGQPPSAARYMPREVPPRFRCQQDHKVLLKRGQPPPPSCMLLGGGAGPPPCTAPGANPNNAQVTGALLQSESGTAPDSTLGGAAASNYANSTWGSGASSNNGTSPNPIHIWDKVIVDGSDMEEWPCIASKDTESSSENTTDNNSASNPGSEKSTLPGSTTSNKGKGSQCQSASSGNECNLGVWKSDPKAKSVQSSNSTTENNNGLGNWRNVSGQDRIGPGSGFSNFNPNSNPSAWPALVQEGTSRKGALETDNSNSSAQVSTVGQTSREQQSKMENAGVNFVVSGREQAQIHNTDGPKNGNTNSLNLSSPNPMENKGMPFGMGLGNTSRSTDAPSQSTGDRKTGSVGSWGAARGPSGTDTVSGQSNSGNNGNNGKEREDSWKGASVQKSTGSKNDSWDNNNRSTGGSWNFGPQDSNDNKWGEGNKMTSGVSQGEWKQPTGSDELKIGEWSGPNQPNSSTGAWDNQKGHPLPENQGNAQAPCWGRSSSSTGSEVGGQSTGSNHKAGSSDSHNSGRRSYRPTHPDCQAVLQTLLSRTDLDPRVLSNTGWGQTQIKQDTVWDIEEVPRPEGKSDKGTEGWESAATQTKNSGGWGDAPSQSNQMKSGWGELSASTEWKDPKNTGGWNDYKNNNSSNWGGGRPDEKTPSSWNENPSKDQGWGGGRQPNQGWSSGKNGWGEEVDQTKNSNWESSASKPVSGWGEGGQNEIGTWGNGGNASLASKGGWEDCKRSPAWNETGRQPNSWNKQHQQQQPPQQPPPPQPEASGSWGGPPPPPPGNVRPSNSSWSSGPQPATPKDEEPSGWEEPSPQSISRKMDIDDGTSAWGDPNSYNYKNVNLWDKNSQGGPAPREPNLPTPMTSKSASDSKSMQDGWGESDGPVTGARHPSWEEEEDGGVWNTTGSQGSASSHNSASWGQGGKKQMKCSLKGGNNDSWMNPLAKQFSNMGLLSQTEDNPSSKMDLSVGSLSDKKFDVDKRAMNLGDFNDIMRKDRSGFRPPNSKDMGTTDSGPYFEKGGSHGLFGNSTAQSRGLHTPVQPLNSSPSLRAQVPPQFISPQVSASMLKQFPNSGLSPGLFNVGPQLSPQQIAMLSQLPQIPQFQLACQLLLQQQQQQQLLQNQRKISQAVRQQQEQQLARMVSALQQQQQQQQRQPGMKHSPSHPVGPKPHLDNMVPNALNVGLPDLQTKGPIPGYGSGFSSGGMDYGMVGGKEAGTESRFKQWTSMMEGLPSVATQEANMHKNGAIVAPGKTRGGSPYNQFDIIPGDTLGGHTGPAGDSWLPAKSPPTNKIGSKSSNASWPPEFQPGVPWKGIQNIDPESDPYVTPGSVLGGTATSPIVDTDHQLLRDNTTGSNSSLNTSLPSPGAWPYSASDNSFTNVHSTSAKFPDYKSTWSPDPIGHNPTHLSNKMWKNHISSRNTTPLPRPPPGLTNPKPSSPWSSTAPRSVRGWGTQDSRLASASTWSDGGSVRPSYWLVLHNLTPQIDGSTLRTICMQHGPLLTFHLNLTQGTALIRYSTKQEAAKAQTALHMCVLGNTTILAEFATDDEVSRFLAQAQPPTPAATPSAPAAGWQSLETGQNQSDPVGPALNLFGGSTGLGQWSSSAGGSSGADLAGASLWGPPNYSSSLWGVPTVEDPHRMGSPAPLLPGDLLGGGSDSI

SEQ ID NO: 8845 - protein, 1029 aa, Homo sapiens; identical to SEQ ID NO: 8842

SEQ ID NO: 8846 - protein, 37 aa, Homo sapiens
MQTNEGEVSEESSSKVEQEDFVMEGHGKTPPPGEESK

SEQ ID NO: 8847 - protein, 1833 aa, Homo sapiens
MREKEQEREEQLMEDKKRKKEDKKKKEATQKVTEQKTKVPEVTKPSLSQPTAASPIGSSPSPPVNGGNNAKRVAVPNGQPPSAARYMPREVPPRFRCQQDHKVLLKRGQPPPPSCMLLGGGAGPPPCTAPGANPNNAQVTGALLQSESGTAPDSTLGGAAASNYANSTWGSGASSNNGTSPNPIHIWDKVIVDGSDMEEWPCIASKDTESSSENTTDNNSASNPGSEKSTLPGSTTSNKGKGSQCQSASSGNECNLGVWKSDPKAKSVQSSNSTTENNNGLGNWRNVSGQDRIGPGSGFSNFNPNSNPSAWPALVQEGTSRKGALETDNSNSSAQVSTVGQTSREQQSKMENAGVNFVVSGREQAQIHNTDGPKNGNTNSLNLSSPNPMENKGMPFGMGLGNTSRSTDAPSQSTGDRKTGSVGSWGAARGPSGTDTVSGQSNSGNNGNNGKEREDSWKGASVQKSTGSKNDSWDNNNRSTGGSWNFGPQDSNDNKWGEGNKMTSGVSQGEWKQPTGSDELKIGEWSGPNQPNSSTGAWDNQKGHPLPENQGNAQAPCWGRSSSSTGSEVGGQSTGSNHKAGSSDSHNSGRRSYRPTHPDCQAVLQTLLSRTDLDPRVLSNTGWGQTQIKQDTVWDIEEVPRPEGKSDKGTEGWESAATQTKNSGGWGDAPSQSNQMKSGWGELSASTEWKDPKNTGGWNDYKNNNSSNWGGGRPDEKTPSSWNENPSKDQGWGGGRQPNQGWSSGKNGWGEEVDQTKNSNWESSASKPVSGWGEGGQNEIGTWGNGGNASLASKGGWEDCKRSPAWNETGRQPNSWNKQHQQQQPPQQPPPPQPEASGSWGGPPPPPPGNVRPSNSSWSSGPQPATPKDEEPSGWEEPSPQSISRKMDIDDGTSAWGDPNSYNYKNVNLWDKNSQGGPAPREPNLPTPMTSKSASVWSKSTPPAPDNGTSAWGEPNESSPGWGEMDDTGASTTGWGNTPANAPNAMKPNSKSMQDGWGESDGPVTGARHPSWEEEEDGGVWNTTGSQGSASSHNSASWGQGGKKQMKCSLKGGNNDSWMNPLAKQFSNMGLLSQTEDNPSSKMDLSVGSLSDKKFDVDKRAMNLGDFNDIMRKDRSGFRPPNSKDMGTTDSGPYFEKLTLPFSNQDGCLGDEAPCSPFSPSPSYKLSPSGSTLPNVSLGAIGTGLNPQNFAARQGGSHGLFGNSTAQSRGLHTPVQPLNSSPSLRAQVPPQFISPQVSASMLKQFPNSGLSPGLFNVGPQLSPQQIAMLSQLPQIPQFQLACQLLLQQQQQQQLLQNQRKISQAVRQQQEQQLARMVSALQQQQQQQQRQPGMKHSPSHPVGPKPHLDNMVPNALNVGLPDLQTKGPIPGYGSGFSSGGMDYGMVGGKEAGTESRFKQWTSMMEGLPSVATQEANMHKNGAIVAPGKTRGGSPYNQFDIIPGDTLGGHTGPAGDSWLPAKSPPTNKIGSKSSNASWPPEFQPGVPWKGIQNIDPESDPYVTPGSVLGGTATSPIVDTDHQLLRDNTTGSNSSLNTSLPSPGAWPYSASDNSFTNVHSTSAKFPDYKSTWSPDPIGHNPTHLSNKMWKNHISSRNTTPLPRPPPGLTNPKPSSPWSSTAPRSVRGWGTQDSRLASASTWSDGGSVRPSYWLVLHNLTPQIDGSTLRTICMQHGPLLTFHLNLTQGTALIRYSTKQEAAKAQTALHMCVLGNTTILAEFATDDEVSRFLAQAQPPTPAATPSAPAAGWQSLETGQNQSDPVGPALNLFGGSTGLGQWSSSAGGSSGADLAGASLWGPPNYSSSLWGVPTVEDPHRMGSPAPLLPGDLLGGGSDSI

SEQ ID NO: 8848 - protein, 1050 aa, Homo sapiens
MEVAVEKAVAAAAAASAAASGGPSAAPSGENEAESRQGPDSERGGEAARLNLLDTCAVCHQNIQSRAPKLLPCLHSFCQRCLPAPQRYLMLPAPMLGSAETPPPVPAPGSPVSGSSPFATQVGVIRCPVCSQECAERHIIDNFFVKDTTEVPSSTVEKSNQVCTSCEDNAEANGFCVECVEWLCKTCIRAHQRVKFTKDHTVRQKEEVSPEAVGVTSQRPVFCPFHKKEQLKLYCETCDKLTCRDCQLLEHKEHRYQFIEEAFQNQKVIIDTLITKLMEKTKYIKFTGNQIQNRIIEVNQNQKQVEQDIKVAIFTLMVEINKKGKALLHQLESLAKDHRMKLMQQQQEVAGLSKQLEHVMHFSKWAVSSGSSTALLYSKRLITYRLRHLLRARCDASPVTNNTIQFHCDPSFWAQNIINLGSLVIEDKESQPQMPKQNPVVEQNSQPPSGLSSNQLSKFPTQISLAQLRLQHMQQQVMAQRQQVQRRPAPVGLPNPRMQGPIQQPSISHQQPPPRLINFQNHSPKPNGPVLPPHPQQLRYPPNQNIPRQAIKPNPLQMAFLAQQAIKQWQISSGQGTPSTTNSTSSTPSSPTITSAAGYDGKAFGSPMIDLSSPVGGSYNLPSLPDIDCSSTIMLDNIVRKDTNIDHGQPRPPSNRTVQSPNSSVPSPGLAGPVTMTSVHPPIRSPSASSVGSRGSSGSSSKPAGADSTHKVPVVMLEPIRIKQENSGPPENYDFPVVIVKQESDEESRPQNANYPRSILTSLLLNSSQSSTSEETVLRSDAPDSTGDQPGLHQDNSSNGKSEWLDPSQKSPLHVGETRKEDDPNEDWCAVCQNGGELLCCEKCPKVFHLSCHVPTLTNFPSGEWICTFCRDLSKPEVEYDCDAPSHNSEKKKTEGLVKLTPIDKRKCERLLLFLYCHEMSLAFQDPVPLTVPDYYKIIKNPMDLSTIKKRLQEDYSMYSKPEDFVADFRLIFQNCAEFNEPDSEVANAGIKLENYFEELLKNLYPEKRFPKPEFRNESEDNKFSDDSDDDFVQPRKKRLKSIEERQLLK

SEQ ID NO: 8849 - protein, 549 aa, Homo sapiens
MEGPRSAACRARPATSPGAVDLTAPPPPPLLRILNSRAAPATRTFADLCRSLLQPESRVLCRLQPVNCYPPAASTKLCPVGVIRCPVCSQECAERHIIDNFFVKDTTEVPSSTVEKSNQVCTSCEDNAEANGFCVECVEWLCKTCIRAHQRVKFTKDHTVRQKEEVSPEAVGVTSQRPVFCPFHKKEQLKLYCETCDKLTCRDCQLLEHKEHRYQFIEEAFQNQKVIIDTLITKLMEKTKYIKFTGNQIQNRIIEVNQNQKQVEQDIKVAIFTLMVEINKKGKALLHQLESLAKDHRMKLMQQQQEVAGLSKQLEHVMHFSKWAVSSGSSTALLYSKRLITYRLRHLLRARCDASPVTNNTIQFHCDPSFWAQNIINLGSLVIEDKESQPQMPKQNPVVEQNSQPPSGLSSNQLSKFPTQISLAQLRLQHMQQQQPPPRLINFQNHSPKPNGPVLPPHPQQLRYPPNQNIPRQAIKPNPLQMAFLAQQAIKQWQISSGQGTPSTTQNINTAACTVFDVRVLHHIPYWALNISSSERDSFLWFSSVYNLE

SEQ ID NO: 8850 - protein, 1016 aa, Homo sapiens
MEVAVEKAVAAAAAASAAASGGPSAAPSGENEAESRQGPDSERGGEAARLNLLDTCAVCHQNIQSRAPKLLPCLHSFCQRCLPAPQRYLMLPAPMLGSAETPPPVPAPGSPVSGSSPFATQVGVIRCPVCSQECAERHIIDNFFVKDTTEVPSSTVEKSNQVCTSCEDNAEANGFCVECVEWLCKTCIRAHQRVKFTKDHTVRQKEEVSPEAVGVTSQRPVFCPFHKKEQLKLYCETCDKLTCRDCQLLEHKEHRYQFIEEAFQNQKVIIDTLITKLMEKTKYIKFTGNQIQNRIIEVNQNQKQVEQDIKVAIFTLMVEINKKGKALLHQLESLAKDHRMKLMQQQQEVAGLSKQLEHVMHFSKWAVSSGSSTALLYSKRLITYRLRHLLRARCDASPVTNNTIQFHCDPSFWAQNIINLGSLVIEDKESQPQMPKQNPVVEQNSQPPSGLSSNQLSKFPTQISLAQLRLQHMQQQQPPPRLINFQNHSPKPNGPVLPPHPQQLRYPPNQNIPRQAIKPNPLQMAFLAQQAIKQWQISSGQGTPSTTNSTSSTPSSPTITSAAGYDGKAFGSPMIDLSSPVGGSYNLPSLPDIDCSSTIMLDNIVRKDTNIDHGQPRPPSNRTVQSPNSSVPSPGLAGPVTMTSVHPPIRSPSASSVGSRGSSGSSSKPAGADSTHKVPVVMLEPIRIKQENSGPPENYDFPVVIVKQESDEESRPQNANYPRSILTSLLLNSSQSSTSEETVLRSDAPDSTGDQPGLHQDNSSNGKSEWLDPSQKSPLHVGETRKEDDPNEDWCAVCQNGGELLCCEKCPKVFHLSCHVPTLTNFPSGEWICTFCRDLSKPEVEYDCDAPSHNSEKKKTEGLVKLTPIDKRKCERLLLFLYCHEMSLAFQDPVPLTVPDYYKIIKNPMDLSTIKKRLQEDYSMYSKPEDFVADFRLIFQNCAEFNEPDSEVANAGIKLENYFEELLKNLYPEKRFPKPEFRNESEDNKFSDDSDDDFVQPRKKRLKSIEERQLLK

SEQ ID NO: 8851 - protein, 961 aa, Homo sapiens
MLPAPMLGSAETPPPVPAPGSPVSGSSPFATQVGVIRCPVCSQECAERHIIDNFFVKDTTEVPSSTVEKSNQVCTSCEDNAEANGFCVECVEWLCKTCIRAHQRVKFTKDHTVRQKEEVSPEAVGVTSQRPVFCPFHKKEQLKLYCETCDKLTCRDCQLLEHKEHRYQFIEEAFQNQKVIIDTLITKLMEKTKYIKFTGNQIQNRIIEVNQNQKQVEQDIKVAIFTLMVEINKKGKALLHQLESLAKDHRMKLMQQQQEVAGLSKQLEHVMHFSKWAVSSGSSTALLYSKRLITYRLRHLLRARCDASPVTNNTIQFHCDPSFWAQNIINLGSLVIEDKESQPQMPKQNPVVEQNSQPPSGLSSNQLSKFPTQISLAQLRLQHMQQQVMAQRQQVQRRPAPVGLPNPRMQGPIQQPSISHQQPPPRLINFQNHSPKPNGPVLPPHPQQLRYPPNQNIPRQAIKPNPLQMAFLAQQAIKQWQISSGQGTPSTTNSTSSTPSSPTITSAAGYDGKAFGSPMIDLSSPVGGSYNLPSLPDIDCSSTIMLDNIVRKDTNIDHGQPRPPSNRTVQSPNSSVPSPGLAGPVTMTSVHPPIRSPSASSVGSRGSSGSSSKPAGADSTHKVPVVMLEPIRIKQENSGPPENYDFPVVIVKQESDEESRPQNANYPRSILTSLLLNSSQSSTSEETVLRSDAPDSTGDQPGLHQDNSSNGKSEWLDPSQKSPLHVGETRKEDDPNEDWCAVCQNGGELLCCEKCPKVFHLSCHVPTLTNFPSGEWICTFCRDLSKPEVEYDCDAPSHNSEKKKTEGLVKLTPIDKRKCERLLLFLYCHEMSLAFQDPVPLTVPDYYKIIKNPMDLSTIKKRLQEDYSMYSKPEDFVADFRLIFQNCAEFNEPDSEVANAGIKLENYFEELLKNLYPEKRFPKPEFRNESEDNKFSDDSDDDFVQPRKKRLKSIEERQLLK

SEQ ID NO: 8852 - protein, 563 aa, Homo sapiens
MGLQACLLGLFALILSGKCSYSPEPDQRRTLPPGWVSLGRADPEEELSLTFALRQQNVERLSELVQAVSDPSSPQYGKYLTLENVADLVRPSPLTLHTVQKWLLAAGAQKCHSVITQDFLTCWLSIRQAELLLPGAEFHHYVGGPTETHVVRSPHPYQLPQALAPHVDFVGGLHRFPPTSSLRQRPEPQVTGTVGLHLGVTPSVIRKRYNLTSQDVGSGTSNNSQACAQFLEQYFHDSDLAQFMRLFGGNFAHQASVARVVGQQGRGRAGIEASLDVQYLMSAGANISTWVYSSPGRHEGQEPFLQWLMLLSNESALPHVHTVSYGDDEDSLSSAYIQRVNTELMKAAARGLTLLFASGDSGAGCWSVSGRHQFRPTFPASSPYVTTVGGTSFQEPFLITNEIVDYISGGGFSNVFPRPSYQEEAVTKFLSSSPHLPPSSYFNASGRAYPDVAALSDGYWVVSNRVPIPWVSGTSASTPVFGGILSLINEHRILSGRPPLGFLNPRLYQQHGAGLFDVTRGCHESCLDEEVEGQGFCSGPGWDPVTGWGTPNFPALLKTLLNP

SEQ ID NO: 8853 - protein, 346 aa, Homo sapiens
MGLQACLLGLFALILSGKCSYSPEPDQRRTLPPGWVSLGRADPEEELSLTFALRQQNVERLSELVQAVSDPSSPQYGKYLTLENVADLVRPSPLTLHTVQKWLLAAGAQKCHSVITQDFLTCWLSIRQAELLLPGAEFHHYVGGPTETHVVRSPHPYQLPHILEVPYVTTVGGTSFQEPFLITNEIVDYISGGGFSNVFPRPSYQEEAVTKFLSSSPHLPPSSYFNASGRAYPDVAALSDGYWVVSNRVPIPWVSGTSASTPVFGGILSLINEHRILSGRPPLGFLNPRLYQQHGAGLFDVTRGCHESCLDEEVEGQGFCSGPGWDPVTGWGTPNFPALLKTLLNP

SEQ ID NO: 8854 - protein, 1164 aa, Homo sapiens
MAQQANVGELLAMLDSPMLGVRDDVTAVFKENLNSDRGPMLVNTLVDYYLETSSQPALHILTTLQEPHDKHLLDRINEYVGKAATRLSILSLLGHVIRLQPSWKHKLSQAPLLPSLLKCLKMDTDVVVLTTGVLVLITMLPMIPQSGKQHLLDFFDIFGRLSSWCLKKPGHVAEVYLVHLHASVYALFHRLYGMYPCNFVSFLRSHYSMKENLETFEEVVKPMMEHVRIHPELVTGSKDHELDPRRWKRLETHDVVIECAKISLDPTEASYEDGYSVSHQISARFPHRSADVTTSPYADTQNSYGCATSTPYSTSRLMLLNMPGQLPQTLSSPSTRLITEPPQATLWSPSMVCGMTTPPTSPGNVPPDLSHPYSKVFGTTAGGKGTPLGTPATSPPPAPLCHSDDYVHISLPQATVTPPRKEERMDSARPCLHRQHHLLNDRGSEEPPGSKGSVTLSDLPGFLGDLASEEDSIEKDKEEAAISRELSEITTAEAEPVVPRGGFDSPFYRDSLPGSQRKTHSAASSSQGASVNPEPLHSSLDKLGPDTPKQAFTPIDLPCGSADESPAGDRECQTSLETSIFTPSPCKIPPPTRVGFGSGQPPPYDHLFEVALPKTAHHFVIRKTEELLKKAKGNTEEDGVPSTSPMEVLDRLIQQGADAHSKELNKLPLPSKSVDWTHFGGSPPSDEIRTLRDQLLLLHNQLLYERFKRQQHALRNRRLLRKVIKAAALEEHNAAMKDQLKLQEKDIQMWKVSLQKEQARYNQLQEQRDTMVTKLHSQIRQLQHDREEFYNQSQELQTKLEDCRNMIAELRIELKKANNKVCHTELLLSQVSQKLSNSESVQQQMEFLNRQLLVLGEVNELYLEQLQNKHSDTTKEVEMMKAAYRKELEKNRSHVLQQTQRLDTSQKRILELESHLAKKDHLLLEQKKYLEDVKLQARGQLQAAESRYEAQKRITQVFELEILDLYGRLEKDGLLKKLEEEKAEAAEAAEERLDCCNDGCSDSMVGHNEEASGHNGETKTPRPSSARGSSGSRGGGGSSSSSSELSTPEKPPHQRAGPFSSRWETTMGEASASIPTTVGSLPSSKSFLGMKARELFRNKSESQCDEDGMTSSLSESLKTELGKDLGVEAKIPLNLDGPHPSPPTPDSVGQLHIMDYNETHHEHS

SEQ ID NO: 8855 - protein, 366 aa, Homo sapiens
MAQQANVGELLAMLDSPMLGVRDDVTAVFKENLNSDRGPMLVNTLVDYYLETSSQPALHILTTLQEPHDKHLLDRINEYVGKAATRLSILSLLGHVIRLQPSWKHKLSQAPLLPSLLKCLKMDTDVVVLTTGVLVLITMLPMIPQSGKQHLLDFFDIFGRLSSWCLKKPGHVAEVYLVHLHASVYALFHRLYGMYPCNFVSFLRSHYSMKENLETFEEVVKPMMEHVRIHPELVTGSKDHELDPRRWKRLETHDVVIECAKISLDPTEASYEDGYSVSHQISARFPHRSADVTTSPYADTQNSYGCATSTPYSTSRLMLLNMPGQLPQTLSSPSTRLITEPPQVWCQLVCLLSPLLSGEADPLGQI

SEQ ID NO: 8856 - protein, 317 aa, Homo sapiens
MDTDVVVLTTGVLVLITMLPMIPQSGKQHLLDFFDIFGRLSSWCLKKPGHVAEVYLVHLHASVYALFHRLYGMYPCNFVSFLRSHYSMKENLETFEEVVKPMMEHVRIHPELVTGSKDHELDPRRWKRLETHDVVIECAKISLDPTEASYEDGYSVSHQISARFPHRSADVTTSPYADTQNSYGCATSTPYSTSRLMLLNMPGQLPQTLSSPSTRLITEPPQATLWSPSMVCGMTTPPTSPGNVPPDLSHPYSKVFGTTAGGKGTPLGTPATSPPPAPSVIRMTTCTFHSPRPQSHPPGRKREWILQDHVYTDNTIF

SEQ ID NO: 8857 - protein, 1164 aa, Homo sapiens; identical to SEQ ID NO: 8854

SEQ ID NO: 8858 - protein, 282 aa, Homo sapiens
MDTDVVVLTTGVLVLITMLPMIPQSGKQHLLDFFDIFGRLSSWCLKKPGHVAEVYLVHLHASVYALFHRLYGMYPCNFVSFLRSHYSMKENLETFEEVVKPMMEHVRIHPELVTGSKDHELDPRRWKRLETHDVVIECAKISLDPTEASYEDGYSVSHQISARFPHRSADVTTSPYADTQNSYGCATSTPYSTSRLMLLNMPGHLATTVRPRPPGPAAPGAVVEAEVVEAAAAAAASFLPQRNPHTRGQAHSAVGGRRLWEKRLPASPPLWAHFPVQKASWV

SEQ ID NO: 8859 - protein, 1113 aa, Homo sapiens
MAQQANVGELLAMLDSPMLGVRDDVTAVFKENLNSDRGPMLVNTLVDYYLETSSQPALHILTTLQEPHDKMDTDVVVLTTGVLVLITMLPMIPQSGKQHLLDFFDIFGRLSSWCLKKPGHVAEVYLVHLHASVYALFHRLYGMYPCNFVSFLRSHYSMKENLETFEEVVKPMMEHVRIHPELVTGSKDHELDPRRWKRLETHDVVIECAKISLDPTEASYEDGYSVSHQISARFPHRSADVTTSPYADTQNSYGCATSTPYSTSRLMLLNMPGQLPQTLSSPSTRLITEPPQATLWSPSMVCGMTTPPTSPGNVPPDLSHPYSKVFGTTAGGKGTPLGTPATSPPPAPLCHSDDYVHISLPQATVTPPRKEERMDSARPCLHRQHHLLNDRGSEEPPGSKGSVTLSDLPGFLGDLASEEDSIEKDKEEAAISRELSEITTAEAEPVVPRGGFDSPFYRDSLPGSQRKTHSAASSSQGASVNPEPLHSSLDKLGPDTPKQAFTPIDLPCGSADESPAGDRECQTSLETSIFTPSPCKIPPPTRVGFGSGQPPPYDHLFEVALPKTAHHFVIRKTEELLKKAKGNTEEDGVPSTSPMEVLDRLIQQGADAHSKELNKLPLPSKSVDWTHFGGSPPSDEIRTLRDQLLLLHNQLLYERFKRQQHALRNRRLLRKVIKAAALEEHNAAMKDQLKLQEKDIQMWKVSLQKEQARYNQLQEQRDTMVTKLHSQIRQLQHDREEFYNQSQELQTKLEDCRNMIAELRIELKKANNKVCHTELLLSQVSQKLSNSESVQQQMEFLNRQLLVLGEVNELYLEQLQNKHSDTTKEVEMMKAAYRKELEKNRSHVLQQTQRLDTSQKRILELESHLAKKDHLLLEQKKYLEDVKLQARGQLQAAESRYEAQKRITQVFELEILDLYGRLEKDGLLKKLEEEKAEAAEAAEERLDCCNDGCSDSMVGHNEEASGHNGETKTPRPSSARGSSGSRGGGGSSSSSSELSTPEKPPHQRAGPFSSRWETTMGEASASIPTTVGSLPSSKSFLGMKARELFRNKSESQCDEDGMTSSLSESLKTELGKDLGVEAKIPLNLDGPHPSPPTPDSVGQLHIMDYNETHHEHS

SEQ ID NO: 8860 - protein, 1807 aa, Homo sapiens
MAKPTSKDSGLKEKFKILLGLGTPRPNPRSAEGKQTEFIITAEILRELSMECGLNNRIRMIGQICEVAKTKKFEEHAVEALWKAVADLLQPERPLEARHAVLALLKAIVQGQGERLGVLRALFFKVIKDYPSNEDLHERLEVFKALTDNGRHITYLEEELADFVLQWMDVGLSSEFLLVLVNLVKFNSCYLDEYIARMVQMICLLCVRTASSVDIEVSLQVLDAVVCYNCLPAESLPLFIVTLCRTINVKELCEPCWKLMRNLLGTHLGHSAIYNMCHLMEDRAYMEDAPLLRGAVFFVGMALWGAHRLYSLRNSPTSVLPSFYQAMACPNEVVSYEIVLSITRLIKKYRKELQVVAWDILLNIIERLLQQLQTLDSPELRTIVHDLLTTVEELCDQNEFHGSQERYFELVERCADQRPESSLLNLISYRAQSIHPAKDGWIQNLQALMERFFRSESRGAVRIKVLDVLSFVLLINRQFYEEELINSVVISQLSHIPEDKDHQVRKLATQLLVDLAEGCHTHHFNSLLDIIEKVMARSLSPPPELEERDVAAYSASLEDVKTAVLGLLVILQTKLYTLPASHATRVYEMLVSHIQLHYKHSYTLPIASSIRLQAFDFLLLLRADSLHRLGLPNKDGVVRFSPYCVCDYMEPERGSEKKTSGPLSPPTGPPGPAPAGPAVRLGSVPYSLLFRVLLQCLKQESDWKVLKLVLGRLPESLRYKVLIFTSPCSVDQLCSALCSMLSGPKTLERLRGAPEGFSRTDLHLAVVPVLTALISYHNYLDKTKQREMVYCLEQGLIHRCASQCVVALSICSVEMPDIIIKALPVLVVKLTHISATASMAVPLLEFLSTLARLPHLYRNFAAEQYASVFAISLPYTNPSKFNQYIVCLAHHVIAMWFIRCRLPFRKDFVPFITKGLRSNVLLSFDDTPEKDSFRARSTSLNERPKSLRIARPPKQGLNNSPPVKEFKESSAAEAFRCRSISVSEHVVRSRIQTSLTSASLGSADENSVAQADDSLKNLHLELTETCLDMMARYVFSNFTAVPKRSPVGEFLLAGGRTKTWLVGNKLVTVTTSVGTGTRSLLGLDSGELQSGPESSSSPGVHVRQTKEAPAKLESQAGQQVSRGARDRVRSMSGGHGLRVGALDVPASQFLGSATSPGPRTAPAAKPEKASAGTRVPVQEKTNLAAYVPLLTQGWAEILVRRPTGNTSWLMSLENPLSPFSSDINNMPLQELSNALMAAERFKEHRDTALYKSLSVPAASTAKPPPLPRSNTVASFSSLYQSSCQGQLHRSVSWADSAVVMEEGSPGEVPVLVEPPGLEDVEAALGMDRRTDAYSRSSSVSSQEEKSLHAEELVGRGIPIERVVSSEGGRPSVDLSFQPSQPLSKSSSSPELQTLQDILGDPGDKADVGRLSPEVKARSQSGTLDGESAAWSASGEDSRGQPEGPLPSSSPRSPSGLRPRGYTISDSAPSRRGKRVERDALKSRATASNAEKVPGINPSFVFLQLYHSPFFGDESNKPILLPNESQSFERSVQLLDQIPSYDTHKIAVLYVGEGQSNSELAILSNEHGSYRYTEFLTGLGRLIELKDCQPDKVYLGGLDVCGEDGQFTYCWHDDIMQAVFHIATLMPTKDVDKHRCDKKRHLGNDFVSIVYNDSGEDFKLGTIKGQFNFVHVIVTPLDYECNLVSLQCRKDMEGLVDTSVAKIVSDRNLPFVARQMALHANMASQVHHSRSNPTDIYPSKWIARLRHIKRLRQRICEEAAYSNPSLPLVHPPSHSKAPAQTPAEPTPGYEVGQRKRLISSVEDFTEFV

SEQ ID NO: 8861 - protein, 1784 aa, Homo sapiens
MAKPTSKDSGLKEKFKILLGLGTPRPNPRSAEGKQTEFIITAEILRELSMECGLNNRIRMIGQICEVAKTKKFEEHAVEALWKAVADLLQPERPLEARHAVLALLKAIVQGQGERLGVLRALFFKVIKDYPSNEDLHERLEVFKALTDNGRHITYLEEELADFVLQWMDVGLSSEFLLVLVNLVKFNSCYLDEYIARMVQMICLLCVRTASSVDIEVSLQVLDAVVCYNCLPAESLPLFIVTLCRTINVKELCEPCWKLMRNLLGTHLGHSAIYNMCHLMEDRAYMEDAPLLRGAVFFVGMALWGAHRLYSLRNSPTSVLPSFYQAMACPNEVVSYEIVLSITRLIKKYRKELQVVAWDILLNIIERLLQQLQTLDSPELRTIVHDLLTTVEELCDQNEFHGSQERYFELVERCADQRPESSLLNLISYRAQSIHPAKDGWIQNLQALMERFFRSESRGAVRIKVLDVLSFVLLINRQFYEEELINSVVISQLSHIPEDKDHQVRKLATQLLVDLAEGCHTHHFNSLLDIIEKVMARSLSPPPELEERDVAAYSASLEDVKTAVLGLLVILQTKLYTLPASHATRVYEMLVSHIQLHYKHSYTLPIASSIRLQAFDFLLLLRADSLHRLGLPNKDGVVRFSPYCVCDYMEPERGSEKKTSGPLSPPTGPPGPAPAGPAVRLGSVPYSLLFRVLLQCLKQESDWKVLKLVLGRLPESLRYKVLIFTSPCSVDQLCSALCSMLSGPKTLERLRGAPEGFSRTDLHLAVVPVLTALISYHNYLDKTKQREMVYCLEQGLIHRCASQCVVALSICSVEMPDIIIKALPVLVVKLTHISATASMAVPLLEFLSTLARLPHLYRNFAAEQYASVFAISLPYTNPSKFNQYIVCLAHHVIAMWFIRCRLPFRKDFVPFITKGLRSNVLLSFDDTPEKDSFRARSTSLNERPKSLRIARPPKQGLNNSPPVKEFKESSAAEAFRCRSISVSEHVVRSRIQTSLTSASLGSADENSVAQADDSLKNLHLELTETCLDMMARYVFSNFTAVPKRSPVGEFLLAGGRTKTWLVGNKLVTVTTSVGTGTRSLLGLDSGELQSGPESSSSPGVHVRQTKEAPAKLESQAGQQVSRGARDRVRSMSGGHGLRVGALDVPASQFLGSATSPGPRTAPAAKPEKASAGTRVPVQEKTNLAAYVPLLTQGWAEILVRRPTGNTSWLMSLENPLSPFSSDINNMPLQELSNALMAAERFKEHRDTALYKSLSVPAASTAKPPPLPRSNTDSAVVMEEGSPGEVPVLVEPPGLEDVEAALGMDRRTDAYSRSSSVSSQEEKSLHAEELVGRGIPIERVVSSEGGRPSVDLSFQPSQPLSKSSSSPELQTLQDILGDPGDKADVGRLSPEVKARSQSGTLDGESAAWSASGEDSRGQPEGPLPSSSPRSPSGLRPRGYTISDSAPSRRGKRVERDALKSRATASNAEKVPGINPSFVFLQLYHSPFFGDESNKPILLPNESQSFERSVQLLDQIPSYDTHKIAVLYVGEGQSNSELAILSNEHGSYRYTEFLTGLGRLIELKDCQPDKVYLGGLDVCGEDGQFTYCWHDDIMQAVFHIATLMPTKDVDKHRCDKKRHLGNDFVSIVYNDSGEDFKLGTIKGQFNFVHVIVTPLDYECNLVSLQCRKDMEGLVDTSVAKIVSDRNLPFVARQMALHANMASQVHHSRSNPTDIYPSKWIARLRHIKRLRQRICEEAAYSNPSLPLVHPPSHSKAPAQTPAEPTPGYEVGQRKRLISSVEDFTEFV

SEQ ID NO: 8862 - protein, 1764 aa, Homo sapiens
MAKPTSKDSGLKEKFKILLGLGTPRPNPRSAEGKQTEFIITAEILRELSMECGLNNRIRMIGQICEVAKTKKFEEHAVEALWKAVADLLQPERPLEARHAVLALLKAIVQGQGERLGVLRALFFKVIKDYPSNEDLHERLEVFKALTDNGRHITYLEEELADFVLQWMDVGLSSEFLLVLVNLVKFNSCYLDEYIARMVQMICLLCVRTASSVDIEVSLQVLDAVVCYNCLPAESLPLFIVTLCRTINVKELCEPCWKLMRNLLGTHLGHSAIYNMCHLMEDRAYMEDAPLLRGAVFFVGMALWGAHRLYSLRNSPTSVLPSFYQAMACPNEVVSYEIVLSITRLIKKYRKELQVVAWDILLNIIERLLQQLQTLDSPELRTIVHDLLTTVEELCDQNEFHGSQERYFELVERCADQRPESSLLNLISYRAQSIHPAKDGWIQNLQALMERFFRSESRGAVRIKVLDVLSFVLLINRQFYEEELINSVVISQLSHIPEDKDHQVRKLATQLLVDLAEGCHTHHFNSLLDIIEKVMARSLSPPPELEERDVAAYSASLEDVKTAVLGLLVILQTKLYTLPASHATRVYEMLVSHIQLHYKHSYTLPIASSIRLQAFDFLLLLRADSLHRLGLPNKDGVVRFSPYCVCDYMEPERGSEKKTSGPLSPPTGPPGPAPAGPAVRLGSVPYSLLFRVLLQCLKQESDWKVLKLVLGRLPESLRYKVLIFTSPCSVDQLCSALCSMLSGPKTLERLRGAPEGFSRTDLHLAVVPVLTALISYHNYLDKTKQREMVYCLEQGLIHRCASQCVVALSICSVEMPDIIIKALPVLVVKLTHISATASMAVPLLEFLSTLARLPHLYRNFAAEQYASVFAISLPYTNPSKFNQYIVCLAHHVIAMWFIRCRLPFRKDFVPFITKGLRSNVLLSFDDTPEKDSFRARSTSLNERPKSRIQTSLTSASLGSADENSVAQADDSLKNLHLELTETCLDMMARYVFSNFTAVPKRSPVGEFLLAGGRTKTWLVGNKLVTVTTSVGTGTRSLLGLDSGELQSGPESSSSPGVHVRQTKEAPAKLESQAGQQVSRGARDRVRSMSGGHGLRVGALDVPASQFLGSATSPGPRTAPAAKPEKASAGTRVPVQEKTNLAAYVPLLTQGWAEILVRRPTGNTSWLMSLENPLSPFSSDINNMPLQELSNALMAAERFKEHRDTALYKSLSVPAASTAKPPPLPRSNTVASFSSLYQSSCQGQLHRSVSWADSAVVMEEGSPGEVPVLVEPPGLEDVEAALGMDRRTDAYSRSSSVSSQEEKSLHAEELVGRGIPIERVVSSEGGRPSVDLSFQPSQPLSKSSSSPELQTLQDILGDPGDKADVGRLSPEVKARSQSGTLDGESAAWSASGEDSRGQPEGPLPSSSPRSPSGLRPRGYTISDSAPSRRGKRVERDALKSRATASNAEKVPGINPSFVFLQLYHSPFFGDESNKPILLPNESQSFERSVQLLDQIPSYDTHKIAVLYVGEGQSNSELAILSNEHGSYRYTEFLTGLGRLIELKDCQPDKVYLGGLDVCGEDGQFTYCWHDDIMQAVFHIATLMPTKDVDKHRCDKKRHLGNDFVSIVYNDSGEDFKLGTIKGQFNFVHVIVTPLDYECNLVSLQCRKDMEGLVDTSVAKIVSDRNLPFVARQMALHANMASQVHHSRSNPTDIYPSKWIARLRHIKRLRQRICEEAAYSNPSLPLVHPPSHSKAPAQTPAEPTPGYEVGQRKRLISSVEDFTEFV

SEQ ID NO: 8863 - protein, 1692 aa, Homo sapiens
MECGLNNRIRMIGQICEVAKTKKFEEHAVEALWKAVADLLQPERPLEARHAVLALLKAIVQGQGERLGVLRALFFKVIKDYPSNEDLHERLEVFKALTDNGRHITYLEEELADFVLQWMDVGLSSEFLLVLVNLVKFNSCYLDEYIARMVQMICLLCVRTASSVDIEVSLQVLDAVVCYNCLPAESLPLFIVTLCRTINVKELCEPCWKLMRNLLGTHLGHSAIYNMCHLMEDRAYMEDAPLLRGAVFFVGMALWGAHRLYSLRNSPTSVLPSFYQAMACPNEVVSYEIVLSITRLIKKYRKELQVVAWDILLNIIERLLQQLQTLDSPELRTIVHDLLTTVEELCDQNEFHGSQERYFELVERCADQRPESSLLNLISYRAQSIHPAKDGWIQNLQALMERFFRSESRGAVRIKVLDVLSFVLLINRQFYEEELINSVVISQLSHIPEDKDHQVRKLATQLLVDLAEGCHTHHFNSLLDIIEKVMARSLSPPPELEERDVAAYSASLEDVKTAVLGLLVILQTKLYTLPASHATRVYEMLVSHIQLHYKHSYTLPIASSIRLQAFDFLLLLRADSLHRLGLPNKDGVVRFSPYCVCDYMEPERGSEKKTSGPLSPPTGPPGPAPAGPAVRLGSVPYSLLFRVLLQCLKQESDWKVLKLVLGRLPESLRYKVLIFTSPCSVDQLCSALCSMLSGPKTLERLRGAPEGFSRTDLHLAVVPVLTALISYHNYLDKTKQREMVYCLEQGLIHRCASQCVVALSICSVEMPDIIIKALPVLVVKLTHISATASMAVPLLEFLSTLARLPHLYRNFAAEQYASVFAISLPYTNPSKFNQYIVCLAHHVIAMWFIRCRLPFRKDFVPFITKGLRSNVLLSFDDTPEKDSFRARSTSLNERPKSRIQTSLTSASLGSADENSVAQADDSLKNLHLELTETCLDMMARYVFSNFTAVPKRSPVGEFLLAGGRTKTWLVGNKLVTVTTSVGTGTRSLLGLDSGELQSGPESSSSPGVHVRQTKEAPAKLESQAGQQVSRGARDRVRSMSGGHGLRVGALDVPASQFLGSATSPGPRTAPAAKPEKASAGTRVPVQEKTNLAAYVPLLTQGWAEILVRRPTGNTSWLMSLENPLSPFSSDINNMPLQELSNALMAAERFKEHRDTALYKSLSVPAASTAKPPPLPRSNTDSAVVMEEGSPGEVPVLVEPPGLEDVEAALGMDRRTDAYSRSSSVSSQEEKSLHAEELVGRGIPIERVVSSEGGRPSVDLSFQPSQPLSKSSSSPELQTLQDILGDPGDKADVGRLSPEVKARSQSGTLDGESAAWSASGEDSRGQPEGPLPSSSPRSPSGLRPRGYTISDSAPSRRGKRVERDALKSRATASNAEKVPGINPSFVFLQLYHSPFFGDESNKPILLPNESQSFERSVQLLDQIPSYDTHKIAVLYVGEGQSNSELAILSNEHGSYRYTEFLTGLGRLIELKDCQPDKVYLGGLDVCGEDGQFTYCWHDDIMQAVFHIATLMPTKDVDKHRCDKKRHLGNDFVSIVYNDSGEDFKLGTIKGQFNFVHVIVTPLDYECNLVSLQCRKDMEGLVDTSVAKIVSDRNLPFVARQMALHANMASQVHHSRSNPTDIYPSKWIARLRHIKRLRQRICEEAAYSNPSLPLVHPPSHSKAPAQTPAEPTPGYEVGQRKRLISSVEDFTEFV

SEQ ID NO: 8864 - protein, 1741 aa, Homo sapiens
MAKPTSKDSGLKEKFKILLGLGTPRPNPRSAEGKQTEFIITAEILRELSMECGLNNRIRMIGQICEVAKTKKFEEHAVEALWKAVADLLQPERPLEARHAVLALLKAIVQGQGERLGVLRALFFKVIKDYPSNEDLHERLEVFKALTDNGRHITYLEEELADFVLQWMDVGLSSEFLLVLVNLVKFNSCYLDEYIARMVQMICLLCVRTASSVDIEVSLQVLDAVVCYNCLPAESLPLFIVTLCRTINVKELCEPCWKLMRNLLGTHLGHSAIYNMCHLMEDRAYMEDAPLLRGAVFFVGMALWGAHRLYSLRNSPTSVLPSFYQAMACPNEVVSYEIVLSITRLIKKYRKELQVVAWDILLNIIERLLQQLQTLDSPELRTIVHDLLTTVEELCDQNEFHGSQERYFELVERCADQRPESSLLNLISYRAQSIHPAKDGWIQNLQALMERFFRSESRGAVRIKVLDVLSFVLLINRQFYEEELINSVVISQLSHIPEDKDHQVRKLATQLLVDLAEGCHTHHFNSLLDIIEKVMARSLSPPPELEERDVAAYSASLEDVKTAVLGLLVILQTKLYTLPASHATRVYEMLVSHIQLHYKHSYTLPIASSIRLQAFDFLLLLRADSLHRLGLPNKDGVVRFSPYCVCDYMEPERGSEKKTSGPLSPPTGPPGPAPAGPAVRLGSVPYSLLFRVLLQCLKQESDWKVLKLVLGRLPESLRYKVLIFTSPCSVDQLCSALCSMLSGPKTLERLRGAPEGFSRTDLHLAVVPVLTALISYHNYLDKTKQREMVYCLEQGLIHRCASQCVVALSICSVEMPDIIIKALPVLVVKLTHISATASMAVPLLEFLSTLARLPHLYRNFAAEQYASVFAISLPYTNPSKFNQYIVCLAHHVIAMWFIRCRLPFRKDFVPFITKGLRSNVLLSFDDTPEKDSFRARSTSLNERPKSRIQTSLTSASLGSADENSVAQADDSLKNLHLELTETCLDMMARYVFSNFTAVPKRSPVGEFLLAGGRTKTWLVGNKLVTVTTSVGTGTRSLLGLDSGELQSGPESSSSPGVHVRQTKEAPAKLESQAGQQVSRGARDRVRSMSGGHGLRVGALDVPASQFLGSATSPGPRTAPAAKPEKASAGTRVPVQEKTNLAAYVPLLTQGWAEILVRRPTGNTSWLMSLENPLSPFSSDINNMPLQELSNALMAAERFKEHRDTALYKSLSVPAASTAKPPPLPRSNTDSAVVMEEGSPGEVPVLVEPPGLEDVEAALGMDRRTDAYSRSSSVSSQEEKSLHAEELVGRGIPIERVVSSEGGRPSVDLSFQPSQPLSKSSSSPELQTLQDILGDPGDKADVGRLSPEVKARSQSGTLDGESAAWSASGEDSRGQPEGPLPSSSPRSPSGLRPRGYTISDSAPSRRGKRVERDALKSRATASNAEKVPGINPSFVFLQLYHSPFFGDESNKPILLPNESQSFERSVQLLDQIPSYDTHKIAVLYVGEGQSNSELAILSNEHGSYRYTEFLTGLGRLIELKDCQPDKVYLGGLDVCGEDGQFTYCWHDDIMQAVFHIATLMPTKDVDKHRCDKKRHLGNDFVSIVYNDSGEDFKLGTIKGQFNFVHVIVTPLDYECNLVSLQCRKDMEGLVDTSVAKIVSDRNLPFVARQMALHANMASQVHHSRSNPTDIYPSKWIARLRHIKRLRQRICEEAAYSNPSLPLVHPPSHSKAPAQTPAEPTPGYEVGQRKRLISSVEDFTEFV

SEQ ID NO: 8865 - protein, 1704 aa, Homo sapiens
MAKPTSKDSGLKEKFKILLGLGTPRPNPRSAEGKQTEFIITAEILRELSMECGLNNRIRMIGQICEVAKTKKFEEGERLGVLRALFFKVIKDYPSNEDLHERLEVFKALTDNGRHITYLEEELADFVLQWMDVGLSSEFLLVLVNLVKFNSCYLDEYIARMVQMICLLCVRTASSVDIEVSLQVLDAVVCYNCLPAESLPLFIVTLCRTINVKELCEPCWKLMRNLLGTHLGHSAIYNMCHLMEDRAYMEDAPLLRGAVFFVGMALWGAHRLYSLRNSPTSVLPSFYQAMACPNEVVSYEIVLSITRLIKKYRKELQVVAWDILLNIIERLLQQLQTLDSPELRTIVHDLLTTVEELCDQNEFHGSQERYFELVERCADQRPESSLLNLISYRAQSIHPAKDGWIQNLQALMERFFRSESRGAVRIKVLDVLSFVLLINRQFYEEELINSVVISQLSHIPEDKDHQVRKLATQLLVDLAEGCHTHHFNSLLDIIEKVMARSLSPPPELEERDVAAYSASLEDVKTAVLGLLVILQTKLYTLPASHATRVYEMLVSHIQLHYKHSYTLPIASSIRLQAFDFLLLLRADSLHRLGLPNKDGVVRFSPYCVCDYMEPERGSEKKTSGPLSPPTGPPGPAPAGPAVRLGSVPYSLLFRVLLQCLKQESDWKVLKLVLGRLPESLRYKVLIFTSPCSVDQLCSALCSMLSGPKTLERLRGAPEGFSRTDLHLAVVPVLTALISYHNYLDKTKQREMVYCLEQGLIHRCASQCVVALSICSVEMPDIIIKALPVLVVKLTHISATASMAVPLLEFLSTLARLPHLYRNFAAEQYASVFAISLPYTNPSKFNQYIVCLAHHVIAMWFIRCRLPFRKDFVPFITKGLRSNVLLSFDDTPEKDSFRARSTSLNERPKSRIQTSLTSASLGSADENSVAQADDSLKNLHLELTETCLDMMARYVFSNFTAVPKRSPVGEFLLAGGRTKTWLVGNKLVTVTTSVGTGTRSLLGLDSGELQSGPESSSSPGVHVRQTKEAPAKLESQAGQQVSRGARDRVRSMSGGHGLRVGALDVPASQFLGSATSPGPRTAPAAKPEKASAGTRVPVQEKTNLAAYVPLLTQGWAEILVRRPTGNTSWLMSLENPLSPFSSDINNMPLQELSNALMAAERFKEHRDTALYKSLSVPAASTAKPPPLPRSNTDSAVVMEEGSPGEVPVLVEPPGLEDVEAALGMDRRTDAYSRSSSVSSQEEKSLHAEELVGRGIPIERVVSSEGGRPSVDLSFQPSQPLSKSSSSPELQTLQDILGDPGDKADVGRLSPEVKARSQSGTLDGESAAWSASGEDSRGQPEGPLPSSSPRSPSGLRPRGYTISDSAPSRRGKRVERDALKSRATASNAEKVPGINPSFVFLQLYHSPFFGDESNKPILLPNESQSFERSVQLLDQIPSYDTHKIAVLYVGEGQSNSELAILSNEHGSYRYTEFLTGLGRLIELKDCQPDKVYLGGLDVCGEDGQFTYCWHDDIMQAVFHIATLMPTKDVDKHRCDKKRHLGNDFVSIVYNDSGEDFKLGTIKGQFNFVHVIVTPLDYECNLVSLQCRKDMEGLVDTSVAKIVSDRNLPFVARQMALHANMASQVHHSRSNPTDIYPSKWIARLRHIKRLRQRICEEAAYSNPSLPLVHPPSHSKAPAQTPAEPTPGYEVGQRKRLISSVEDFTEFV

SEQ ID NO: 8866 - protein, 171 aa, Homo sapiens
FPRDLSLISPLAQAVRSSSRTPSDKPVAHVVANPQAEGQLQWLNRRANALLANGVELRDNQLVVPSEGLYLIYSQVLFKGQGCPSTHVLLTHTISRIAVSYQTKVNLLSAIKSPCQRETPEGAEAKPWYEPIYLGGVFQLEKGDRLSAEINRPDYLDFAESGQVYFGIIAL

SEQ ID NO: 8867 - protein, 101 aa, Homo sapiens
MAMMEVQGGPSLGQTCVLIVIFTVLLQSLCVAVTYVYFTNELKQMQDKYSKSGIACFLKEDDSYWDPNDEESMNSPCWQVKWQLRQLVRKTPRMKRLWAAK

SEQ ID NO: 8868 - protein, 281 aa, Homo sapiens [sequence omitted]

SEQ ID NO: 8869 - protein, 285 aa, Homo sapiens
MDDSTEREQSRLTSCLKKREEMKLKECVSILPRKESPSVRSSKDGKLLAATLLLALLSCCLTVVSFYQVAALQGDLASLRAELQGHHAEKLPAGAGAPKAGLEEAPAVTAGLKIFEPPAPGEGNSSQNSRNKRAVQGPEETVTQDCLQLIADSETPTIQKGSYTFVPWLLSFKRGSALEEKENKILVKETGYFFIYGQVLYTDKTYAMGHLIQRKKVHVFGDELSLVTLFRCIQNMPETLPNNSCYSAGIAKLEEGDELQLAIPRENAQISLDGDVTFFGALKLL

SEQ ID NO: 8870 - protein, 266 aa, Homo sapiens
MDDSTEREQSRLTSCLKKREEMKLKECVSILPRKESPSVRSSKDGKLLAATLLLALLSCCLTVVSFYQVAALQGDLASLRAELQGHHAEKLPAGAGAPKAGLEEAPAVTAGLKIFEPPAPGEGNSSQNSRNKRAVQGPEETGSYTFVPWLLSFKRGSALEEKENKILVKETGYFFIYGQVLYTDKTYAMGHLIQRKKVHVFGDELSLVTLFRCIQNMPETLPNNSCYSAGIAKLEEGDELQLAIPRENAQISLDGDVTFFGALKLL

SEQ ID NO: 8871 - protein, 164 aa, Homo sapiens
MDDSTEREQSRLTSCLKKREEMKLKECVSILPRKESPSVRSSKDGKLLAATLLLALLSCCLTVVSFYQVAALQGDLASLRAELQGHHAEKLPAGAGAPKAGLEEAPAVTAGLKIFEPPAPGEGNSSQNSRNKRAVQGPEETVTQDCLQLIADSETPTIQKGFIY

SEQ ID NO: 8872 - protein, 234 aa, Homo sapiens
MDPGLQQALNGMAPPGDTAMHVPAGSVASHLGTTSRSYFYLTTATLALCLVFTVATIMVLVVQRTDSIPNSPDNVPLKGGNCSEDLLCILKRAPFKKSWAYLQVAKHLNKTKLSWNKDGILHGVRYQDGNLVIQFPGLYFIICQLQFLVQCPNNSVDLKLELLINKHIKKQALVTVCESGMQTKHVYQNLSQFLLDYLQVNTTISVNVDTFQYIDTSTFPLENVLSIFLYSNSD

SEQ ID NO: 8873 - protein, 468 aa, Homo sapiens
MAPPPARVHLGAFLAVTPNPGSAASGTEAAAATPSKVWGSSAGRIEPRGGGRGALPTSMGQHGPSARARAGRAPGPRPAREASPRLRVHKTFKFVVVGVLLQVVPSSAATIKLHDQSIGTQQWEHSPLGELCPPGSHRSEHPGACNRCTEGVGYTNASNNLFACLPCTACKSDEEERSPCTTTRNTACQCKPGTFRNDNSAEMCRKCSRGCPRGMVKVKDCTPWSDIECVHKESGNGHNIWVILVVTLVVPLLLVAVLIVCCCIGSGCGGDPKCMDRVCFWRLGLLRGPGAEDNAHNEILSNADSLSTFVSEQQMESQEPADLTGVTVQSPGEAQCLLGPAEAEGSQRRRLLVPANGADPTETLMLFFDKFANIVPFDSWDQLMRQLDLTKNEIDVVRAGTAGPGDALYAMLMKWVNKTGRNASIHTLLDALERMEERHAREKIQDLLVDSGKFIYLEDGTGSAVSLE

SEQ ID NO: 8874 - protein, 440 aa, Homo sapiens
MEQRGQNAPAASGARKRHGPGPREARGARPGPRVPKTLVLVVAAVLLLVSAESALITQQDLAPQQRAAPQQKRSSPSEGLCPPGHHISEDGRDCISCKYGQDYSTHWNDLLFCLRCTRCDSGEVELSPCTTTRNTVCQCEEGTFREEDSPEMCRKCRTGCPRGMVKVGDCTPWSDIECVHKESGTKHSGEVPAVEETVTSSPGTPASPCSLSGIIIGVTVAAVVLIVAVFVCKSLLWKKVLPYLKGICSGGGGDPERVDRSSQRPGAEDNVLNEIVSILQPTQVPEQEMEVQEPAEPTGVNMLSPGESEHLLEPAEAERSQRRRLLVPANEGDPTETLRQCFDDFADLVPFDSWEPLMRKLGLMDNEIKVAKAEAAGHRDTLYTMLIKWVNKTGRDASVHTLLDALETLGERLAKQKIEDHLLSSGKFMYLEGNADSAMS

SEQ ID NO: 8875 - protein, 411 aa, Homo sapiens
MEQRGQNAPAASGARKRHGPGPREARGARPGPRVPKTLVLVVAAVLLLVSAESALITQQDLAPQQRAAPQQKRSSPSEGLCPPGHHISEDGRDCISCKYGQDYSTHWNDLLFCLRCTRCDSGEVELSPCTTTRNTVCQCEEGTFREEDSPEMCRKCRTGCPRGMVKVGDCTPWSDIECVHKESGIIIGVTVAAVVLIVAVFVCKSLLWKKVLPYLKGICSGGGGDPERVDRSSQRPGAEDNVLNEIVSILQPTQVPEQEMEVQEPAEPTGVNMLSPGESEHLLEPAEAERSQRRRLLVPANEGDPTETLRQCFDDFADLVPFDSWEPLMRKLGLMDNEIKVAKAEAAGHRDTLYTMLIKWVNKTGRDASVHTLLDALETLGERLAKQKIEDHLLSSGKFMYLEGNADSAMS

SEQ ID NO: 8876 - protein, 260 aa, Homo sapiens
MCRKCRTGCPRGMVKVGDCTPWSDIECVHKESGIIIGVTVAAVVLIVAVFVCKSLLWKKVLPYLKGICSGGGGDPERVDRSSQRPGAEDNVLNEIVSILQPTQVPEQEMEVQEPAEPTGVNMLSPGESEHLLEPAEAERSQRRRLLVPANEGDPTETLRQCFDDFADLVPFDSWEPLMRKLGLMDNEIKVAKAEAAGHRDTLYTMLIKWVNKTGRDASVHTLLDALETLGERLAKQKIEDHLLSSGKFMYLEGNADSAMS

SEQ ID NO: 8877 - protein, 386 aa, Homo sapiens
MGLWGQSVPTASSARAGRYPGARTASGTRPWLLDPKILKFVVFIVAVLLPVRVDSATIPRQDEVPQQTVAPQQQRRSLKEEECPAGSHRSEYTGACNPCTEGVDYTIASNNLPSCLLCTVCKSGQTNKSSCTTTRDTVCQCEKGSFQDKNSPEMCRTCRTGCPRGMVKVSNCTPRSDIKCKNESAASSTGKTPAAEETVTTILGMLASPYHYLIIIVVLVIILAVVVVGFSCRKKFISYLKGICSGGGGGPERVHRVLFRRRSCPSRVPGAEDNARNETLSNRYLQPTQVSEQEIQGQELAELTGVTVELPEEPQRLLEQAEAEGCQRRRLLVPVNDADSADISTLLDASATLEEGHAKETIQDQLVGSEKLFYEEDEAGSATSCL

SEQ ID NO: 8878 - protein, 455 aa, Homo sapiens
MGLSTVPDLLLPLVLLELLVGIYPSGVIGLVPHLGDREKRDSVCPQGKYIHPQNNSICCTKCHKGTYLYNDCPGPGQDTDCRECESGSFTASENHLRHCLSCSKCRKEMGQVEISSCTVDRDTVCGCRKNQYRHYWSENLFQCFNCSLCLNGTVHLSCQEKQNTVCTCHAGFFLRENECVSCSNCKKSLECTKLCLPQIENVKGTEDSGTTVLLPLVIFFGLCLLSLLFIGLMYRYQRWKSKLYSIVCGKSTPEKEGELEGTTTKPLAPNPSFSPTPGFTPTLGFSPVPSSTFTSSSTYTPGDCPNFAAPRREVAPPYQGADPILATALASDPIPNPLQKWEDSAHKPQSLDTDDPATLYAVVENVPPLRWKEFVRRLGLSDHEIDRLELQNGRCLREAQYSMLATWRRRTPRREATLELLGRVLRDMDLLGCLEDIEEALCGPAALPPAPSLLR

SEQ ID NO: 8879 - protein, 218 aa, Homo sapiens
MGLSTVPDLLLPLVLLELLVGIYPSGVIGLVPHLGDREKRDSVCPQGKYIHPQNNSICCTKCHKGTYLYNDCPGPGQDTDCRECESGSFTASENHLRHCLSCSKCRKEMGQVEISSCTVDRDTVCGCRKNQYRHYWSENLFQCFNCSLCLNGTVHLSCQEKQNTVCTCHAGFFLRENECVSCSKVLLCRPGWNAVARSRLTATSASQIQAILLLQPPK

SEQ ID NO: 8880 - protein, 461 aa, Homo sapiens
MAPVAVWAALAVGLELWAAAHALPAQVAFTPYAPEPGSTCRLREYYDQTAQMCCSKCSPGQHAKVFCTKTSDTVCDSCEDSTYTQLWNWVPECLSCGSRCSSDQVETQACTREQNRICTCRPGWYCALSKQEGCRLCAPLRKCRPGFGVARPGTETSDVVCKPCAPGTFSNTTSSTDICRPHQICNVVAIPGNASMDAVCTSTSPTRSMAPGAVHLPQPVSTRSQHTQPTPEPSTAPSTSFLLPMGPSPPAEGSTGDFALPVGLIVGVTALGLLIIGVVNCVIMTQVKKKPLCLQREAKVPHLPADKARGTQGPEQQHLLITAPSSSSSSLESSASALDRRAPTRNQPQAPGVEASGAGEARASTGSSDSSPGGHGTQVNVTCIVNVCSSSDHSSQCSSQASSTMGDTDSSPSESPKDEQVPFSKEECAFRSQLETPETLLGSTEEKPLPLGVPDAGMKPS

SEQ ID NO: 8881 - protein, 268 aa, Homo sapiens
MAPVAVWAALAVGLELWAAAHALPAQVAFTPYAPEPGSTCRLREYYDQTAQMCCSKCSPGQHAKVFCTKTSDTVCDSCEDSTYTQLWNWVPECLSCGSRCSSDQVETQACTREQNRICTCRPGWYCALSKQEGCRLCAPLRKCRPGFGVARPGTETSDVVCKPCAPGTFSNTTSSTDICRPHQICNVVAIPGNASMDAVCTSTSPTRSMAPGAVHLPQPVSTRSQHTQPTPEPSTAPSTSFLLPMGPSPPAEGSTGDFALPVVSLSSS

SEQ ID NO: 8882 - protein, 155 aa, Homo sapiens
MAPVAVWAALAVGLELWAAAHALPAQVAFTPYAPEPGSTCRLREYYDQTAQMCCSKCSPGQHAKVFCTKTSDTVCDSCEDSTYTQLWNWVPECLSCGSRCSSDQVETQACTREQNRICTCRPGWYCALSKQEGCRLCAPLRKCRPGFGVARPDLS

SEQ ID NO: 8883 - protein, 37 aa, Homo sapiens
MAPVAVWAALAVGLELWAAAHALPAQVDPGPLFPHPG

SEQ ID NO: 8884 - protein, 655 aa, Homo sapiens
MGTSPSSSTALASCSRIARRATATMIAGSLLLLGFLSTTTAQPEQKASNLIGTYRHVDRATGQVLTCDKCPAGTYVSEHCTNTSLRVCSSCPVGTFTRHENGIEKCHDCSQPCPWPMIEKLPCAALTDRECTCPPGMFQSNATCAPHTVCPVGWGVRKKGTETEDVRCKQCARGTFSDVPSSVMKCKAYTDCLSQNLVVIKPGTKETDNVCGTLPSFSSSTSPSPGTAIFPRPEHMETHEVPSSTYVPKGMNSTESNSSASVRPKVLSSIQEGTVPDNTSSARGKEDVNKTLPNLQVVNHQQGPHHRHILKLLPSMEATGGEKSSTPIKGPKRGHPRQNLHKHFDINEHLPWMIVLFLLLVLVVIVVCSIRKSSRTLKKGPRQDPSAIVEKAGLKKSMTPTQNREKWIYYCNGHGIDILKLVAAQVGSQWKDIYQFLCNASEREVAAFSNGYTADHERAYAALQHWTIRGPEASLAQLISALRQHRRNDVVEKIRGLMEDTTQLETDKLALPMSPSPLSPSPIPSPNAKLENSALLTVEPSPQDKNKGFFVDESEPLLRCDSTSSGSSALSRNGSFITKEKKDTVLRQVRLDPCDLQPIFDDMLHFLNPEELRVIEEIPQAEDKLDRLFEIIGVKSQEASQTLLDSVYSHLPDLL

SEQ ID NO: 8885 - protein, 344 aa, Homo sapiens
SCCRPWRPLGARSPARPSRPKRGHPRQNLHKHFDINEHLPWMIVLFLLLVLVVIVVCSIRKSSRTLKKGPRQDPSAIVEKAGLKKSMTPTQNREKWIYYCNGHGIDILKLVAAQVGSQWKDIYQFLCNASEREVAAFSNGYTADHERAYAALQHWTIRGPEASLAQLISALRQHRRNDVVEKIRGLMEDTTQLETDKLALPMSPSPLSPSPIPSPNAKLENSALLTVEPSPQDKNKGFFVDESEPLLRCDSTSSGSSALSRNGSFITKEKKDTVLRQVRLDPCDLQPIFDDMLHFLNPEELRVIEEIPQAEDKLDRLFEIIGVKSQEASQTLLDSVYSHLPDLL

SEQ ID NO: 8886 - protein, 372 aa, Homo sapiens
MEQRPRGCAAVAAALLLVLLGARAQGGTRSPRCDCAGDFHKKIGLFCCRGCPAASQVALENCSAVADTRCGCKPGWFVECQVSQCVSSSPFYCQPCLDCGALHRHTRLLCSRRDTDCGTCLPGFYEHGDGCVSCPTSTLGSCPERCAAVCGWRQMFWVQVLLAGLVVPLLLGATLTYTYRHCWPHKPLVTADEAGMEALTPPPATHLSPLDSAHTLLAPPDSSEKICTVQLVGNSWTPGYPETQEALCPQVTWSWDQLPSRALGPAAAPTLSPESPAGSPAMMLQPGPQLYDVMDAVPARRWKEFVRTLGLREAEIEAVEVEIGRFRDQQYEMLKRWRQQQPAGLGAVYAALERMGLDGCVEDLRSRLQRGP

SEQ ID NO: 8887 - protein, 234 aa, Homo sapiens
MEQRPRGCAAVAAALLLVLLGARAQGGTRSPRCDCAGDFHKKIGLFCCRGCPADEAGMEALTPPPATHLSPLDSAHTLLAPPDSSEKICTVQLVGNSWTPGYPETQEALCPQVTWSWDQLPSRALGPAAAPTLSPESPAGSPAMMLQPGPQLYDVMDAVPARRWKEFVRTLGLREAEIEAVEVEIGRFRDQQYEMLKRWRQQQPAGLGAVYAALERMGLDGCVEDLRSRLQRGP

SEQ ID NO: 8888 - protein, 380 aa, Homo sapiens
MEQRPRGCAAVAAALLLVLLGARAQGGTRSPRCDCAGDFHKKIGLFCCRGCPAGHYLKAPCTEPCGNSTCLVCPQDTFLAWENHHNSECARCQACDEQASQVALENCSAVADTRCGCKPGWFVECQVSQCVSSSPFYCQPCLDCGALHRHTRLLCSRRDTDCGTCLPGFYEHGDGCVSCPTSTLGSCPERCAAVCGWRQNEAGMEALTPPPATHLSPLDSAHTLLAPPDSSEKICTVQLVGNSWTPGYPETQEALCPQVTWSWDQLPSRALGPAAAPTLSPESPAGSPAMMLQPGPQLYDVMDAVPARRWKEFVRTLGLREAEIEAVEVEIGRFRDQQYEMLKRWRQQQPAGLGAVYAALERMGLDGCVEDLRSRLQRGP

SEQ ID NO: 8889 - protein, 417 aa, Homo sapiens
MEQRPRGCAAVAAALLLVLLGARAQGGTRSPRCDCAGDFHKKIGLFCCRGCPAGHYLKAPCTEPCGNSTCLVCPQDTFLAWENHHNSECARCQACDEQASQVALENCSAVADTRCGCKPGWFVECQVSQCVSSSPFYCQPCLDCGALHRHTRLLCSRRDTDCGTCLPGFYEHGDGCVSCPTSTLGSCPERCAAVCGWRQMFWVQVLLAGLVVPLLLGATLTYTYRHCWPHKPLVTADEAGMEALTPPPATHLSPLDSAHTLLAPPDSSEKICTVQLVGNSWTPGYPETQEALCPQVTWSWDQLPSRALGPAAAPTLSPESPAGSPAMMLQPGPQLYDVMDAVPARRWKEFVRTLGLREAEIEAVEVEIGRFRDQQYEMLKRWRQQQPAGLGAVYAALERMGLDGCVEDLRSRLQRGP

SEQ ID NO: 8890 - protein, 426 aa, Homo sapiens
MEQRPRGCAAVAAALLLVLLGARAQGGTRSPRCDCAGDFHKKIGLFCCRGCPAGHYLKAPCTEPCGNSTCLVCPQDTFLAWENHHNSECARCQACDEQASQVALENCSAVADTRCGCKPGWFVECQVSQCVSSSPFYCQPCLDCGALHRHTRLLCSRRDTDCGTCLPGFYEHGDGCVSCPTPPPSLAGAPWGAVQSAVPLSVAGGRVGVFWVQVLLAGLVVPLLLGATLTYTYRHCWPHKPLVTADEAGMEALTPPPATHLSPLDSAHTLLAPPDSSEKICTVQLVGNSWTPGYPETQEALCPQVTWSWDQLPSRALGPAAAPTLSPESPAGSPAMMLQPGPQLYDVMDAVPARRWKEFVRTLGLREAEIEAVEVEIGRFRDQQYEMLKRWRQQQPAGLGAVYAALERMGLDGCVEDLRSRLQRGP

SEQ ID NO: 8891 - protein, 255 aa, Homo sapiens
MGNSCYNIVATLLLVLNFERTRSLQDPCSNCPAGTFCDNNRNQICSPCPPNSFSSAGGQRTCDICRQCKGVFRTRKECSSTSNAECDCTPGFHCLGAGCSMCEQDCKQGQELTKKGCKDCCFGTFNDQKRGICRPWTNCSLDGKSVLVNGTKERDVVCGPSPADLSPGASSVTPPAPAREPGHSPQIISFFLALTSTALLFLLFFLTLRFSVVKRGRKKLLYIFKQPFMRPVQTTQEEDGCSCRFPEEEEGGCEL

SEQ ID NO: 8892 - protein, 1972 aa, Homo sapiens
MDPTGSQLDSDFSQQDTPCLIIEDSQPESQVLEDDSGSHFSMLSRHLPNLQTHKENPVLDVVSNPEQTAGEERGDGNSGFNEHLKENKVADPVDSSNLDTCGSISQVIEQLPQPNRTSSVLGMSVESAPAVEEEKGEELEQKEKEKEEDTSGNTTHSLGAEDTASSQLGFGVLELSQSQDVEENTVPYEVDKEQLQSVTTNSGYTRLSDVDANTAIKHEEQSNEDIPIAEQSSKDIPVTAQPSKDVHVVKEQNPPPARSEDMPFSPKASVAAMEAKEQLSAQELMESGLQIQKSPEPEVLSTQEDLFDQSNKTVSSDGCSTPSREEGGCSLASTPATTLHLLQLSGQRSLVQDSLSTNSSDLVAPSPDAFRSTPFIVPSSPTEQEGRQDKPMDTSVLSEEGGEPFQKKLQSGEPVELENPPLLPESTVSPQASTPISQSTPVFPPGSLPIPSQPQFSHDIFIPSPSLEEQSNDGKKDGDMHSSSLTVECSKTSEIEPKNSPEDLGLSLTGDSCKLMLSTSEYSQSPKMESLSSHRIDEDGENTQIEDTEPMSPVLNSKFVPAENDSILMNPAQDGEVQLSQNDDKTKGDDTDTRDDISILATGCKGREETVAEDVCIDLTCDSGSQAVPSPATRSEALSSVLDQEEAMEIKEHHPEEGSSGSEVEEIPETPCESQGEELKEENMESVPLHLSLTETQSQGLCLQKEMPKKECSEAMEVETSVISIDSPQKLAILDQELEHKEQEAWEEATSEDSSVVIVDVKEPSPRVDVSCEPLEGVEKCSDSQSWEDIAPEIEPCAENRLDTKEEKSVEYEGDLKSGTAETEPVEQDSSQPSLPLVRADDPLRLDQELQQPQTQEKTSNSLTEDSKMANAKQLSSDAEAQKLGKPSAHASQSFCESSSETPFHFTLPKEGDIIPPLTGATPPLIGHLKLEPKRHSTPIGISNYPESTIATSDVMSESMVETHDPILGSGKGDSGAAPDVDDKLCLRMKLVSPETEASEESLQFNLEKPATGERKNGSTAVAESVASPQKTMSVLSCICEARQENEARSEDPPTTPIRGNLLHFPSSQGEEEKEKLEGDHTIRQSQQPMKPISPVKDPVSPASQKMVIQGPSSPQGEAMVTDVLEDQKEGRSTNKENPSKALIERPSQNNIGIQTMECSLRVPETVSAATQTIKNVCEQGTSTVDQNFGKQDATVQTERGSGEKPVSAPGDDTESLHSQGEEEFDMPQPPHGHVLHRHMRTIREVRTLVTRVITDVYYVDGTEVERKVTEETEEPIVECQECETEVSPSQTGGSSGDLGDISSFSSKASSLHRTSSGTSLSAMHSSGSSGKGAGPLRGKTSGTEPADFALPSSRGGPGKLSPRKGVSQTGTPVCEEDGDAGLGIRQGGKAPVTPRGRGRRGRPPSRTTGTRETAVPGPLGIEDISPNLSPDDKSFSRVVPRVPDSTRRTDVGAGALRRSDSPEIPFQAAAGPSDGLDASSPGNSFVGLRVVAKWSSNGYFYSGKITRDVGAGKYKLLFDDGYECDVLGKDILLCDPIPLDTEVTALSEDEYFSAGVVKGHRKESGELYYSIEKEGQRKWYKRMAVILSLEQGNRLREQYGLGPYEAVTPLTKAADISLDNLVEGKRKRRSNVSSPATPTASSSSSTTPTRKITESPRASMGVLSGKRKLITSEEERSPAKRGRKSATVKPGAVGAGEFVSPCESGDNTGEPSALEEQRGPLPLNKTLFLGYAFLLTMATTSDKLASRSKLPDGPTGSSEEEEEFLEIPPFNKQYTESQLRAGAGYILEDFNEAQCNTAYQCLLIADQHCRTRKYFLCLASGIPCVSHVWVHDSCHANQLQNYRNYLLPAGYSLEEQRILDWQPRENPFQNLKVLLVSDQQQNFLELWSEILMTGGAASVKQHHSSAHNKDIALGVFDVVVTDPSCPASVLKCAEALQLPVVSQEWVIQCLIVGERIGFKQHPKYKHDYVSH

SEQ ID NO: 8893 - protein, 1927 aa, Homo sapiens
MPGEQMDPTGSQLDSDFSQQDTPCLIIEDSQPESQVLEDDSGSHFSMLSRHLPNLQTHKENPVLDVVSNPEQTAGEERGDGNSGFNEHLKENKVADPVDSSNLDTCGSISQVIEQLPQPNRTSSVLGMSVESAPAVEEEKGEELEQKEKEKEEDTSGNTTHSLGAEDTASSQLGFGVLELSQSQDVEENTVPYEVDKEQLQSVTTNSGYTRLSDVDANTAIKHEEQSNEDIPIAEQSSKDIPVTAQPSKDVHVVKEQNPPPARSEDMPFSPKASVAAMEAKEQLSAQELMESGLQIQKSPEPEVLSTQEDLFDQSNKTVSSDGCSTPSREEGGCSLASTPATTLHLLQLSGQRSLVQDSLSTNSSDLVAPSPDAFRSTPFIVPSSPTEQEGRQDKPMDTSVLSEEGGEPFQKKLQSGEPVELENPPLLPESTVSPQASTPISQSTPVFPPGSLPIPSQPQFSHDIFIPSPSLEEQSNDGKKDGDMHSSSLTVECSKTSEIEPKNSPEDLGLSLTGDSCKLMLSTSEYSQSPKMESLSSHRIDEDGENTQIEDTEPMSPVLNSKFVPAENDSILMNPAQDGEVQLSQNDDKTKGDDTDTRDDISILATGCKGREETVAEDVCIDLTCDSGSQAVPSPATRSEALSSVLDQEEAMEIKEHHPEEGSSGSEVEEIPETPCESQGEELKEENMESVPLHLSLTETQSQGLCLQKEMPKKECSEAMEVETSVISIDSPQKLAILDQELEHKEQEAWEEATSEDSSVVIVDVKEPSPRVDVSCEPLEGVEKCSDSQSWEDIAPEIEPCAENRLDTKEEKSVEYEGDLKSGTAETEPVEQDSSQPSLPLVRADDPLRLDQELQQPQTQEKTSNSLTEDSKMANAKQLSSDAEAQKLGKPSAHASQSFCESSSETPFHFTLPKEGDIIPPLTGATPPLIGHLKLEPKRHSTPIGISNYPESTIATSDVMSESMVETHDPILGSGKGDSGAAPDVDDKLCLRMKLVSPETEASEESLQFNLEKPATGERKNGSTAVAESVASPQKTMSVLSCICEARQENEARSEDPPTTPIRGNLLHFPSSQGEEEKEKLEGDHTIRQSQQPMKPISPVKDPVSPASQKMVIQGPSSPQGEAMVTDVLEDQKEGRSTNKENPSKALIERPSQNNIGIQTMECSLRVPETVSAATQTIKNVCEQGTSTVDQNFGKQDATVQTERGSGEKPVSAPGDDTESLHSQGEEEFDMPQPPHGHVLHRHMRTIREVRTLVTRVITDVYYVDGTEVERKVTEETEEPIVECQECETEVSPSQTGGSSGDLGDISSFSSKASSLHRTSSGTSLSAMHSSGSSGKGAGPLRGKTSGTEPADFALPSSRGGPGKLRETAVPGPLGIEDISPNLSPDDKSFSRVVPRVPDSTRRTDVGAGALRRSDSPEIPFQAAAGPSDGLDASSPGNSFVGLRVVAKWSSNGYFYSGKITRDVGAGKYKLLFDDGYECDVLGKDILLCDPIPLDTEVTALSEDEYFSAGVVKGHRKESGELYYSIEKEGQRKWYKRMAVILSLEQGNRLREQYGLGPYEAVTPLTKAADISLDNLVEGKRKRRSNVSSPATPTASSSSSTTPTRKITESPRASMGVLSGKRKLITSEEERSPAKRGRKSATVKPGAVGAGEFVSPCESGDNTGEPSALEEQRGPLPLNKTLFLGYAFLLTMATTSDKLASRSKLPDGPTGSSEEEEEFLEIPPFNKQYTESQLRAGAGYILEDFNEAQCNTAYQCLLIADQHCRTRKYFLCLASGIPCVSHVWVHDSCHANQLQNYRNYLLPAGYSLEEQRILDWQPRENPFQNLKVLLVSDQQQNFLELWSEILMTGGAASVKQHHSSAHNKDIALGVFDVVVTDPSCPASVLKCAEALQLPVVSQEWVIQCLIVGERIGFKQHPKYKHDYVSH

SEQ ID NO: 8894 - protein, 1977 aa, Homo sapiens
MPGEQMDPTGSQLDSDFSQQDTPCLIIEDSQPESQVLEDDSGSHFSMLSRHLPNLQTHKENPVLDVVSNPEQTAGEERGDGNSGFNEHLKENKVADPVDSSNLDTCGSISQVIEQLPQPNRTSSVLGMSVESAPAVEEEKGEELEQKEKEKEEDTSGNTTHSLGAEDTASSQLGFGVLELSQSQDVEENTVPYEVDKEQLQSVTTNSGYTRLSDVDANTAIKHEEQSNEDIPIAEQSSKDIPVTAQPSKDVHVVKEQNPPPARSEDMPFSPKASVAAMEAKEQLSAQELMESGLQIQKSPEPEVLSTQEDLFDQSNKTVSSDGCSTPSREEGGCSLASTPATTLHLLQLSGQRSLVQDSLSTNSSDLVAPSPDAFRSTPFIVPSSPTEQEGRQDKPMDTSVLSEEGGEPFQKKLQSGEPVELENPPLLPESTVSPQASTPISQSTPVFPPGSLPIPSQPQFSHDIFIPSPSLEEQSNDGKKDGDMHSSSLTVECSKTSEIEPKNSPEDLGLSLTGDSCKLMLSTSEYSQSPKMESLSSHRIDEDGENTQIEDTEPMSPVLNSKFVPAENDSILMNPAQDGEVQLSQNDDKTKGDDTDTRDDISILATGCKGREETVAEDVCIDLTCDSGSQAVPSPATRSEALSSVLDQEEAMEIKEHHPEEGSSGSEVEEIPETPCESQGEELKEENMESVPLHLSLTETQSQGLCLQKEMPKKECSEAMEVETSVISIDSPQKLAILDQELEHKEQEAWEEATSEDSSVVIVDVKEPSPRVDVSCEPLEGVEKCSDSQSWEDIAPEIEPCAENRLDTKEEKSVEYEGDLKSGTAETEPVEQDSSQPSLPLVRADDPLRLDQELQQPQTQEKTSNSLTEDSKMANAKQLSSDAEAQKLGKPSAHASQSFCESSSETPFHFTLPKEGDIIPPLTGATPPLIGHLKLEPKRHSTPIGISNYPESTIATSDVMSESMVETHDPILGSGKGDSGAAPDVDDKLCLRMKLVSPETEASEESLQFNLEKPATGERKNGSTAVAESVASPQKTMSVLSCICEARQENEARSEDPPTTPIRGNLLHFPSSQGEEEKEKLEGDHTIRQSQQPMKPISPVKDPVSPASQKMVIQGPSSPQGEAMVTDVLEDQKEGRSTNKENPSKALIERPSQNNIGIQTMECSLRVPETVSAATQTIKNVCEQGTSTVDQNFGKQDATVQTERGSGEKPVSAPGDDTESLHSQGEEEFDMPQPPHGHVLHRHMRTIREVRTLVTRVITDVYYVDGTEVERKVTEETEEPIVECQECETEVSPSQTGGSSGDLGDISSFSSKASSLHRTSSGTSLSAMHSSGSSGKGAGPLRGKTSGTEPADFALPSSRGGPGKLSPRKGVSQTGTPVCEEDGDAGLGIRQGGKAPVTPRGRGRRGRPPSRTTGTRETAVPGPLGIEDISPNLSPDDKSFSRVVPRVPDSTRRTDVGAGALRRSDSPEIPFQAAAGPSDGLDASSPGNSFVGLRVVAKWSSNGYFYSGKITRDVGAGKYKLLFDDGYECDVLGKDILLCDPIPLDTEVTALSEDEYFSAGVVKGHRKESGELYYSIEKEGQRKWYKRMAVILSLEQGNRLREQYGLGPYEAVTPLTKAADISLDNLVEGKRKRRSNVSSPATPTASSSSSTTPTRKITESPRASMGVLSGKRKLITSEEERSPAKRGRKSATVKPGAVGAGEFVSPCESGDNTGEPSALEEQRGPLPLNKTLFLGYAFLLTMATTSDKLASRSKLPDGPTGSSEEEEEFLEIPPFNKQYTESQLRAGAGYILEDFNEAQCNTAYQCLLIADQHCRTRKYFLCLASGIPCVSHVWVHDSCHANQLQNYRNYLLPAGYSLEEQRILDWQPRENPFQNLKVLLVSDQQQNFLELWSEILMTGGAASVKQHHSSAHNKDIALGVFDVVVTDPSCPASVLKCAEALQLPVVSQEWVIQCLIVGERIGFKQHPKYKHDYVSH

SEQ ID NO: 8895 - protein, 1975 aa, Homo sapiens
MPGEQMDPTGSQLDSDFSQQDTPCLIIEDSQPESQVLEDDSGSHFSMLSRHLPNLQTHKENPVLDVVSNPEQTAGEERGDGNSGFNEHLKENKVADPVDSSNLDTCGSISQVIEQLPQPNRTSSVLGMSVESAPAVEEEKGEELEQKEKEKEEDTSGNTTHSLGAEDTASSQLGFGVLELSQSQDVEENTVPYEVDKEQLQSVTTNSGYTRLSDVDANTAIKHEEQSNEDIPIAEQSSKDIPVTAQPSKDVHVVKEQNPPPARSEDMPFSPKASVAAMEAKEQLSAQELMESGLQIQKSPEPEVLSTQEDLFDQSNKTVSSDGCSTPSREEGGCSLASTPATTLHLLQLSGQRSLVQDSLSTNSSDLVAPSPDAFRSTPFIVPSSPTEQEGRQDKPMDTSVLSEEGGEPFQKKLQSGEPVELENPPLLPESTVSPQASTPISQSTPVFPPGSLPIPSQPQFSHDIFIPSPSLEEQSNDGKKDGDMHSSSLTVECSKTSEIEPKNSPEDLGLSLTGDSCKLMLSTSEYSQSPKMESLSSHRIDEDGENTQIEDTEPMSPVLNSKFVPAENDSILMNPAQDGEVQLSQNDDKTKGDDTDTRDDISILATGCKGREETVAEDVCIDLTCDSGSQAVPSPATRSEALSSVLDQEEAMEIKEHHPEEGSSGSEVEEIPETPCESQGEELKEENMESVPLHLSLTETQSQGLCLQKEMPKKECSEAMEVETSVISIDSPQKLAILDQELEHKEQEAWEEATSEDSSVVIVDVKEPSPRVDVSCEPLEGVEKCSDSQSWEDIAPEIEPCAENRLDTKEEKSVEYEGDLKSGTAETEPVEQDSSQPSLPLVRADDPLRLDQELQQPQTQEKTSNSLTEDSKMANAKQLSSDAEAQKLGKPSAHASQSFCESSSETPFHFTLPKEGDIIPPLTGATPPLIGHLKLEPKRHSTPIGISNYPESTIATSDVMSESMVETHDPILGSGKGDSGAAPDVDDKLCLRMKLVSPETEASEESLQFNLEKPATGERKNGSTAVAESVASPQKTMSVLSCICEARQENEARSEDPPTTPIRGNLLHFPSSQGEEEKEKLEGDHTIRQSQQPMKPISPVKDPVSPASQKMVIQGPSSPQGEAMVTDVLEDQKEGRSTNKENPSKALIERPSQNNIGIQTMECSLRVPETVSAATQTIKNVCEQGTSTVDQNFGKQDATVQTERGSGEKPVSAPGDDTESLHSQGEEEFDMPQPPHGHVLHRHMRTIREVRTLVTRVITDVYYVDGTEVERKVTEETEEPIVECQECETEVSPSQTGGSSGDLGDISSFSSKASSLHRTSSGTSLSAMHSSGSSGKGAGPLRGKTSGTEPADFALPSSRGGPGKLSPRKGVSQTGTPVCEEDGDAGLGIRQGGKAPVTPRGRGRRGRPPSRTTGTRETAVPGPLGIEDISPNLSPDDKSFSRVVPRVPDSTRRTDVGAGALRRSDSPEIPFQAAAGPSDGLDASSPGNSFVGLRVVAKWSSNGYFYSGKITRDVGAGKYKLLFDDGYECDVLGKDILLCDPIPLDTEVTALSEDEYFSAGVVKGHRKESGELYYSIEKEGQRKWYKRMAVILSLEQGNRLREQYGLGPYEAVTPLTKAADISLDNLVEGKRKRRSNVSSPATPTASSSSSTTPTRKITESPRASMGVLSGKRKLITSEEERSPAKRGRKSATVKPVGAGEFVSPCESGDNTGEPSALEEQRGPLPLNKTLFLGYAFLLTMATTSDKLASRSKLPDGPTGSSEEEEEFLEIPPFNKQYTESQLRAGAGYILEDFNEAQCNTAYQCLLIADQHCRTRKYFLCLASGIPCVSHVWVHDSCHANQLQNYRNYLLPAGYSLEEQRILDWQPRENPFQNLKVLLVSDQQQNFLELWSEILMTGGAASVKQHHSSAHNKDIALGVFDVVVTDPSCPASVLKCAEALQLPVVSQEWVIQCLIVGERIGFKQHPKYKHDYVSH

SEQ ID NO: 8896 - protein, 540 aa, Homo sapiens
MAQSTATSPDGGTTFEHLWSSLEPDSTYFDLPQSSRGNNEVVGGTDSSMDVFHLEGMTTSVMAQFNLLSSTMDQMSSRAASASPYTPEHAASVPTHSPYAQPSSTFDTMSPAPVIPSNTDYPGPHHFEVTFQQSSTAKSATWTYSPLLKKLYCQIAKTCPIQIKVSTPPPPGTAIRAMPVYKKAEHVTDVVKRCPNHELGRDFNEGQSAPASHLIRVEGNNLSQYVDDPVTGRQSVVVPYEPPQVGTEFTTILYNFMCNSSCVGGMNRRPILIIITLEMRDGQVLGRRSFEGRICACPGRDRKADEDHYREQQALNESSAKNGAASKRAFKQSPPAVPALGAGVKKRRHGDEDTYYLQVRGRENFEILMKLKESLELMELVPQPLVDSYRQQQQLLQRPFLTGLGCPNCIEYFTSQGLQSIYHLQNLTIEDLGALKIPEQYRMTIWRGLQDLKQGHDYSTAQQLLRSSNAATISIGGSGELQRQRVMEAVHFRVRHTITIPNRGGPGGGPDEWADFGFDLPDCKARKQPIKEEFTEAEIH

SEQ ID NO: 8897 - protein, 499 aa, Homo sapiens
MAQSTATSPDGGTTFEHLWSSLEPDSTYFDLPQSSRGNNEVVGGTDSSMDVFHLEGMTTSVMAQFNLLSSTMDQMSSRAASASPYTPEHAASVPTHSPYAQPSSTFDTMSPAPVIPSNTDYPGPHHFEVTFQQSSTAKSATWTYSPLLKKLYCQIAKTCPIQIKVSTPPPPGTAIRAMPVYKKAEHVTDVVKRCPNHELGRDFNEGQSAPASHLIRVEGNNLSQYVDDPVTGRQSVVVPYEPPQVGTEFTTILYNFMCNSSCVGGMNRRPILIIITLEMRDGQVLGRRSFEGRICACPGRDRKADEDHYREQQALNESSAKNGAASKRAFKQSPPAVPALGAGVKKRRHGDEDTYYLQVRGRENFEILMKLKESLELMELVPQPLVDSYRQQQQLLQRPSHLQPPSYGPVLSPMNKVHGGMNKLPSVNQLVGQPPPHSSAATPNLGPVGPGMLNNHGHAVPANGEMSSSHSAQSMVSGSHCTPPPPYHADPSLVRTWGP

SEQ ID NO: 8898 - protein, 555 aa, Homo sapiens
MAQSTATSPDGGTTFEHLWSSLEPDSTYFDLPQSSRGNNEVVGGTDSSMDVFHLEGMTTSVMAQFNLLSSTMDQMSSRAASASPYTPEHAASVPTHSPYAQPSSTFDTMSPAPVIPSNTDYPGPHHFEVTFQQSSTAKSATWTYSPLLKKLYCQIAKTCPIQIKVSTPPPPGTAIRAMPVYKKAEHVTDVVKRCPNHELGRDFNEGQSAPASHLIRVEGNNLSQYVDDPVTGRQSVVVPYEPPQVGTEFTTILYNFMCNSSCVGGMNRRPILIIITLEMRDGQVLGRRSFEGRICACPGRDRKADEDHYREQQALNESSAKNGAASKRAFKQSPPAVPALGAGVKKRRHGDEDTYYLQVRGRENFEILMKLKESLELMELVPQPLVDSYRQQQQLLQRPPRDAQQPWPRSASQRRDEQQPQRPVHGLGVPLHSATPLPRRPQPRQDLGALKIPEQYRMTIWRGLQDLKQGHDYSTAQQLLRSSNAATISIGGSGELQRQRVMEAVHFRVRHTITIPNRGGPGGGPDEWADFGFDLPDCKARKQPIKEEFTEAEIH

SEQ ID NO: 8899 - protein, 426 aa, Homo sapiens
MLYVGDPARHLATAQFNLLSSTMDQMSSRAASASPYTPEHAASVPTHSPYAQPSSTFDTMSPAPVIPSNTDYPGPHHFEVTFQQSSTAKSATWTYSPLLKKLYCQIAKTCPIQIKVSTPPPPGTAIRAMPVYKKAEHVTDVVKRCPNHELGRDFNEGQSAPASHLIRVEGNNLSQYVDDPVTGRQSVVVPYEPPQVGTEFTTILYNFMCNSSCVGGMNRRPILIIITLEMRDGQVLGRRSFEGRICACPGRDRKADEDHYREQQALNESSAKNGAASKRAFKQSPPAVPALGAGVKKRRHGDEDTYYLQVRGRENFEILMKLKESLELMELVPQPLVDSYRQQQQLLQRPPRDAQQPWPRSASQRRDEQQPQRPVHGLGVPLHSATPLPRRPQPRQFFNRIGVSKLHRVFHLPRVTEHLPPAEPDH

SEQ ID NO: 8900 - protein, 450 aa, Homo sapiens
MLYVGDPARHLATAQFNLLSSTMDQMSSRAASASPYTPEHAASVPTHSPYAQPSSTFDTMSPAPVIPSNTDYPGPHHFEVTFQQSSTAKSATWTYSPLLKKLYCQIAKTCPIQIKVSTPPPPGTAIRAMPVYKKAEHVTDVVKRCPNHELGRDFNEGQSAPASHLIRVEGNNLSQYVDDPVTGRQSVVVPYEPPQVGTEFTTILYNFMCNSSCVGGMNRRPILIIITLEMRDGQVLGRRSFEGRICACPGRDRKADEDHYREQQALNESSAKNGAASKRAFKQSPPAVPALGAGVKKRRHGDEDTYYLQVRGRENFEILMKLKESLELMELVPQPLVDSYRQQQQLLQRPSHLQPPSYGPVLSPMNKVHGGMNKLPSVNQLVGQPPPHSSAATPNLGPVGPGMLNNHGHAVPANGEMSSSHSAQSMVSGSHCTPPPPYHADPSLVRTWGP

SEQ ID NO: 8901 - protein, 587 aa, Homo sapiens
MLYVGDPARHLATAQFNLLSSTMDQMSSRAASASPYTPEHAASVPTHSPYAQPSSTFDTMSPAPVIPSNTDYPGPHHFEVTFQQSSTAKSATWTYSPLLKKLYCQIAKTCPIQIKVSTPPPPGTAIRAMPVYKKAEHVTDVVKRCPNHELGRDFNEGQSAPASHLIRVEGNNLSQYVDDPVTGRQSVVVPYEPPQVGTEFTTILYNFMCNSSCVGGMNRRPILIIITLEMRDGQVLGRRSFEGRICACPGRDRKADEDHYREQQALNESSAKNGAASKRAFKQSPPAVPALGAGVKKRRHGDEDTYYLQVRGRENFEILMKLKESLELMELVPQPLVDSYRQQQQLLQRPSHLQPPSYGPVLSPMNKVHGGMNKLPSVNQLVGQPPPHSSAATPNLGPVGPGMLNNHGHAVPANGEMSSSHSAQSMVSGSHCTPPPPYHADPSLVSFLTGLGCPNCIEYFTSQGLQSIYHLQNLTIEDLGALKIPEQYRMTIWRGLQDLKQGHDYSTAQQLLRSSNAATISIGGSGELQRQRVMEAVHFRVRHTITIPNRGGPGGGPDEWADFGFDLPDCKARKQPIKEEFTEAEIH

SEQ ID NO: 8902 - protein, 565 aa, Homo sapiens
MDQMSSRAASASPYTPEHAASVPTHSPYAQPSSTFDTMSPAPVIPSNTDYPGPHHFEVTFQQSSTAKSATWTYSPLLKKLYCQIAKTCPIQIKVSTPPPPGTAIRAMPVYKKAEHVTDVVKRCPNHELGRDFNEGQSAPASHLIRVEGNNLSQYVDDPVTGRQSVVVPYEPPQVGTEFTTILYNFMCNSSCVGGMNRRPILIIITLEMRDGQVLGRRSFEGRICACPGRDRKADEDHYREQQALNESSAKNGAASKRAFKQSPPAVPALGAGVKKRRHGDEDTYYLQVRGRENFEILMKLKESLELMELVPQPLVDSYRQQQQLLQRPSHLQPPSYGPVLSPMNKVHGGMNKLPSVNQLVGQPPPHSSAATPNLGPVGPGMLNNHGHAVPANGEMSSSHSAQSMVSGSHCTPPPPYHADPSLVSFLTGLGCPNCIEYFTSQGLQSIYHLQNLTIEDLGALKIPEQYRMTIWRGLQDLKQGHDYSTAQQLLRSSNAATISIGGSGELQRQRVMEAVHFRVRHTITIPNRGGPGGGPDEWADFGFDLPDCKARKQPIKEEFTEAEIH

SEQ ID NO: 8903 - protein, 636 aa, Homo sapiens
MAQSTATSPDGGTTFEHLWSSLEPDSTYFDLPQSSRGNNEVVGGTDSSMDVFHLEGMTTSVMAQFNLLSSTMDQMSSRAASASPYTPEHAASVPTHSPYAQPSSTFDTMSPAPVIPSNTDYPGPHHFEVTFQQSSTAKSATWTYSPLLKKLYCQIAKTCPIQIKVSTPPPPGTAIRAMPVYKKAEHVTDVVKRCPNHELGRDFNEGQSAPASHLIRVEGNNLSQYVDDPVTGRQSVVVPYEPPQVGTEFTTILYNFMCNSSCVGGMNRRPILIIITLEMRDGQVLGRRSFEGRICACPGRDRKADEDHYREQQALNESSAKNGAASKRAFKQSPPAVPALGAGVKKRRHGDEDTYYLQVRGRENFEILMKLKESLELMELVPQPLVDSYRQQQQLLQRPSHLQPPSYGPVLSPMNKVHGGMNKLPSVNQLVGQPPPHSSAATPNLGPVGPGMLNNHGHAVPANGEMSSSHSAQSMVSGSHCTPPPPYHADPSLVSFLTGLGCPNCIEYFTSQGLQSIYHLQNLTIEDLGALKIPEQYRMTIWRGLQDLKQGHDYSTAQQLLRSSNAATISIGGSGELQRQRVMEAVHFRVRHTITIPNRGGPGGGPDEWADFGFDLPDCKARKQPIKEEFTEAEIH

SEQ ID NO: 8904 - protein, 110 aa, Homo sapiens
MGASGSKARGLWPFASAAGGGGSEAAGAEQALVRPRGRAVPPFVFTRRGSMFYDEDGDLAHEFYEETIVTKNGQKRAKLRRVHKNLIPQGIVKLDHPRIHVDFPVILYEV

SEQ ID NO: 8905 - protein, 202 aa, Homo sapiens
MMQDVSSSPVSPADDSLSNSEEEPDRQQPPSGKRGGRKRRSSRRSAGGGAGPGGAAGGGVGGGDEPGSPAQGKRGKKSAGCGGGGGAGGGGGSSSGGGSPQSYEELQTQRVMANVRERQRTQSLNEAFAALRKIIPTLPSDKLSKIQTLKLAARYIDFLYQVLQSDELDSKMASCSYVAHERLSYAFSVWRMEGAWSMSASH

SEQ ID NO: 8906 - protein, 246 aa, Homo sapiens
MGDREQLLQRARLAEQAERYDDMASAMKAVTELNEPLSNEDRNLLSVAYKNVVGARRSSWRVISSIEQKTMADGNEKKLEKVKAYREKIEKELETVCNDVLSLLDKFLIKNCNDFQYESKVFYLKMKGDYYRYLAEVASGEKKNSVVEASEAAYKEAFEISKEQMQPTHPIRLGLALNFSVFYYEIQNAPEQACLLAKQAFDDAIAELDTLNEDSYKDSTLIMQLLRDNLTLWTSDQQDEEAGEGN

SEQ ID NO: 8907 - protein, 541 aa, Homo sapiens
MVWRVPPFLLPILFLGTHYQLDVQLYHCTLLGPASPPAHVLLPPSGPPAPRHLHAQALSDSEIQLTWKHPEALPGPISKYVVEVQVAGGAGDPLWIDVDRPEETSTIIRGLNASTRYLFRMRASIQGLGDWSNTVEESTLGNGLQAEGPVQESRAAEEGLDQQLILAVVGSVSATCLTILAALLTLVCIRRSCLHRRRTFTYQSGSGEETILQFSSGTLTLTRRPKLQPEPLSYPVLEWEDITFEDLIGEGNFGQVIRAMIKKDGLKMNAAIKMLKEYASENDHRDFAGELEVLCKLGHHPNIINLLGACKNRGYLYIAIEYAPYGNLLDFLRKSRVLETDPAFAREHGTASTLSSRQLLRFASDAANGMQYLSEKQFIHRDLAARNVLVGENLASKIADFGLSRGEEVYVKKTMGRLPVRWMAIESLNYSVYTTKSDVWSFGVLLWEIVSLGGTPYCGMTCAELYEKLPQGYRMEQPRNCDDEVYELMRQCWRDRPYERPPFAQIALQLGRMLEARKAYVNMSLFENFTYAGIDATAEEA

SEQ ID NO: 8908 - protein, 1138 aa, Homo sapiens
MVWRVPPFLLPILFLASHVGAAVDLTLLANLRLTDPQRFFLTCVSGEAGAGRGSDAWGPPLLLEKDDRIVRTPPGPPLRLARNGSHQVTLRGFSKPSDLVGVFSCVGGAGARRTRVIYVHNSPGAHLLPDKVTHTVNKGDTAVLSARVHKEKQTDVIWKSNGSYFYTLDWHEAQDGRFLLQLPNVQPPSSGIYSATYLEASPLGSAFFRLIVRGCGAGRWGPGCTKECPGCLHGGVCHDHDGECVCPPGFTGTRCEQACREGRFGQSCQEQCPGISGCRGLTFCLPDPYGCSCGSGWRGSQCQEACAPGHFGADCRLQCQCQNGGTCDRFSGCVCPSGWHGVHCEKSDRIPQILNMASELEFNLETMPRINCAAAGNPFPVRGSIELRKPDGTVLLSTKAIVEPEKTTAEFEVPRLVLADSGFWECRVSTSGGQDSRRFKVNVKVPPVPLAAPRLLTKQSRQLVVSPLVSFSGDGPISTVRLHYRPQDSTMDWSTIVVDPSENVTLMNLRPKTGYSVRVQLSRPGEGGEGAWGPPTLMTTDCPEPLLQPWLEGWHVEGTDRLRVSWSLPLVPGPLVGDGFLLRLWDGTRGQERRENVSSPQARTALLTGLTPGTHYQLDVQLYHCTLLGPASPPAHVLLPPSGPPAPRHLHAQALSDSEIQLTWKHPEALPGPISKYVVEVQVAGGAGDPLWIDVDRPEETSTIIRGLNASTRYLFRMRASIQGLGDWSNTVEESTLGNGLQAEGPVQESRAAEEGLDQQLILAVVGSVSATCLTILAALLTLVCIRRSCLHRRRTFTYQSGSGEETILQFSSGTLTLTRRPKLQPEPLSYPVLEWEDITFEDLIGEGNFGQVIRAMIKKDGLKMNAAIKMLKEYASENDHRDFAGELEVLCKLGHHPNIINLLGACKNRGYLYIAIEYAPYGNLLDFLRKSRVLETDPAFAREHGTASTLSSRQLLRFASDAANGMQYLSEKQFIHRDLAARNVLVGENLASKIADFGLSRGEEVYVKKTMGRLPVRWMAIESLNYSVYTTKSDVWSFGVLLWEIVSLGGTPYCGMTCAELYEKLPQGYRMEQPRNCDDEVYELMRQCWRDRPYERPPFAQIALQLGRMLEARKAYVNMSLFENFTYAGIDATAEEA

SEQ ID NO: 8909 - protein, 783 aa, Homo sapiens
MASELEFNLETMPRINCAAAGNPFPVRGSIELRKPDGTVLLSTKAIVEPEKTTAEFEVPRLVLADSGFWECRVSTSGGQDSRRFKVNVKVPPVPLAAPRLLTKQSRQLVVSPLVSFSGDGPISTVRLHYRPQDSTMDWSTIVVDPSENVTLMNLRPKTGYSVRVQLSRPGEGGEGAWGPPTLMTTDCPEPLLQPWLEGWHVEGTDRLRVSWSLPLVPGPLVGDGFLLRLWDGTRGQERRENVSSPQARTALLTGLTPGTHYQLDVQLYHCTLLGPASPPAHVLLPPSGPPAPRHLHAQALSDSEIQLTWKHPEALPGPISKYVVEVQVAGGAGDPLWIDVDRPEETSTIIRGLNASTRYLFRMRASIQGLGDWSNTVEESTLGNGLQAEGPVQESRAAEEGLDQQLILAVVGSVSATCLTILAALLTLVCIRRSCLHRRRTFTYQSGSGEETILQFSSGTLTLTRRPKLQPEPLSYPVLEWEDITFEDLIGEGNFGQVIRAMIKKDGLKMNAAIKMLKEYASENDHRDFAGELEVLCKLGHHPNIINLLGACKNRGYLYIAIEYAPYGNLLDFLRKSRVLETDPAFAREHGTASTLSSRQLLRFASDAANGMQYLSEKQFIHRDLAARNVLVGENLASKIADFGLSRGEEVYVKKTMGRLPVRWMAIESLNYSVYTTKSDVWSFGVLLWEIVSLGGTPYCGMTCAELYEKLPQGYRMEQPRNCDDEVYELMRQCWRDRPYERPPFAQIALQLGRMLEARKAYVNMSLFENFTYAGIDATAEEA

SEQ ID NO: 8910 - protein, 317 aa, Homo sapiens
MVWRVPPFLLPILFLASHVGAAVDLTLLANLRLTDPQRFFLTCVSGEAGAGRGSDAWGPPLLLEKDDRIVRTPPGPPLRLARNGSHQVTLRGFSKPSDLVGVFSCVGGAGARRTRVIYVHNSPGAHLLPDKVTHTVNKGDTAVLSARVHKEKQTDVIWKSNGSYFYTLDWHEAQDGRFLLQLPNVQPPSSGIYSATYLEASPLGSAFFRLIVRGCGAGRWGPGCTKECPGCLHGGVCHDHDGECVCPPGFTGTRCEQACREGRFGQSCQEQCPGISGCRGLTFCLPDPYGCSCGSGWRGSQCQEVHQGHCGAREDHS

SEQ ID NO: 8911 - protein, 421 aa, Homo sapiens
MRASIQGLGDWSNTVEESTLGNGLQAEGPVQESRAAEEGLDQQLILAVVGSVSATCLTILAALLTLVCIRRSCLHRRRTFTYQSGSGEETILQFSSGTLTLTRRPKLQPEPLSYPVLEWEDITFEDLIGEGNFGQVIRAMIKKDGLKMNAAIKMLKEYASENDHRDFAGELEVLCKLGHHPNIINLLGACKNRGYLYIAIEYAPYGNLLDFLRKSRVLETDPAFAREHGTASTLSSRQLLRFASDAANGMQYLSEKQFIHRDLAARNVLVGENLASKIADFGLSRGEEVYVKKTMGRLPVRWMAIESLNYSVYTTKSDVWSFGVLLWEIVSLGGTPYCGMTCAELYEKLPQGYRMEQPRNCDDEVYELMRQCWRDRPYERPPFAQIALQLGRMLEARKAYVNMSLFENFTYAGIDATAEEA

SEQ ID NO: 8912 - protein, 379 aa, Homo sapiens
MVWRVPPFLLPILFLASHVGAAVDLTLLANLRLTDPQRFFLTCVSGEAGAGRGSDAWGPPLLLEKDDRIVRTPPGPPLRLARNGSHQVTLRGFSKPSDLVGVFSCVGGAGARRTRVIYVHNSPGAHLLPDKVTHTVNKGDTAVLSARVHKEKQTDVIWKSNGSYFYTLDWHEAQDGRFLLQLPNVQPPSSGIYSATYLEASPLGSAFFRLIVRGCGAGRWGPGCTKECPGCLHGGVCHDHDGECVCPPGFTGTRCEQACREGRFGQSCQEQCPGISGCRGLTFCLPDPYGCSCGSGWRGSQCQEACAPGHFGADCRLQCQCQNGGTCDRFSGCVCPSGWHGVHCEKSGWRDWVDTSTEKQNTDEGRFGGHVSAPVGAPG

SEQ ID NO: 8913 - protein, 272 aa, Homo sapiens
MALLVRVLRNQTSISQWVPVCSRLIPVSPTQGQGDRALSRTSQWPQMSQSRACGGSEQIPGIDIQLNRKYHTTRKLSTTKDSPQPVEEKVGAFTKIIEAMGFTGPLKYRCQMPDTFNSWFLITLLHVWMCLVRMKQEGRSGKYMCRIIVHFMWEDVQQRGRVMGVNPYILKKNMILMTNHFYAAILGYDEGILSDDHGLAAALWRTFFNRKCEDPRHLELLVEYVRKQIQYLDSMNGEDLLLTGEVSWRPLVEKNPQSILKPHSPTYNDEGL

SEQ ID NO: 8914 - protein, 187 aa, Homo sapiens
MQPIDTCVSYPRTGGQGSVSHFPGCQMPDTFNSWFLITLLHVWMCLVRMKQEGRSGKYMCRIIVHFMWEDVQQRGRVMGVNPYILKKNMILMTNHFYAAILGYDEGILSDDHGLAAALWRTFFNRKCEDPRHLELLVEYVRKQIQYLDSMNGEDLLLTGEVSWRPLVEKNPQSILKPHSPTYNDEGL

SEQ ID NO: 8915 - protein, 231 aa, Homo sapiens
MALLVRVLRNQTSISQWVPVCSRLIPVSPTQGQGDRALSRTSQKIKIAALRMYTSCVEKTDFEEFFLRCQMPDTFNSWFLITLLHVWMCLVRMKQEGRSGKYMCRIIVHFMWEDVQQRGRVMGVNPYILKKNMILMTNHFYAAILGYDEGILSDDHGLAAALWRTFFNRKCEDPRHLELLVEYVRKQIQYLDSMNGEDLLLTGEVSWRPLVEKNPQSILKPHSPTYNDEGL

SEQ ID NO: 8916 - protein, 273 aa, Homo sapiens
MALLVRVLRNQTSISQWVPVCSRLIPVSPTQGQGDRALSRTSQWPQMSQSRACGGSEQIPGIDIQLNRKYHTTRKLSTTKDSPQPVEEKVGAFTKIIEAMGFTGPLKYSKWKIKIAALRMYTSCVEKTDFEEFFLRCQMPDTFNSWFLITLLHVWMCLVRMKQEGRSGKYMCRIIVHFMWEDVQQRGRVMGGILSDDHGLAAALWRTFFNRKCEDPRHLELLVEYVRKQIQYLDSMNGEDLLLTGEVSWRPLVEKNPQSILKPHSPTYNDEGL

SEQ ID NO: 8917 - protein, 299 aa, Homo sapiens
MALLVRVLRNQTSISQWVPVCSRLIPVSPTQGQGDRALSRTSQWPQMSQSRACGGSEQIPGIDIQLNRKYHTTRKLSTTKDSPQPVEEKVGAFTKIIEAMGFTGPLKYSKWKIKIAALRMYTSCVEKTDFEEFFLRCQMPDTFNSWFLITLLHVWMCLVRMKQEGRSGKYMCRIIVHFMWEDVQQRGRVMGVNPYILKKNMILMTNHFYAAILGYDEGILSDDHGLAAALWRTFFNRKCEDPRHLELLVEYVRKQIQYLDSMNGEDLLLTGEVSWRPLVEKNPQSILKPHSPTYNDEGL

SEQ ID NO: 8918 - protein, 200 aa, Homo sapiens
MGFTGPLKYSKWKIKIAALRMYTSCVEKTDFEEFFLRCQMPDTFNSWFLITLLHVWMCLVRMKQEGRSGKYMCRIIVHFMWEDVQQRGRVMGVNPYILKKNMILMTNHFYAAILGYDEGILSDDHGLAAALWRTFFNRKCEDPRHLELLVEYVRKQIQYLDSMNGEDLLLTGEVSWRPLVEKNPQSILKPHSPTYNDEGL

SEQ ID NO: 8919 - protein, 162 aa, Homo sapiens
MALLVRVLRNQTSISQWVPVCSRLIPVSPTQGQGDRALSRTSQWPQMSQSRACGGSEQIPGIDIQLNRKYHTTPILGYDEGILSDDHGLAAALWRTFFNRKCEDPRHLELLVEYVRKQIQYLDSMNGEDLLLTGEVSWRPLVEKNPQSILKPHSPTYNDEGL

SEQ ID NO: 8920 - protein, 144 aa, Homo sapiens
MCLVRMKQEGRSGKYMCRIIVHFMWEDVQQRGRVMGVNPYILKKNMILMTNHFYAAILGYDEGILSDDHGLAAALWRTFFNRKCEDPRHLELLVEYVRKQIQYLDSMNGEDLLLTGEVSWRPLVEKNPQSILKPHSPTYNDEGL

SEQ ID NO: 8921 - protein, 148 aa, Homo sapiens
MALLVRVLRNQTSISQWVPVCSRLIPVSPTQGQGDRALSRTSQWPQMSQSRACGGSEQIPGIDIQLNRKYHTTRKLSTTKDSPQPVEEKVGAFTKIIEAMGFTGPLKYSKWDVSSPNEAGRPEWEVHVSYHSSFYVGGCSAARQSHGG

SEQ ID NO: 8922 - protein, 274 aa, Homo sapiens
MLSVASRSGPFAPVLSATSRGVAGALRPLVQATVPATPEQPVLDLKRPFLSRESLSGQAVRRPLVASVGLNVPASVCYSHTDIKVPDFSEYRRLEVLDSTKSSRESSEARKGFSYLVTGVTTVGVAYAAKNAVTQFVSSMSASADVLALAKIEIKLSDIPEGKNMAFKWRGKPLFVRHRTQKEIEQEAAVELSQLRDPQHDLDRVKKPEWVILIGVCTHLGCVPIANAGDFGGYYCPCHGSHYDASGRIRLGPAPLNLEVPTYEFTSDDMVIVG

SEQ ID NO: 8923 - protein, 858 aa, Homo sapiens
MAELSEEALLSVLPTIRVPKAGDRVHKDECAFSFDTPESEGGLYICMNTFLGFGKQYVERHFNKTGQRVYLHLRRTRRPKEEDPATGTGDPPRKKPTRLAIGVEGGFDLSEEKFELDEDVKIVILPDYLEIARDGLGGLPDIVRDRVTSAVEALLSADSASRKQEVQAWDGEVRQVSKHAFSLKQLDNPARIPPCGWKCSKCDMRENLWLNLTDGSILCGRRYFDGSGGNNHAVEHYRETGYPLAVKLGTITPDGADVYSYDEDDMVLDPSLAEHLSHFGIDMLKMQKTDKTMTELEIDMNQRIGEWELIQESGVPLKPLFGPGYTGIRNLGNSCYLNSVVQVLFSIPDFQRKYVDKLEKIFQNAPTDPTQDFSTQVAKLGHGLLSGEYSKPVPESGDGERVPEQKEVQDGIAPRMFKALIGKGHPEFSTNRQQDAQEFFLHLINMVERNCRSSENPNEVFRFLVEEKIKCLATEKVKYTQRVDYIMQLPVPMDAALNKEELLEYEEKKRQAEEEKMALPELVRAQVPFSSCLEAYGAPEQVDDFWSTALQAKSVAVKTTRFASFPDYLVIQIKKFTFGLDWVPKKLDVSIEMPEELDISQLRGTGLQPGEEELPDIAPPLVTPDEPKGSLGFYGNEDEDSFCSPHFSSPTSPMLDESVIIQLVEMGFPMDACRKAVYYTGNSGAEAAMNWVMSHMDDPDFANPLILPGSSGPGSTSAAADPPPEDCVTTIVSMGFSRDQALKALRATNNSLERAVDWIFSHIDDLDAEAAMDISEGRSAADSISESVPVGPKVRDGPGKYQLFAFISHMGTSTMCGHYVCHIKKEGRWVIYNDQKVCASEKPPKDLGYIYFYQRVAS

SEQ ID NO: 8924 - protein, 835 aa, Homo sapiens
MAELSEEALLSVLPTIRVPKAGDRVHKDECAFSFDTPESEGGLYICMNTFLGFGKQYVERHFNKTGQRVYLHLRRTRRPKEEDPATGTGDPPRKKPTRLAIGVEGGFDLSEEKFELDEDVKIVILPDYLEIARDGLGGLPDIVRDRVTSAVEALLSADSASRKQEVQAWDGEVRQVSKHAFSLKQLDNPARIPPCGWKCSKCDMRENLWLNLTDGSILCGRRYFDGSGGNNHAVEHYRETGYPLAVKLGTITPDGADVYSYDEDDMVLDPSLAEHLSHFGIDMLKMQKTDKTMTELEIDMNQRIGEWELIQESGVPLKPLFGPGYTGIRNLGNSCYLNSVVQVLFSIPDFQRKYVDKLEKIFQNAPTDPTQDFSTQVAKLGHGLLSGEYSKPVPESGDGERVPEQKEVQDGIAPRMFKALIGKGHPEFSTNRQQDAQEFFLHLINMVERNCRSSENPNEVFRFLVEEKIKCLATEKVKYTQRVDYIMQLPVPMDAALNKEELLEYEEKKRQAEEEKMALPELVRAQVPFSSCLEAYGAPEQVDDFWSTALQAKSVAVKTTRFASFPDYLVIQIKKFTFGLDWVPKKLDVSIEMPEELDISQLRGTGLQPGEEELPDIAPPLVTPDEPKAPMLDESVIIQLVEMGFPMDACRKAVYYTGNSGAEAAMNWVMSHMDDPDFANPLILPGSSGPGSTSAAADPPPEDCVTTIVSMGFSRDQALKALRATNNSLERAVDWIFSHIDDLDAEAAMDISEGRSAADSISESVPVGPKVRDGPGKYQLFAFISHMGTSTMCGHYVCHIKKEGRWVIYNDQKVCASEKPPKDLGYIYFYQRVAS

SEQ ID NO: 8925 - protein, 794 aa, Homo sapiens
MADAWEEIRRLAADFQRAQFAEATQRLSERNCIEIVNKLIAQKQLEVVHTLDGKEYITPAQISKEMRDELHVRGGRVNIVDLQQVINVDLIHIENRIGDIIKSEKHVQLVLGQLIDENYLDRLAEEVNDKLQESGQVTISELCKTYDLPGNFLTQALTQRLGRIISGHIDLDNRGVIFTEAFVARHKARIRGLFSAITRPTAVNSLISKYGFQEQLLYSVLEELVNSGRLRGTVVGGRQDKAVFVPDIYSRTQSTWVDSFFRQNGYLEFDALSRLGIPDAVSYIKKRYKTTQLLFLKAACVGQGLVDQVEASVEEAISSGTWVDIAPLLPTSLSVEDAAILLQQVMRAFSKQASTVVFSDTVVVSEKFINDCTELFRELMHQKAEKEMKNNPVHLITEEDLKQISTLESVSTSKKDKKDERRRKATEGSGSMRGGGGGNAREYKIKKVKKKGRKDDDSDDESQSSHTGKKKPEISFMFQDEIEDFLRKHIQDAPEEFISELAEYLIKPLNKTYLEVVRSVFMSSTTSASGTGRKRTIKDLQEEVSNLYNNIRLFEKGMKFFADDTQAALTKHLLKSVCTDITNLIFNFLASDLMMAVDDPAAITSEIRKKILSKLSEETKVALTKLHNSLNEKSIEDFISCLDSAAEACDIMVKRGDKKRERQILFQHRQALAEQLKVTEDPALILHLTSVLLFQFSTHSMLHAPGRCVPQIIAFLNSKIPEDQHALLVKYQGLVVKQLVSQSKKTGQGDYPLNNELDKEQEDVASTTRKELQELSSSIKDLVLKSRKSSVTEE

SEQ ID NO: 8926 - protein, 313 aa, Homo sapiens
MIGQKTLYSFFSPSPARKRHAPSPEPAVQGTGVAGVPEESGDAAAIPAKKAPAGQEEPGTPPSSPLSAEQLDRIQRNKAAALLRLAARNVPVGFGESWKKHLSGEFGKPYFIKLMGFVAEERKHYTVYPPPHQVFTWTQMCDIKDVKVVILGQDPYHGPNQAHGLCFSVQRPVPPPPSLENIYKELSTDIEDFVHPGHGDLSGWAKQGVLLLNAVLTVRAHQANSHKERGWEQFTDAVVSWLNQNSNGLVFLLWGSYAQKKGSAIDRKRHHVLQTAHPSPLSVYRGFFGCRHFSKTNELLQKSGKKPIDWKEL

SEQ ID NO: 8927 - protein, 304 aa, Homo sapiens
MGVFCLGPWGLGRKLRTPGKGPLQLLSRLCGDHLQAIPAKKAPAGQEEPGTPPSSPLSAEQLDRIQRNKAAALLRLAARNVPVGFGESWKKHLSGEFGKPYFIKLMGFVAEERKHYTVYPPPHQVFTWTQMCDIKDVKVVILGQDPYHGPNQAHGLCFSVQRPVPPPPSLENIYKELSTDIEDFVHPGHGDLSGWAKQGVLLLNAVLTVRAHQANSHKERGWEQFTDAVVSWLNQNSNGLVFLLWGSYAQKKGSAIDRKRHHVLQTAHPSPLSVYRGFFGCRHFSKTNELLQKSGKKPIDWKEL

SEQ ID NO: 8928 - protein, 270 aa, Homo sapiens
MGVFCLGPWGLGRKLRTPGKGPLSAEQLDRIQRNKAAALLRLAARNVPVGFGESWKKHLSGEFGKPYFIKLMGFVAEERKHYTVYPPPHQVFTWTQMCDIKDVKVVILGQDPYHGPNQAHGLCFSVQRPVPPPPSLENIYKELSTDIEDFVHPGHGDLSGWAKQGVLLLNAVLTVRAHQANSHKERGWEQFTDAVVSWLNQNSNGLVFLLWGSYAQKKGSAIDRKRHHVLQTAHPSPLSVYRGFFGCRHFSKTNELLQKSGKKPIDWKEL

SEQ ID NO: 8929 - protein, 3095 aa, Homo sapiens
MVFESVVVDVLNRFLGDYVVDLDTSQLSLGIWKGAVALKNLQIKENALSQLDVPFKVKVGHIGNLKLIIPWKNLYTQPVEAVLEEIYLLIVPSSRIKYDPLKEEKQLMEAKQQELKRIEEAKQKVVDQEQHLPEKQDTFAEKLVTQIIKNLQVKISSIHIRYEDDITNRDKPLSFGISLQNLSMQTTDQYWVPCLHDETEKLVRKLIRLDNLFAYWNVKSQMFYLSDYDNSLDDLKNGIVNENIVPEGYDFVFRPISANAKLVMNRRSDFDFSAPKINLEIELHNIAIEFNKPQYFSIMELLESVDMMAQNLPYRKFKPDVPLHHHAREWWAYAIHGVLEVNVCPRLWMWSWKHIRKHRQKVKQYKELYKKKLTSKKPPGELLVSLEELEKTLDVFNITIARQTAEVEVKKAGYKIYKEGVKDPEDNKGWFSWLWSWSEQNTNEQQPDVQPETLEEMLTPEEKALLYEAIGYSETAVDPTLLKTFEALKFFVHLKSMSIVLRENHQKPELVDIVIEEFSTLIVQRPGAQAIKFETKIDSFHITGLPDNSEKPRLLSSLDDAMSLFQITFEINPLDETVSQRCIIEAEPLEIIYDARTVNSIVEFFRPPKEVHLAQLTAATLTKLEEFRSKTATGLLYIIETQKVLDLKINLKASYIIVPQDGIFSPTSNLLLLDLGHLKVTSKSRSELPDVKQGEANLKEIMDRAYDSFDIQLTSVQLLYSRVGDNWREARKLSVSTQHILVPMHFNLELSKAMVFMDVRMPKFKIYGKLPLISLRISDKKLQGIMELIESIPKPEPVTEVSAPVKSFQIQTSTSLGTSQISQKIIPLLELPSVSEDDSEEEFFDAPCSPLEEPLQFPTGVKSIRTRKLQKQDCSVNMTTFKIRFEVPKVLIEFYHLVGDCELSVVEILVLGLGAEIEIRTYDLKANAFLKEFCLKCPEYLDENKKPVYLVTTLDNTMEDLLTLEYVKAEKNVPDLKSTYNNVLQLIKVNFSSLDIHLHTEALLNTINYLHNILPQSEEKSAPVSTTETEDKGDVIKKLALKLSTNEDIITLQILAELSCLQIFIQDQKCNISEIKIEGLDSEMIMRPSETEINAKLRNIIVLDSDITAIYKKAVYITGKEVFSFKMVSYMDATAGSAYTDMNVVDIQVNLIVGCIEVVFVTKFLYSILAFIDNFQAAKQALAEATVQAAGMAATGVKELAQRSSRMALDINIKAPVVVIPQSPVSENVFVADFGLITMTNTFHMITESQSSPPPVIDLITIKLSEMRLYRSRFINDAYQEVLDLLLPLNLEVVVERNLCWEWYQEVPCFNVNAQLKPMEFILSQEDITTIFKTLHGNIWYEKDGSASPAVTKDQYSATSGVTTNASHHSGGATVVTAAVVEVHSRALLVKTTLNISFKTDDLTMVLYSPGPKQASFTDVRDPSLKLAEFKLENIISTLKMYTDGSTFSSFSLKNCILDDKRPHVKKATPRMIGLTVGFDKKDMMDIKYRKVRDGCVTDAVFQEMYICASVEFLQTVANVFLEAYTTGTAVETSVQTWTAKEEVPTQESVKWEINVIIKNPEIVFVADMTKNDAPALVITTQCEICYKGNLENSTMTAAIKDLQVRACPFLPVKRKGKITTVLQPCDLFYQTTQKGTDPQVIDMSVKSLTLKVSPVIINTMITITSALYTTKETIPEETASSTAHLWEKKDTKTLKMWFLEESNETEKIAPTTELVPKGEMIKMNIDSIFIVLEAGIGHRTVPMLLAKSRFSGEGKNWSSLINLHCQLELEVHYYNEMFGVWEPLLEPLEIDQTEDFRPWNLGIKMKKKAKMAIVESDPEEENYKVPEYKTVISFHSKDQLNITLSKCGLVMLNNLVKAFTEAATGSSADFVKDLAPFMILNSLGLTISVSPSDSFSVLNIPMAKSYVLKNGESLSMDYIRTKDNDHFNAMTSLSSKLFFILLTPVNHSTADKIPLTKVGRRLYTVRHRESGVERSIVCQIDTVEGSKKVTIRSPVQIRNHFSVPLSVYEGDTLLGTASPENEFNIPLGSYRSFIFLKPEDENYQMCEGIDFEEIIKNDGALLKKKCRSKNPSKESFLINIVPEKDNLTSLSVYSEDGWDLPYIMHLWPPILLRNLLPYKIAYYIEGIENSVFTLSEGHSAQICTAQLGKARLHLKLLDYLNHDWKSEYHIKPNQQDISFVSFTCVTEMEKTDLDIAVHMTYNTGQTVVAFHSPYWMVNKTGRMLQYKADGIHRKHPPNYKKPVLFSFQPNHFFNNNKVQLMVTDSELSNQFSIDTVGSHGAVKCKGLKMDYQVGVTIDLSSFNITRIVTFTPFYMIKNKSKYHISVAEEGNDKWLSLDLEQCIPFWPEYASSKLLIQVERSEDPPKRIYFNKQENCILLRLDNELGGIIAEVNLAEHSTVITFLDYHDGAATFLLINHTKNELVQYNQSSLSEIEDSLPPGKAVFYTWADPVGSRRLKWRCRKSHGEVTQKDDMMMPIDLGEKTIYLVSFFEGLQRIILFTEDPRVFKVTYESEKAELAEQEIAVALQDVGISLVNNYTKQEVAYIGITSSDVVWETKPKKKARWKPMSVKHTEKLEREFKEYTESSPSEDKVIQLDTNVPVRLTPTGHNMKILQPHVIALRRNYLPALKVEYNTSAHQSSFRIQIYRIQIQNQIHGAVFPFVFYPVKPPKSVTMDSAPKPFTDVSIVMRSAGHSQISRIKYFKVLIQEMDLRLDLGFIYALTDLMTEAEVTENTEVELFHKDIEAFKEEYKTASLVDQSQVSLYEYFHISPIKLHLSVSLSSGREEAKDSKQNGGLIPVHSLNLLLKSIGATLTDVQDVVFKLAFFELNYQFHTTSDLQSEVIRHYSKQAIKQMYVLILGLDVLGNPFGLIREFSEGVEAFFYEPYQGAIQGPEEFVEGMALGLKALVGGAVGGLAGAASKITGAMAKGVAAMTMDEDYQQKRREAMNKQPAGFREGITRGGKGLVSGFVSGITGIVTKPIKGAQKGGAAGFFKGVGKGLVGAVARPTGGIIDMASSTFQGIKRATETSEVESLRPPRFFNEDGVIRPYRLRDGTGNQMLQKIQFYREWIMTHSSSSDDDDDDDDDDESDLNH

SEQ ID NO: 8930 - protein, 3174 aa, Homo sapiens
MVFESVVVDVLNRFLGDYVVDLDTSQLSLGIWKGAVALKNLQIKENALSQLDVPFKVKVGHIGNLKLIIPWKNLYTQPVEAVLEEIYLLIVPSSRIKYDPLKEEKQLMEAKQQELKRIEEAKQKVVDQEQHLPEKQDTFAEKLVTQIIKNLQVKISSIHIRYEDDITNRDKPLSFGISLQNLSMQTTDQYWVPCLHDETEKLVRKLIRLDNLFAYWNVKSQMFYLSDYDNSLDDLKNGIVNENIVPEGYDFVFRPISANAKLVMNRRSDFDFSAPKINLEIELHNIAIEFNKPQYFSIMELLESVDMMAQNLPYRKFKPDVPLHHHAREWWAYAIHGVLEVNVCPRLWMWSWKHIRKHRQKVKQYKELYKKKLTSKKPPGELLVSLEELEKTLDVFNITIARQTAEVEVKKAGYKIYKEGVKDPEDNKGWFSWLWSWSEQNTNEQQPDVQPETLEEMLTPEEKALLYEAIGYSETAVDPTLLKTFEALKFFVHLKSMSIVLRENHQKPELVDIVIEEFSTLIVQRPGAQAIKFETKIDSFHITGLPDNSEKPRLLSSLDDAMSLFQITFEINPLDETVSQRCIIEAEPLEIIYDARTVNSIVEFFRPPKEVHLAQLTAATLTKLEEFRSKTATGLLYIIETQKVLDLKINLKASYIIVPQDGIFSPTSNLLLLDLGHLKVTSKSRSELPDVKQGEANLKEIMDRAYDSFDIQLTSVQLLYSRVGDNWREARKLSVSTQHILVPMHFNLELSKAMVFMDVRMPKFKIYGKLPLISLRISDKKLQGIMELIESIPKPEPVTEVSAPVKSFQIQTSTSLGTSQISQKIIPLLELPSVSEDDSEEEFFDAPCSPLEEPLQFPTGVKSIRTRKLQKQDCSVNMTTFKIRFEVPKVLIEFYHLVGDCELSVVEILVLGLGAEIEIRTYDLKANAFLKEFCLKCPEYLDENKKPVYLVTTLDNTMEDLLTLEYVKAEKNVPDLKSTYNNVLQLIKVNFSSLDIHLHTEALLNTINYLHNILPQSEEKSAPVSTTETEDKGDVIKKLALKLSTNEDIITLQILAELSCLQIFIQDQKCNISEIKIEGLDSEMIMRPSETEINAKLRNIIVLDSDITAIYKKAVYITGKEVFSFKMVSYMDATAGSAYTDMNVVDIQVNLIVGCIEVVFVTKFLYSILAFIDNFQAAKQALAEATVQAAGMAATGVKELAQRSSRMALDINIKAPVVVIPQSPVSENVFVADFGLITMTNTFHMITESQSSPPPVIDLITIKLSEMRLYRSRFINDAYQEVLDLLLPLNLEVVVERNLCWEWYQEVPCFNVNAQLKPMEFILSQEDITTIFKTLHGNIWYEKDGSASPAVTKDQYSATSGVTTNASHHSGGATVVTAAVVEVHSRALLVKTTLNISFKTDDLTMVLYSPGPKQASFTDVRDPSLKLAEFKLENIISTLKMYTDGSTFSSFSLKNCILDDKRPHVKKATPRMIGLTVGFDKKDMMDIKYRKVRDGCVTDAVFQEMYICASVEFLQTVANVFLEAYTTGTAVETSVQTWTAKEEVPTQESVKWEINVIIKNPEIVFVADMTKNDAPALVITTQCEICYKGNLENSTMTAAIKDLQVRACPFLPVKRKGKITTVLQPCDLFYQTTQKGTDPQVIDMSVKSLTLKVSPVIINTMITITSALYTTKETIPEETASSTAHLWEKKDTKTLKMWFLEESNETEKIAPTTELVPKGEMIKMNIDSIFIVLEAGIGHRTVPMLLAKSRFSGEGKNWSSLINLHCQLELEVHYYNEMFGVWEPLLEPLEIDQTEDFRPWNLGIKMKKKAKMAIVESDPEEENYKVPEYKTVISFHSKDQLNITLSKCGLVMLNNLVKAFTEAATGSSADFVKDLAPFMILNSLGLTISVSPSDSFSVLNIPMAKSYVLKNGESLSMDYIRTKDNDHFNAMTSLSSKLFFILLTPVNHSTADKIPLTKVGRRLYTVRHRESGVERSIVCQIDTVEGSKKVTIRSPVQIRNHFSVPLSVYEGDTLLGTASPENEFNIPLGSYRSFIFLKPEDENYQMCEGIDFEEIIKNDGALLKKKCRSKNPSKESFLINIVPEKDNLTSLSVYSEDGWDLPYIMHLWPPILLRNLLPYKIAYYIEGIENSVFTLSEGHSAQICTAQLGKARLHLKLLDYLNHDWKSEYHIKPNQQDISFVSFTCVTEMEKTDLDIAVHMTYNTGQTVVAFHSPYWMVNKTGRMLQYKADGIHRKHPPNYKKPVLFSFQPNHFFNNNKVQLMVTDSELSNQFSIDTVGSHGAVKCKGLKMDYQVGVTIDLSSFNITRIVTFTPFYMIKNKSKYHISVAEEGNDKWLSLDLEQCIPFWPEYASSKLLIQVERSEDPPKRIYFNKQENCILLRLDNELGGIIAEVNLAEHSTVITFLDYHDGAATFLLINHTKNELVQYNQSSLSEIEDSLPPGKAVFYTWADPVGSRRLKWRCRKSHGEVTQKDDMMMPIDLGEKTIYLVSFFEGLQRIILFTEDPRVFKVTYESEKAELAEQEIAVALQDVGISLVNNYTKQEVAYIGITSSDVVWETKPKKKARWKPMSVKHTEKLEREFKEYTESSPSEDKVIQLDTNVPVRLTPTGHNMKILQPHVIALRRNYLPALKVEYNTSAHQSSFRIQIYRIQIQNQIHGAVFPFVFYPVKPPKSVTMDSAPKPFTDVSIVMRSAGHSQISRIKYFKVLIQEMDLRLDLGFIYALTDLMTEAEVTENTEVELFHKDIEAFKEEYKTASLVDQSQVSLYEYFHISPIKLHLSVSLSSGREEAKDSKQNGGLIPVHSLNLLLKSIGATLTDVQDVVFKLAFFELNYQFHTTSDLQSEVIRHYSKQAIKQMYVLILGLDVLGNPFGLIREFSEGVEAFFYEPYQGAIQGPEEFVEGMALGLKALVGGAVGGLAGAASKITGAMAKGVAAMTMDEDYQQKRREAMNKQPAGFREGITRGGKGLVSGFVSGITGIVTKPIKGAQKGGAAGFFKGVGKGLVGAVARPTGGIIDMASSTFQGIKRATETSEVESLRPPRFFNEDGVIRPYRLRDGTGNQMLQVMENGRFAKYKYFTHVMINKTDMLMITRRGVLFVTKGTFGQLTCEWQYSFDEFTKEPFIVHGRRLRIEAKERVKSVFHAREFGKIINFKTPEDARWILTKLQEAREPSPSL

SEQ ID NO: 8931 - protein, 3069 aa, Homo sapiens
MVFESVVVDVLNRFLGDYVVDLDTSQLSLGIWKGAVALKNLQIKENALSQLDVPFKVKVGHIGNLKLIIPWKNLYTQPVEAVLEEIYLLIVPSSRIKYDPLKEEKQLMEAKQQELKRIEEAKQKVVDQEQHLPEKQDTFAEKLVTQIIKNLQVKISSIHIRYEDDITNRDKPLSFGISLQNLSMQTTDQYWVPCLHDETEKLVRKLIRLDNLFAYWNVKSQMFYLSDYDNSLDDLKNGIVNENIVPEGYDFVFRPISANAKLVMNRRSDFDFSAPKINLEIELHNIAIEFNKPQYFSIMELLESVDMMAQNLPYRKFKPDVPLHHHAREWWAYAIHGVLEVNVCPRLWMWSWKHIRKHRQKVKQYKELYKKKLTSKKPPGELLVSLEELEKTLDVFNITIARQTAEVEVKKAGYKIYKEGVKDPEDNKGWFSWLWSWSEQNTNEQQPDVQPETLEEMLTPEEKALLYEAIGYSETAVDPTLLKTFEALKFFVHLKSMSIVLRENHQKPELVDIVIEEFSTLIVQRPGAQAIKFETKIDSFHITGLPDNSEKPRLLSSLDDAMSLFQITFEINPLDETVSQRCIIEAEPLEIIYDARTVNSIVEFFRPPKEVHLAQLTAATLTKLEEFRSKTATGLLYIIETQKVLDLKINLKASYIIVPQDGIFSPTSNLLLLDLGHLKVTSKSRSELPDVKQGEANLKEIMDRAYDSFDIQLTSVQLLYSRVGDNWREARKLSVSTQHILVPMHFNLELSKAMVFMDVRMPKFKIYGKLPLISLRISDKKLQGIMELIESIPKPEPVTEVSAPVKSFQIQTSTSLGTSQISQKIIPLLELPSVSEDDSEEEFFDAPCSPLEEPLQFPTGVKSIRTRKLQKQDCSVNMTTFKIRFEVPKVLIEFYHLVGDCELSVVEILVLGLGAEIEIRTYDLKANAFLKEFCLKCPEYLDENKKPVYLVTTLDNTMEDLLTLEYVKAEKNVPDLKSTYNNVLQLIKVNFSSLDIHLHTEALLNTINYLHNILPQSEEKSAPVSTTETEDKGDVIKKLALKLSTNEDIITLQILAELSCLQIFIQDQKCNISEIKIEGLDSEMIMRPSETEINAKLRNIIVLDSDITAIYKKAVYITGKEVFSFKMVSYMDATAGSAYTDMNVVDIQVNLIVGCIEVVFVTKFLYSILAFIDNFQAAKQALAEATVQAAGMAATGVKELAQRSSRMALDINIKAPVVVIPQSPVSENVFVADFGLITMTNTFHMITESQSSPPPVIDLITIKLSEMRLYRSRFINDAYQEVLDLLLPLNLEVVVERNLCWEWYQEVPCFNVNAQLKPMEFILSQEDITTIFKTLHGNIWYEKDGSASPAVTKDQYSATSGVTTNASHHSGGATVVTAAVVEVHSRALLVKTTLNISFKTDDLTMVLYSPGPKQASFTDVRDPSLKLAEFKLENIISTLKMYTDGSTFSSFSLKNCILDDKRPHVKKATPRMIGLTVGFDKKDMMDIKYRKVRDGCVTDAVFQEMYICASVEFLQTVANVFLEAYTTGTAVETSVQTWTAKEEVPTQESVKWEINVIIKNPEIVFVADMTKNDAPALVITTQCEICYKGNLENSTMTAAIKDLQVRACPFLPVKRKGKITTVLQPCDLFYQTTQKGTDPQVIDMSVKSLTLKVSPVIINTMITITSALYTTKETIPEETASSTAHLWEKKDTKTLKMWFLEESNETEKIAPTTELVPKGEMIKMNIDSIFIVLEAGIGHRTVPMLLAKSRFSGEGKNWSSLINLHCQLELEVHYYNEMFGVWEPLLEPLEIDQTEDFRPWNLGIKMKKKAKMAIVESDPEEENYKVPEYKTVISFHSKDQLNITLSKCGLVMLNNLVKAFTEAATGSSADFVKDLAPFMILNSLGLTISVSPSDSFSVLNIPMAKSYVLKNGESLSMDYIRTKDNDHFNAMTSLSSKLFFILLTPVNHSTADKIPLTKVGRRLYTVRHRESGVERSIVCQIDTVEGSKKVTIRSPVQIRNHFSVPLSVYEGDTLLGTASPENEFNIPLGSYRSFIFLKPEDENYQMCEGIDFEEIIKNDGALLKKKCRSKNPSKESFLINIVPEKDNLTSLSVYSEDGWDLPYIMHLWPPILLRNLLPYKIAYYIEGIENSVFTLSEGHSAQICTAQLGKARLHLKLLDYLNHDWKSEYHIKPNQQDISFVSFTCVTEMEKTDLDIAVHMTYNTGQTVVAFHSPYWMVNKTGRMLQYKADGIHRKHPPNYKKPVLFSFQPNHFFNNNKVQLMVTDSELSNQFSIDTVGSHGAVKCKGLKMDYQVGVTIDLSSFNITRIVTFTPFYMIKNKSKYHISVAEEGNDKWLSLDLEQCIPFWPEYASSKLLIQVERSEDPPKRIYFNKQENCILLRLDNELGGIIAEVNLAEHSTVITFLDYHDGAATFLLINHTKNELVQYNQSSLSEIEDSLPPGKAVFYTWADPVGSRRLKWRCRKSHGEVTQKDDMMMPIDLGEKTIYLVSFFEGLQRIILFTEDPRVFKVTYESEKAELAEQEIAVALQDVGISLVNNYTKQEVAYIGITSSDVVWETKPKKKARWKPMSVKHTEKLEREFKEYTESSPSEDKVIQLDTNVPVRLTPTGHNMKILQPHVIALRRNYLPALKVEYNTSAHQSSFRIQIYRIQIQNQIHGAVFPFVFYPVKPPKSVTMDSAPKPFTDVSIVMRSAGHSQISRIKYFKVLIQEMDLRLDLGFIYALTDLMTEAEVTENTEVELFHKDIEAFKEEYKTASLVDQSQVSLYEYFHISPIKLHLSVSLSSGREEAKDSKQNGGLIPVHSLNLLLKSIGATLTDVQDVVFKLAFFELNYQFHTTSDLQSEVIRHYSKQAIKQMYVLILGLDVLGNPFGLIREFSEGVEAFFYEPYQGAIQGPEEFVEGMALGLKALVGGAVGGLAGAASKITGAMAKGVAAMTMDEDYQQKRREAMNKQPAGFREGITRGGKGLVSGFVSGITGIVTKPIKGAQKGGAAGFFKGVGKGLVGAVARPTGGIIDMASSTFQGIKRATETSEVESLRPPRFFNEDGVIRPYRLRDGTGNQMLQASKSLI

SEQ ID NO: 8932 - protein, 3135 aa, Homo sapiens
MVFESVVVDVLNRFLGDYVVDLDTSQLSLGIWKGAVALKNLQIKENALSQLDVPFKVKVGHIGNLKLIIPWKNLYTQPVEAVLEEIYLLIVPSSRIKYDPLKEEKQLMEAKQQELKRIEEAKQKVVDQEQHLPEKQDTFAEKLVTQIIKNLQVKISSIHIRYEDDITNRDKPLSFGISLQNLSMQTTDQYWVPCLHDETEKLVRKLIRLDNLFAYWNVKSQMFYLSDYDNSLDDLKNGIVNENIVPEGYDFVFRPISANAKLVMNRRSDFDFSAPKINLEIELHNIAIEFNKPQYFSIMELLESVDMMAQNLPYRKFKPDVPLHHHAREWWAYAIHGVLEVNVCPRLWMWSWKHIRKHRQKVKQYKELYKKKLTSKKPPGELLVSLEELEKTLDVFNITIARQTAEVEVKKAGYKIYKEGVKDPEDNKGWFSWLWSWSEQNTNEQQPDVQPETLEEMLTPEEKALLYEAIGYSETAVDPTLLKTFEALKFFVHLKSMSIVLRENHQKPELVDIVIEEFSTLIVQRPGAQAIKFETKIDSFHITGLPDNSEKPRLLSSLDDAMSLFQITFEINPLDETVSQRCIIEAEPLEIIYDARTVNSIVEFFRPPKEVHLAQLTAATLTKLEEFRSKTATGLLYIIETQKVLDLKINLKASYIIVPQDGIFSPTSNLLLLDLGHLKVTSKSRSELPDVKQGEANLKEIMDRAYDSFDIQLTSVQLLYSRVGDNWREARKLSVSTQHILVPMHFNLELSKAMVFMDVRMPKFKIYGKLPLISLRISDKKLQGIMELIESIPKPEPVTEVSAPVKSFQIQTSTSLGTSQISQKIIPLLELPSVSEDDSEEEFFDAPCSPLEEPLQFPTGVKSIRTRKLQKQDCSVNMTTFKIRFEVPKVLIEFYHLVGDCELSVVEILVLGLGAEIEIRTYDLKANAFLKEFCLKCPEYLDENKKPVYLVTTLDNTMEDLLTLEYVKAEKNVPDLKSTYNNVLQLIKVNFSSLDIHLHTEALLNTINYLHNILPQSEEKSAPVSTTETEDKGDVIKKLGLDSEMIMRPSETEINAKLRNIIVLDSDITAIYKKAVYITGKEVFSFKMVSYMDATAGSAYTDMNVVDIQVNLIVGCIEVVFVTKFLYSILAFIDNFQAAKQALAEATVQAAGMAATGVKELAQRSSRMALDINIKAPVVVIPQSPVSENVFVADFGLITMTNTFHMITESQSSPPPVIDLITIKLSEMRLYRSRFINDAYQEVLDLLLPLNLEVVVERNLCWEWYQEVPCFNVNAQLKPMEFILSQEDITTIFKTLHGNIWYEKDGSASPAVTKDQYSATSGVTTNASHHSGGATVVTAAVVEVHSRALLVKTTLNISFKTDDLTMVLYSPGPKQASFTDVRDPSLKLAEFKLENIISTLKMYTDGSTFSSFSLKNCILDDKRPHVKKATPRMIGLTVGFDKKDMMDIKYRKVRDGCVTDAVFQEMYICASVEFLQTVANVFLEAYTTGTAVETSVQTWTAKEEVPTQESVKWEINVIIKNPEIVFVADMTKNDAPALVITTQCEICYKGNLENSTMTAAIKDLQVRACPFLPVKRKGKITTVLQPCDLFYQTTQKGTDPQVIDMSVKSLTLKVSPVIINTMITITSALYTTKETIPEETASSTAHLWEKKDTKTLKMWFLEESNETEKIAPTTELVPKGEMIKMNIDSIFIVLEAGIGHRTVPMLLAKSRFSGEGKNWSSLINLHCQLELEVHYYNEMFGVWEPLLEPLEIDQTEDFRPWNLGIKMKKKAKMAIVESDPEEENYKVPEYKTVISFHSKDQLNITLSKCGLVMLNNLVKAFTEAATGSSADFVKDLAPFMILNSLGLTISVSPSDSFSVLNIPMAKSYVLKNGESLSMDYIRTKDNDHFNAMTSLSSKLFFILLTPVNHSTADKIPLTKVGRRLYTVRHRESGVERSIVCQIDTVEGSKKVTIRSPVQIRNHFSVPLSVYEGDTLLGTASPENEFNIPLGSYRSFIFLKPEDENYQMCEGIDFEEIIKNDGALLKKKCRSKNPSKESFLINIVPEKDNLTSLSVYSEDGWDLPYIMHLWPPILLRNLLPYKIAYYIEGIENSVFTLSEGHSAQICTAQLGKARLHLKLLDYLNHDWKSEYHIKPNQQDISFVSFTCVTEMEKTDLDIAVHMTYNTGQTVVAFHSPYWMVNKTGRMLQYKADGIHRKHPPNYKKPVLFSFQPNHFFNNNKVQLMVTDSELSNQFSIDTVGSHGAVKCKGLKMDYQVGVTIDLSSFNITRIVTFTPFYMIKNKSKYHISVAEEGNDKWLSLDLEQCIPFWPEYASSKLLIQVERSEDPPKRIYFNKQENCILLRLDNELGGIIAEVNLAEHSTVITFLDYHDGAATFLLINHTKNELVQYNQSSLSEIEDSLPPGKAVFYTWADPVGSRRLKWRCRKSHGEVTQKDDMMMPIDLGEKTIYLVSFFEGLQRIILFTEDPRVFKVTYESEKAELAEQEIAVALQDVGISLVNNYTKQEVAYIGITSSDVVWETKPKKKARWKPMSVKHTEKLEREFKEYTESSPSEDKVIQLDTNVPVRLTPTGHNMKILQPHVIALRRNYLPALKVEYNTSAHQSSFRIQIYRIQIQNQIHGAVFPFVFYPVKPPKSVTMDSAPKPFTDVSIVMRSAGHSQISRIKYFKVLIQEMDLRLDLGFIYALTDLMTEAEVTENTEVELFHKDIEAFKEEYKTASLVDQSQVSLYEYFHISPIKLHLSVSLSSGREEAKDSKQNGGLIPVHSLNLLLKSIGATLTDVQDVVFKLAFFELNYQFHTTSDLQSEVIRHYSKQAIKQMYVLILGLDVLGNPFGLIREFSEGVEAFFYEPYQGAIQGPEEFVEGMALGLKALVGGAVGGLAGAASKITGAMAKGVAAMTMDEDYQQKRREAMNKQPAGFREGITRGGKGLVSGFVSGITGIVTKPIKGAQKGGAAGFFKGVGKGLVGAVARPTGGIIDMASSTFQGIKRATETSEVESLRPPRFFNEDGVIRPYRLRDGTGNQMLQVMENGRFAKYKYFTHVMINKTDMLMITRRGVLFVTKGTFGQLTCEWQYSFDEFTKEPFIVHGRRLRIEAKERVKSVFHAREFGKIINFKTPEDARWILTKLQEAREPSPSL

SEQ ID NO: 8933 - protein, 438 aa, Homo sapiens
MNEVSVIKEGWLHKRGEYIKTWRPRYFLLKSDGSFIGYKERPEAPDQTLPPLNNFSVAECQLMKTERPRPNTFVIRCLQWTTVIERTFHVDSPDEREEWMRAIQMVANSLKQRAPGEDPMDYKCGSPSDSSTTEEMEVAVSKARAKVTMNDFDYLKLLGKGTFGKVILVREKATGRYYAMKILRKEVIIAKDEVAHTVTESRVLQNTRHPFLTALKYAFQTHDRLCFVMEYANGGELFFHLSRERVFTEERARFYGAEIVSALEYLHSRDVVYRDIKVLEDNDYGRAVDWWGLGVVMYEMMCGRLPFYNQDHERLFELILMEEIRFPRTLSPEAKSLLAGLLKKDPKQRLGGGPSDAKEVMEHRFFLSINWQDVVQKKLLPPFKPQVTSEVDTRYFDDEFTAQSITITPPDRYDSLGLLELDQRTHFPQFSYSASIRE

SEQ ID NO: 8934 - protein, 147 aa, Homo sapiens [sequence omitted]

SEQ ID NO: 8935 - protein, 382 aa, Homo sapiens
MRAIQMVANSLKQRAPGEDPMDYKCGSPSDSSTTEEMEVAVSKARAKVTMNDFDYLKLLGKGTFGKVILVREKATGRYYAMKILRKEVIIAKDEVAHTVTESRVLQNTRHPFLTALKYAFQTHDRLCFVMEYANGGELFFHLSRERVFTEERARFYGAEIVSALEYLHSRDVVYRDIKLENLMLDKDGHIKITDFGLCKEGISDGATMKTFCGTPEYLAPEVLEDNDYGRAVDWWGLGVVMYEMMCGRLPFYNQDHERLFELILMEEIRFPRTLSPEAKSLLAGLLKKDPKQRLGGGPSDAKEVMEHRFFLSINWQDVVQKKLLPPFKPQVTSEVDTRYFDDEFTAQSITITPPDRYDSLGLLELDQRTHFPQFSYSASIRE

SEQ ID NO: 8936 - protein, 133 aa, Homo sapiens
MNEVSVIKEGWLHKRGEYIKTWRPRYFLLKSDGSFIGYKERPEAPDQTLPPLNNFSVAECQLMKTERPRPNTFVIRCLQWTTVIERTFHVDSPDEREEWMRAIQMVANSLKQRAPGEDPMDYKCGSPSDSSTT

SEQ ID NO: 8937 - protein, 481 aa, Homo sapiens
MNEVSVIKEGWLHKRGEYIKTWRPRYFLLKSDGSFIGYKERPEAPDQTLPPLNNFSVAECQLMKTERPRPNTFVIRCLQWTTVIERTFHVDSPDEREEWMRAIQMVANSLKQRAPGEDPMDYKCGSPSDSSTTEEMEVAVSKARAKVTMNDFDYLKLLGKGTFGKVILVREKATGRYYAMKILRKEVIIAKDEVAHTVTESRVLQNTRHPFLTALKYAFQTHDRLCFVMEYANGGELFFHLSRERVFTEERARFYGAEIVSALEYLHSRDVVYRDIKLENLMLDKDGHIKITDFGLCKEGISDGATMKTFCGTPEYLAPEVLEDNDYGRAVDWWGLGVVMYEMMCGRLPFYNQDHERLFELILMEEIRFPRTLSPEAKSLLAGLLKKDPKQRLGGGPSDAKEVMEHRFFLSINWQDVVQKKLLPPFKPQVTSEVDTRYFDDEFTAQSITITPPDRYDSLGLLELDQRTHFPQFSYSASIRE

SEQ ID NO: 8938 - protein, 133 aa, Homo sapiens; identical to SEQ ID NO: 8936

SEQ ID NO: 8939 - protein, 96 aa, Homo sapiens
MNEVSVIKEGWLHKRGEYIKTWRPRYFLLKSDGSFIGYKERPEAPDQTLPPLNNFSVAECQLMKTERPRPNTFVIRCLQWTTVIERTFHVDSPDER

SEQ ID NO: 8940 - protein, 119 aa, Homo sapiens
MNEVSVIKEGWLHKRGEYIKTWRPRYFLLKSDGSFIGYKERPEAPDQTLPPLNNFSVAECQLMKTERPRPNTFVIRCLQWTTVIERTFHVDSPDEREEWMRAIQMVANSLKQRAPGEDP

SEQ ID NO: 8941 - protein, 481 aa, Homo sapiens; identical to SEQ ID NO: 8937

SEQ ID NO: 8942 - protein, 67 aa, Homo sapiens
MNEVSVIKEGWLHKRGEYIKTWRPRYFLLKSDGSFIGYKERPEAPDQTLPPLNNFSVAECQLMKTER

SEQ ID NO: 8943 - protein, 47 aa, Homo sapiens
MNEVSVIKEGWLHKRGEYIKTWRPRYFLLKSDGSFIGYKERPEAPDQ

SEQ ID NO: 8944 - protein, 134 aa, Homo sapiens
MNEVSVIKEGWLHKRGEYIKTWRPRYFLLKSDGSFIGYKERPEAPDQTLPPLNNFSVAECQLMKTERPRPNTFVIRCLQWTTVIERTFHVDSPDEREEWMRAIQMVANSLKQRAPGEDPMDYKCGSPSDSSTTE

SEQ ID NO: 8945 - protein, 107 aa, Homo sapiens
MNEVSVIKEGWLHKRGEYIKTWRPRYFLLKSDGSFIGYKERPEAPDQTLPPLNNFSVAECQLMKTERPRPNTFVIRCLQWTTVIERTFHVDSPDEREEWMRAIQMVA

SEQ ID NO: 8946 - protein, 288 aa, Homo sapiens
MNEVSVIKEGWLHKRGEYIKTWRPRYFLLKSDGSFIGYKERPEAPDQTLPPLNNFSVAECQLMKTERPRPNTFVIRCLQWTTVIERTFHVDSPDEREEWMRAIQMVANSLKQRAPGEDPMDYKCGSPSDSSTTEEMEVAVSKARAKVTMNDFDYLKLLGKGTFGKVILVREKATGRYYAMKILRKEVIIAKDEVAHTVTESRVLQNTRHPFLTVSCPPLPRQCEASLWTELRERALIFWYKAQSWGRPGGQGKVLLRPAKSSEPRHVVGVSRLGEWEGDSFFIDGGFM

SEQ ID NO: 8947 - protein, 479 aa, Homo sapiens
MSDVTIVKEGWVQKRGEYIKNWRPRYFLLKTDGSFIGYKEKPQDVDLPYPLNNFSVAKCQLMKTERPKPNTFIIRCLQWTTVIERTFHVDTPEEREEWTEAIQAVADRLQRQEEERMNCSPTSQIDNIGEEEMDASTTHHKRKTMNDFDYLKLLGKGTFGKVILVREKASGKYYAMKILKKEVIIAKDEVAHTLTESRVLKNTRHPFLTSLKYSFQTKDRLCFVMEYVNGGELFFHLSRERVFSEDRTRFYGAEIVSALDYLHSGKIVYRDLKLENLMLDKDGHIKITDFGLCKEGITDAATMKTFCGTPEYLAPEVLEDNDYGRAVDWWGLGVVMYEMMCGRLPFYNQDHEKLFELILMEDIKFPRTLSSDAKSLLSGLLIKDPNKRLGGGPDDAKEIMRHSFFSGVNWQDVYDKKLVPPFKPQVTSETDTRYFDEEFTAQTITITPPEKYDEDGMDCMDNERRPHFPQFSYSASGRE

SEQ ID NO: 8948 - protein, 465 aa, Homo sapiens
MSDVTIVKEGWVQKRGEYIKNWRPRYFLLKTDGSFIGYKEKPQDVDLPYPLNNFSVAKCQLMKTERPKPNTFIIRCLQWTTVIERTFHVDTPEEREEWTEAIQAVADRLQRQEEERMNCSPTSQIDNIGEEEMDASTTHHKRKTMNDFDYLKLLGKGTFGKVILVREKASGKYYAMKILKKEVIIAKDEVAHTLTESRVLKNTRHPFLTSLKYSFQTKDRLCFVMEYVNGGELFFHLSRERVFSEDRTRFYGAEIVSALDYLHSGKIVYRDLKLENLMLDKDGHIKITDFGLCKEGITDAATMKTFCGTPEYLAPEVLEDNDYGRAVDWWGLGVVMYEMMCGRLPFYNQDHEKLFELILMEDIKFPRTLSSDAKSLLSGLLIKDPNKRLGGGPDDAKEIMRHSFFSGVNWQDVYDKKLVPPFKPQVTSETDTRYFDEEFTAQTITITPPEKCQQSDCGMLGNWKK

SEQ ID NO: 8949 - protein, 479 aa, Homo sapiens; identical to SEQ ID NO: 8947

SEQ ID NO: 8950 - protein, 465 aa, Homo sapiens; identical to SEQ ID NO: 8948

SEQ ID NO: 8951 - protein, 139 aa, Homo sapiens
MSDVTIVKEGWVQKRGEYIKNWRPRYFLLKTDGSFIGYKEKPQDVDLPYPLNNFSVAKCQLMKTERPKPNTFIIRCLQWTTVIERTFHVDTPEEREEWTEAIQAVADRLQRQEEERMNCSPTSQIDNIGEEEMDASTTH

SEQ ID NO: 8952 - protein, 207 aa, Homo sapiens
MSPLLRRLLLAALLQLAPAQAPVSQPDAPGHQRKVVSWIDVYTRATCQPREVVVPLTVELMGTVAKQLVPSCVTVQRCGGCCPDDGLECVPTGQHQVRMQILMIRYPSSQLGEMSLEEHSQCECRPKKKDSAVKPDRAATPHHRPQPRSVPGWDSAPGAPSPADITHPTPAPGPSAHAAPSTTSALTPGPAAAAADAAASSVAKGGA

SEQ ID NO: 8953 - protein, 188 aa, Homo sapiens
MSPLLRRLLLAALLQLAPAQAPVSQPDAPGHQRKVVSWIDVYTRATCQPREVVVPLTVELMGTVAKQLVPSCVTVQRCGGCCPDDGLECVPTGQHQVRMQILMIRYPSSQLGEMSLEEHSQCECRPKKKDSAVKPDSPRPLCPRCTQHHQRPDPRTCRCRCRRRSFLRCQGRGLELNPDTCRCRKLRR

SEQ ID NO: 8954 - protein, 380 aa, Homo sapiens
MSETVICSSRATVMLYDDGNKRWLPAGTGPQAFSRVQIYHNPTANSFRVVGRKMQPDQQVVINCAIVRGVKYNQATPNFHQWRDARQVWGLNFGSKEDAAQFAAGMASALEALEGGGPPPPPALPTWSVPNGPSPEEVEQQKRQQPGPSEHIERRVSNAGGPPAPPAGGPPPPPGPPPPPGPPPPPGLPPSGVPAAAHGAGGGPPPAPPLPAAQGPGGGGAGAPGLAAAIAGAKLRKVSKQEEASGGPTAPKAESGRSGGGGLMEEMNAMLARRRKATQVGEKTPKDESANQEEPEARVPAQSESVRRPWEKNSTTLPRMKSSSSVTTSETQPCTPSSSDYSDLQRVKQELLEEVKKELQKVKEEIIEAFVQELRKRGSP

SEQ ID NO: 8955 - protein, 304 aa, Homo sapiens
MAGNFDSEERSSWYWGRLSRQEAVALLQGQRHGVFLVRDSSTSPGDYVLSVSENSRVSHYIINSSGPRPPVPPSPAQPPPGVSPSRLRIGDQEFDSLPALLEFYKIHYLDTTTLIEPVSRSRQGSGVILRQEEAEYVRALFDFNGNDEEDLPFKKGDILRIRDKPEEQWWNAEDSEGKRGMIPVPYVEKYRPASASVSALIGGNQEGSHPQPLGGPEPGPYAQPSVNTPLPNLQNGPIYARVIQKRVPNAYDKTALALEVGELVKVTKINVSGQWEGECNGKRGHFPFTHVRLLDQQNPDEDFS

SEQ ID NO: 8956 - protein, 204 aa, Homo sapiens
MAGNFDSEERSSWYWGRLSRQEAVALLQGQRHGVFLVRDSSTSPGDYVLSVSENSRVSHYIINSSGPRPPVPPSPAQPPPGVSPSRLRIGDQEFDSLPALLEFYKIHYLDTTTLIEPVSRSRQGSGVILRQEEAEYVRALFDFNGNDEEDLPFKKGDILRIRDKPEEQWWNAEDSEGKRGMIPVPYVEKYRPASASVSALIGGR

SEQ ID NO: 8957 - protein, 731 aa, Homo sapiens
  VARIANT 1: note = MOD_RES - Any amino acid
XKPATGLWVWVSLLVAAGTVQPSDSQSVCAGTENKLSSLSDLEQQYRALRKYYENCEVVMGNLEITSIEHNRDLSFLRSVREVTGYVLVALNQFRYLPLENLRIIRGTKLYEDRYALAIFLNYRKDGNFGLQELGLKNLTEILNGGVYVDQNKFLCYADTIHWQDIVRNPWPSNLTLVSTNGSSGCGRCHKSCTGRCWGPTENHCQTLTRTVCAEQCDGRCYGPYVSDCCHRECAGGCSGPKDTDCFACMNFNDSGACVTQCPQTFVYNPTTFQLEHNFNAKYTYGAFCVKKCPHNFVVDSSSCVRACPSSKMEVEENGIKMCKPCTDICPKACDGIGTGSLMSAQTVDSSNIDKFINCTKINGNLIFLVTGIHGDPYNAIEAIDPEKLNVFRTVREITGFLNIQSWPPNMTDFSVFSNLVTIGGRVLYSGLSLLILKQQGITSLQFQSLKEISAGNIYITDNSNLCYYHTINWTTLFSTINQRIVIRDNRKAENCTAEGMVCNHLCSSDGCWGPGPDQCLSCRRFSRGRICIESCNLYDGEFREFENGSICVECDPQCEKMEDGLLTCHGPGPDNCTKCSHFKDGPNCVEKCPDGLQGANSFIFKYADPDRECHPCHPNCTQGCIGSSIEDCIGLMDRTPLIAAGVIGGLFILVIVGLTFAVYVRRKSIKKKRALRRFLETELVEPLTPSGTAPNQAQLRILKETELKRVKVLGSGAFGTVYKGIWVPEG

SEQ ID NO: 8958 - protein, 1308 aa, Homo sapiens
MKPATGLWVWVSLLVAAGTVQPSDSQSVCAGTENKLSSLSDLEQQYRALRKYYENCEVVMGNLEITSIEHNRDLSFLRSVREVTGYVLVALNQFRYLPLENLRIIRGTKLYEDRYALAIFLNYRKDGNFGLQELGLKNLTEILNGGVYVDQNKFLCYADTIHWQDIVRNPWPSNLTLVSTNGSSGCGRCHKSCTGRCWGPTENHCQTLTRTVCAEQCDGRCYGPYVSDCCHRECAGGCSGPKDTDCFACMNFNDSGACVTQCPQTFVYNPTTFQLEHNFNAKYTYGAFCVKKCPHNFVVDSSSCVRACPSSKMEVEENGIKMCKPCTDICPKACDGIGTGSLMSAQTVDSSNIDKFINCTKINGNLIFLVTGIHGDPYNAIEAIDPEKLNVFRTVREITGFLNIQSWPPNMTDFSVFSNLVTIGGRVLYSGLSLLILKQQGITSLQFQSLKEISAGNIYITDNSNLCYYHTINWTTLFSTINQRIVIRDNRKAENCTAEGMVCNHLCSSDGCWGPGPDQCLSCRRFSRGRICIESCNLYDGEFREFENGSICVECDPQCEKMEDGLLTCHGPGPDNCTKCSHFKDGPNCVEKCPDGLQGANSFIFKYADPDRECHPCHPNCTQGCNGPTSHDCIYYPWTGHSTLPQHARTPLIAAGVIGGLFILVIVGLTFAVYVRRKSIKKKRALRRFLETELVEPLTPSGTAPNQAQLRILKETELKRVKVLGSGAFGTVYKGIWVPEGETVKIPVAIKILNETTGPKANVEFMDEALIMASMDHPHLVRLLGVCLSPTIQLVTQLMPHGCLLEYVHEHKDNIGSQLLLNWCVQIAKGMMYLEERRLVHRDLAARNVLVKSPNHVKITDFGLARLLEGDEKEYNADGGKMPIKWMALECIHYRKFTHQSDVWSYGVTIWELMTFGGKPYDGIPTREIPDLLEKGERLPQPPICTIDVYMVMVKCWMIDADSRPKFKELAAEFSRMARDPQRYLVIQGDDRMKLPSPNDSKFFQNLLDEEDLEDMMDAEEYLVPQAFNIPPPIYTSRARIDSNRSEIGHSPPPAYTPMSGNQFVYRDGGFAAEQGVSVPYRAPTSTIPEAPVAQGATAEIFDDSCCNGTLRKPVAPHVQEDSSTQRYSADPTVFAPERSPRGELDEEGYMTPMRDKPKQEYLNPVEENPFVSRRKNGDLQALDNPEYHNASNGPPKAEDEYVNEPLYLNTFANTLGKAEYLKNNILSMPEKAKKAFDNPDYWNHSLPPRSTLQHPDYLQEYSTKYFYKQNGRIRPIVAENPEYLSEFSLKPGTVLPPPPYRHRNTVV

SEQ ID NO: 8959 - protein, 1298 aa, Homo sapiens
MKPATGLWVWVSLLVAAGTVQPSDSQSVCAGTENKLSSLSDLEQQYRALRKYYENCEVVMGNLEITSIEHNRDLSFLRSVREVTGYVLVALNQFRYLPLENLRIIRGTKLYEDRYALAIFLNYRKDGNFGLQELGLKNLTEILNGGVYVDQNKFLCYADTIHWQDIVRNPWPSNLTLVSTNGSSGCGRCHKSCTGRCWGPTENHCQTLTRTVCAEQCDGRCYGPYVSDCCHRECAGGCSGPKDTDCFACMNFNDSGACVTQCPQTFVYNPTTFQLEHNFNAKYTYGAFCVKKCPHNFVVDSSSCVRACPSSKMEVEENGIKMCKPCTDICPKACDGIGTGSLMSAQTVDSSNIDKFINCTKINGNLIFLVTGIHGDPYNAIEAIDPEKLNVFRTVREITGFLNIQSWPPNMTDFSVFSNLVTIGGRVLYSGLSLLILKQQGITSLQFQSLKEISAGNIYITDNSNLCYYHTINWTTLFSTINQRIVIRDNRKAENCTAEGMVCNHLCSSDGCWGPGPDQCLSCRRFSRGRICIESCNLYDGEFREFENGSICVECDPQCEKMEDGLLTCHGPGPDNCTKCSHFKDGPNCVEKCPDGLQGANSFIFKYADPDRECHPCHPNCTQGCIGSSIEDCIGLMDRTPLIAAGVIGGLFILVIVGLTFAVYVRRKSIKKKRALRRFLETELVEPLTPSGTAPNQAQLRILKETELKRVKVLGSGAFGTVYKGIWVPEGETVKIPVAIKILNETTGPKANVEFMDEALIMASMDHPHLVRLLGVCLSPTIQLVTQLMPHGCLLEYVHEHKDNIGSQLLLNWCVQIAKGMMYLEERRLVHRDLAARNVLVKSPNHVKITDFGLARLLEGDEKEYNADGGKMPIKWMALECIHYRKFTHQSDVWSYGVTIWELMTFGGKPYDGIPTREIPDLLEKGERLPQPPICTIDVYMVMVKCWMIDADSRPKFKELAAEFSRMARDPQRYLVIQGDDRMKLPSPNDSKFFQNLLDEEDLEDMMDAEEYLVPQAFNIPPPIYTSRARIDSNRSEIGHSPPPAYTPMSGNQFVYRDGGFAAEQGVSVPYRAPTSTIPEAPVAQGATAEIFDDSCCNGTLRKPVAPHVQEDSSTQRYSADPTVFAPERSPRGELDEEGYMTPMRDKPKQEYLNPVEENPFVSRRKNGDLQALDNPEYHNASNGPPKAEDEYVNEPLYLNTFANTLGKAEYLKNNILSMPEKAKKAFDNPDYWNHSLPPRSTLQHPDYLQEYSTKYFYKQNGRIRPIVAENPEYLSEFSLKPGTVLPPPPYRHRNTVV

SEQ ID NO: 8960 - protein, 128 aa, Homo sapiens
MGNLEITSIEHNRDLSFLRSVREVTGYVLVALNQFRYLPLENLRIIRGTKLYEDRYALAIFLNYRKDGNFGLQELGLKNLTEILNGGVYVDQNKFLCYADTIHWQDIVRNPWPSNLTLVSTNGSSGCG

SEQ ID NO: 8961 - protein, 1292 aa, Homo sapiens
MKPATGLWVWVSLLVAAGTVQPSDSQSVCAGTENKLSSLSDLEQQYRALRKYYENCEVVMGNLEITSIEHNRDLSFLRSVREVTGYVLVALNQFRYLPLENLRIIRGTKLYEDRYALAIFLNYRKDGNFGLQELGLKNLTEILNGGVYVDQNKFLCYADTIHWQDIVRNPWPSNLTLVSTNGSSGCGRCHKSCTGRCWGPTENHCQTLTRTVCAEQCDGRCYGPYVSDCCHRECAGGCSGPKDTDCFACMNFNDSGACVTQCPQTFVYNPTTFQLEHNFNAKYTYGAFCVKKCPHNFVVDSSSCVRACPSSKMEVEENGIKMCKPCTDICPKACDGIGTGSLMSAQTVDSSNIDKFINCTKINGNLIFLVTGIHGDPYNAIEAIDPEKLNVFRTVREITGFLNIQSWPPNMTDFSVFSNLVTIGGRVLYSGLSLLILKQQGITSLQFQSLKEISAGNIYITDNSNLCYYHTINWTTLFSTINQRIVIRDNRKAENCTAEGMVCNHLCSSDGCWGPGPDQCLSCRRFSRGRICIESCNLYDGEFREFENGSICVECDPQCEKMEDGLLTCHGPGPDNCTKCSHFKDGPNCVEKCPDGLQGANSFIFKYADPDRECHPCHPNCTQGCNGPTSHDCIYYPWTGHSTLPQHARTPLIAAGVIGGLFILVIVGLTFAVYVRRKSIKKKRALRRFLETELVEPLTPSGTAPNQAQLRILKETELKRVKVLGSGAFGTVYKGIWVPEGETVKIPVAIKILNETTGPKANVEFMDEALIMASMDHPHLVRLLGVCLSPTIQLVTQLMPHGCLLEYVHEHKDNIGSQLLLNWCVQIAKGMMYLEERRLVHRDLAARNVLVKSPNHVKITDFGLARLLEGDEKEYNADGGKMPIKWMALECIHYRKFTHQSDVWSYGVTIWELMTFGGKPYDGIPTREIPDLLEKGERLPQPPICTIDVYMVMVKCWMIDADSRPKFKELAAEFSRMARDPQRYLVIQGDDRMKLPSPNDSKFFQNLLDEEDLEDMMDAEEYLVPQAFNIPPPIYTSRARIDSNRNQFVYRDGGFAAEQGVSVPYRAPTSTIPEAPVAQGATAEIFDDSCCNGTLRKPVAPHVQEDSSTQRYSADPTVFAPERSPRGELDEEGYMTPMRDKPKQEYLNPVEENPFVSRRKNGDLQALDNPEYHNASNGPPKAEDEYVNEPLYLNTFANTLGKAEYLKNNILSMPEKAKKAFDNPDYWNHSLPPRSTLQHPDYLQEYSTKYFYKQNGRIRPIVAENPEYLSEFSLKPGTVLPPPPYRHRNTVV

SEQ ID NO: 8962 - protein, 1342 aa, Homo sapiens
MRANDALQVLGLLFSLARGSEVGNSQAVCPGTLNGLSVTGDAENQYQTLYKLYERCEVVMGNLEIVLTGHNADLSFLQWIREVTGYVLVAMNEFSTLPLPNLRVVRGTQVYDGKFAIFVMLNYNTNSSHALRQLRLTQLTEILSGGVYIEKNDKLCHMDTIDWRDIVRDRDAEIVVKDNGRSCPPCHEVCKGRCWGPGSEDCQTLTKTICAPQCNGHCFGPNPNQCCHDECAGGCSGPQDTDCFACRHFNDSGACVPRCPQPLVYNKLTFQLEPNPHTKYQYGGVCVASCPHNFVVDQTSCVRACPPDKMEVDKNGLKMCEPCGGLCPKACEGTGSGSRFQTVDSSNIDGFVNCTKILGNLDFLITGLNGDPWHKIPALDPEKLNVFRTVREITGYLNIQSWPPHMHNFSVFSNLTTIGGRSLYNRGFSLLIMKNLNVTSLGFRSLKEISAGRIYISANRQLCYHHSLNWTKVLRGPTEERLDIKHNRPRRDCVAEGKVCDPLCSSGGCWGPGPGQCLSCRNYSRGGVCVTHCNFLNGEPREFAHEAECFSCHPECQPMEGTATCNGSGSDTCAQCAHFRDGPHCVSSCPHGVLGAKGPIYKYPDVQNECRPCHENCTQGCKGPELQDCLGQTLVLIGKTHLTMALTVIAGLVVIFMMLGGTFLYWRGRRIQNKRAMRRYLERGESIEPLDPSEKANKVLARIFKETELRKLKVLGSGVFGTVHKGVWIPEGESIKIPVCIKVIEDKSGRQSFQAVTDHMLAIGSLDHAHIVRLLGLCPGSSLQLVTQYLPLGSLLDHVRQHRGALGPQLLLNWGVQIAKGMYYLEEHGMVHRNLAARNVLLKSPSQVQVADFGVADLLPPDDKQLLYSEAKTPIKWMALESIHFGKYTHQSDVWSYGVTVWELMTFGAEPYAGLRLAEVPDLLEKGERLAQPQICTIDVYMVMVKCWMIDENIRPTFKELANEFTRMARDPPRYLVIKRESGPGIAPGPEPHGLTNKKLEEVELEPELDLDLDLEAEEDNLATTTLGSALSLPVGTLNRPRGSQSLLSPSSGYMPMNQGNLGESCQESAVSGSSERCPRPVSLHPMPRGCLASESSEGHVTGSEAELQEKVSMCRSRSRSRSPRPRGDSAYHSQRHSLLTPVTPLSPPGLEEEDVNGYVMPDTHLKGTPSSREGTLSSVGLSSVLGTEEEDEDEEYEYMNRRRRHSPPHPPRPSSLEELGYEYMDVGSDLSASLGSTQSCPLHPVPIMPTAGTTPDEDYEYMNRQRDGGGPGGDYAAMGACPASEQGYEEMRAFQGPGHQAPHVHYARLKTLRSLEATDSAFDNPDYWHSRLFPKANAQRT

SEQ ID NO: 8963 - protein, 331 aa, Homo sapiens
MRANDALQVLGLLFSLARGSEVGNSQAVCPGTLNGLSVTGDAENQYQTLYKLYERCEVVMGNLEIVLTGHNADLSFLQWIREVTGYVLVAMNEFSTLPLPNLRVVRGTQVYDGKFAIFVMLNYNTNSSHALRQLRLTQLTEILSGGVYIEKNDKLCHMDTIDWRDIVRDRDAEIVVKDNGRSCPPCHEVCKGRCWGPGSEDCQTLTKTICAPQCNGHCFGPNPNQCCHDECAGGCSGPQDTDCFACRHFNDSGACVPRCPQPLVYNKLTFQLEPNPHTKYQYGGVCVASCPHNFVVDQTSCVRACPPDKMEVDKNGLKMCEPCGGLCPKVF

SEQ ID NO: 8964 - protein, 183 aa, Homo sapiens
MRANDALQVLGLLFSLARGSEVGNSQAVCPGTLNGLSVTGDAENQYQTLYKLYERCEVVMGNLEIVLTGHNADLSFLQWIREVTGYVLVAMNEFSTLPLPNLRVVRGTQVYDGKFAIFVMLNYNTNSSHALRQLRLTQLTGQFPMVPSGLTPQPAQDWYLLDDDPRLLTLSASSKVPVTLAAV

SEQ ID NO: 8965 - protein, 1283 aa, Homo sapiens
MGNLEIVLTGHNADLSFLQWIREVTGYVLVAMNEFSTLPLPNLRVVRGTQVYDGKFAIFVMLNYNTNSSHALRQLRLTQLTEILSGGVYIEKNDKLCHMDTIDWRDIVRDRDAEIVVKDNGRSCPPCHEVCKGRCWGPGSEDCQTLTKTICAPQCNGHCFGPNPNQCCHDECAGGCSGPQDTDCFACRHFNDSGACVPRCPQPLVYNKLTFQLEPNPHTKYQYGGVCVASCPHNFVVDQTSCVRACPPDKMEVDKNGLKMCEPCGGLCPKACEGTGSGSRFQTVDSSNIDGFVNCTKILGNLDFLITGLNGDPWHKIPALDPEKLNVFRTVREITGYLNIQSWPPHMHNFSVFSNLTTIGGRSLYNRGFSLLIMKNLNVTSLGFRSLKEISAGRIYISANRQLCYHHSLNWTKVLRGPTEERLDIKHNRPRRDCVAEGKVCDPLCSSGGCWGPGPGQCLSCRNYSRGGVCVTHCNFLNGEPREFAHEAECFSCHPECQPMEGTATCNGSGSDTCAQCAHFRDGPHCVSSCPHGVLGAKGPIYKYPDVQNECRPCHENCTQGCKGPELQDCLGQTLVLIGKTHLTMALTVIAGLVVIFMMLGGTFLYWRGRRIQNKRAMRRYLERGESIEPLDPSEKANKVLARIFKETELRKLKVLGSGVFGTVHKGVWIPEGESIKIPVCIKVIEDKSGRQSFQAVTDHMLAIGSLDHAHIVRLLGLCPGSSLQLVTQYLPLGSLLDHVRQHRGALGPQLLLNWGVQIAKGMYYLEEHGMVHRNLAARNVLLKSPSQVQVADFGVADLLPPDDKQLLYSEAKTPIKWMALESIHFGKYTHQSDVWSYGVTVWELMTFGAEPYAGLRLAEVPDLLEKGERLAQPQICTIDVYMVMVKCWMIDENIRPTFKELANEFTRMARDPPRYLVIKRESGPGIAPGPEPHGLTNKKLEEVELEPELDLDLDLEAEEDNLATTTLGSALSLPVGTLNRPRGSQSLLSPSSGYMPMNQGNLGESCQESAVSGSSERCPRPVSLHPMPRGCLASESSEGHVTGSEAELQEKVSMCRSRSRSRSPRPRGDSAYHSQRHSLLTPVTPLSPPGLEEEDVNGYVMPDTHLKGTPSSREGTLSSVGLSSVLGTEEEDEDEEYEYMNRRRRHSPPHPPRPSSLEELGYEYMDVGSDLSASLGSTQSCPLHPVPIMPTAGTTPDEDYEYMNRQRDGGGPGGDYAAMGACPASEQGYEEMRAFQGPGHQAPHVHYARLKTLRSLEATDSAFDNPDYWHSRLFPKANAQRT

SEQ ID NO: 8966 - protein, 699 aa, Homo sapiens
MALTVIAGLVVIFMMLGGTFLYWRGRRIQNKRAMRRYLERGESIEPLDPSEKANKVLARIFKETELRKLKVLGSGVFGTVHKGVWIPEGESIKIPVCIKVIEDKSGRQSFQAVTDHMLAIGSLDHAHIVRLLGLCPGSSLQLVTQYLPLGSLLDHVRQHRGALGPQLLLNWGVQIAKGMYYLEEHGMVHRNLAARNVLLKSPSQVQVADFGVADLLPPDDKQLLYSEAKTPIKWMALESIHFGKYTHQSDVWSYGVTVWELMTFGAEPYAGLRLAEVPDLLEKGERLAQPQICTIDVYMVMVKCWMIDENIRPTFKELANEFTRMARDPPRYLVIKRESGPGIAPGPEPHGLTNKKLEEVELEPELDLDLDLEAEEDNLATTTLGSALSLPVGTLNRPRGSQSLLSPSSGYMPMNQGNLGESCQESAVSGSSERCPRPVSLHPMPRGCLASESSEGHVTGSEAELQEKVSMCRSRSRSRSPRPRGDSAYHSQRHSLLTPVTPLSPPGLEEEDVNGYVMPDTHLKGTPSSREGTLSSVGLSSVLGTEEEDEDEEYEYMNRRRRHSPPHPPRPSSLEELGYEYMDVGSDLSASLGSTQSCPLHPVPIMPTAGTTPDEDYEYMNRQRDGGGPGGDYAAMGACPASEQGYEEMRAFQGPGHQAPHVHYARLKTLRSLEATDSAFDNPDYWHSRLFPKANAQRT

SEQ ID NO: 8967 - protein, 126 aa, Homo sapiens
MRANDALQVLGLLFSLARGSEVGNSQAVCPGTLNGLSVTGDAENQYQTLYKLYERCEVVMGNLEIVLTGHNADLSFLQWIREVTGYVLVAMNEFSTLPLPNLRVVRGTQVYDGKFAIFVMLNYNTN

SEQ ID NO: 8968 - protein, 921 aa, Homo sapiens
MRANDALQVLGLLFSLARGSEVGNSQAVCPGTLNGLSVTGDAENQYQTLYKLYERCEVVMGNLEIVLTGHNADLSFLQWIREVTGYVLVAMNEFSTLPLPNLRVVRGTQVYDGKFAIFVMLNYNTNSSHALRQLRLTQLTEILSGGVYIEKNDKLCHMDTIDWRDIVRDRDAEIVVKDNGRSCPPCHEVCKGRCWGPGSEDCQTLTKTICAPQCNGHCFGPNPNQCCHDECAGGCSGPQDTDCFACRHFNDSGACVPRCPQPLVYNKLTFQLEPNPHTKYQYGGVCVASCPHNFVVDQTSCVRACPPDKMEVDKNGLKMCEPCGGLCPKACEGTGSGSRFQTVDSSNIDGFVNCTKILGNLDFLITGLNGDPWHKIPALDPEKLNVFRTVREITGYLNIQSWPPHMHNFSVFSNLTTIGGRSLYNRGFSLLIMKNLNVTSLGFRSLKEISAGRIYISANRQLCYHHSLNWTKVLRGPTEERLDIKHNRPRRDCVAEGKVCDPLCSSGGCWGPGPGQCLSCRNYSRGGVCVTHCNFLNGEPREFAHEAECFSCHPECQPMEGTATCNGSGSDTCAQCAHFRDGPHCVSSCPHGVLGAKGPIYKYPDVQNECRPCHENCTQGCKGPELQDCLGQTLVLIGKTHLTMALTVIAGLVVIFMMLGGTFLYWRGRRIQNKRAMRRYLERGESIEPLDPSEKANKVLARIFKETELRKLKVLGSGVFGTVHKGVWIPEGESIKIPVCIKVIEDKSGRQSFQAVTDHMLAIGSLDHAHIVRLLGLCPGSSLQLVTQYLPLGSLLDHVRQHRGALGPQLLLNWGVQIAKGMYYLEEHGMVHRNLAARNVLLKSPSQVQVADFGVADLLPPDDKQLLYSEAKTPIKWMALESIHFGKYTHQSDVWSYGQCIWMPSLPSLAPVSNLPFETPS

SEQ ID NO: 8969 - protein, 3396 aa, Homo sapiens
MFINIKSILWMCSTLIVTHALHKVKVGKSPPVRGSLSGKVSLPCHFSTMPTLPPSYNTSEFLRIKWSKIEVDKNGKDLKETTVLVAQNGNIKIGQDYKGRVSVPTHPEAVGDASLTVVKLLASDAGLYRCDVMYGIEDTQDTVSLTVDGVVFHYRAATSRYTLNFEAAQKACLDVGAVIATPEQLFAAYEDGFEQCDAGWLADQTVRYPIRAPRVGCYGDKMGKAGVRTYGFRSPQETYDVYCYVDHLDGDVFHLTVPSKFTFEEAAKECENQDARLATVGELQAAWRNGFDQCDYGWLSDASVRHPVTVARAQCGGGLLGVRTLYRFENQTGFPPPDSRFDAYCFKPKEATTIDLSILAETASPSLSKEPQMVSDRTTPIIPLVDELPVIPTEFPPVGNIVSFEQKATVQPQAITDSLATKLPTPTGSTKKPWDMDDYSPSASGPLGKLDISEIKEEVLQSTTGVSHYATDSWDGVVEDKQTQESVTQIEQIEVGPLVTSMEILKHIPSKEFPVTETPLVTARMILESKTEKKMVSTVSELVTTGHYGFTLGEEDDEDRTLTVGSDESTLIFDQIPEVITVSKTSEDTIHTHLEDLESVSASTTVSPLIMPDNNGSSMDDWEERQTSGRITEEFLGKYLSTTPFPSQHRTEIELFPYSGDKILVEGISTVIYPSLQTEMTHRRERTETLIPEMRTDTYTDEIQEEITKSPFMGKTEEEVFSGMKLSTSLSEPIHVTESSVEMTKSFDFPTLITKLSAEPTEVRDMEEDFTATPGTTKYDENITTVLLAHGTLSVEAATVSKWSWDEDNTTSKPLESTEPSASSKLPPALLTTVGMNGKDKDIPSFTEDGADEFTLIPDSTQKQLEEVTDEDIAAHGKFTIRFQPTTSTGIAEKSTLRDSTTEEKVPPITSTEGQVYATMEGSALGEVEDVDLSKPVSTVPQFAHTSEVEGLAFVSYSSTQEPTTYVDSSHTIPLSVIPKTDWGVLVPSVPSEDEVLGEPSQDILVIDQTRLEATISPETMRTTKITEGTTQEEFPWKEQTAEKPVPALSSTAWTPKEAVTPLDEQEGDGSAYTVSEDELLTGSERVPVLETTPVGKIDHSVSYPPGAVTEHKVKTDEVVTLTPRIGPKVSLSPGPEQKYETEGSSTTGFTSSLSPFSTHITQLMEETTTEKTSLEDIDLGSGLFEKPKATELIEFSTIKVTVPSDITTAFSSVDRLHTTSAFKPSSAITKKPPLIDREPGEETTSDMVIIGESTSHVPPTTLEDIVAKETETDIDREYFTTSSPPATQPTRPPTVEDKEAFGPQALSTPQPPASTKFHPDINVYIIEVRENKTGRMSDLSVIGHPIDSESKEDEPCSEETDPVHDLMAEILPEFPDIIEIDLYHSEENEEEEEECANATDVTTTPSVQYINGKHLVTTVPKDPEAAEARRGQFESVAPSQNFSDSSESDTHPFVIAKTELSTAVQPNESTETTESLEVTWKPETYPETSEHFSGGEPDVFPTVPFHEEFESGTAKKGAESVTERDTEVGHQAHEHTEPVSLFPEESSGEIAIDQESQKIAFARATEVTFGEEVEKSTSVTYTPTIVPSSASAYVSEEEAVTLIGNPWPDDLLSTKESWVEATPRQVVELSGSSSIPITEGSGEAEEDEDTMFTMVTDLSQRNTTDTLITLDTSRIITESFFEVPATTIYPVSEQPSAKVVPTKFVSETDTSEWISSTTVEEKKRKEEEGTTGTASTFEVYSSTQRSDQLILPFELESPNVATSSDSGTRKSFMSLTTPTQSEREMTDSTPVFTETNTLENLGAQTTEHSSIHQPGVQEGLTTLPRSPASVFMEQGSGEAAADPETTTVSSFSLNVEYAIQAEKEVAGTLSPHVETTFSTEPTGLVLSTVMDRVVAENITQTSREIVISERLGEPNYGAEIRGFSTGFPLEEDFSGDFREYSTVSHPIAKEETVMMEGSGDAAFRDTQTSPSTVPTSVHISHISDSEGPSSTMVSTSAFPWEEFTSSAEGSGEQLVTVSSSVVPVLPSAVQKFSGTASSIIDEGLGEVGTVNEIDRRSTILPTAEVEGTKAPVEKEEVKVSGTVSTNFPQTIEPAKLWSRQEVNPVRQEIESETTSEEQIQEEKSFESPQNSPATEQTIFDSQTFTETELKTTDYSVLTTKKTYSDDKEMKEEDTSLVNMSTPDPDANGLESYTTLPEATEKSHFFLATALVTESIPAEHVVTDSPIKKEESTKHFPKGMRPTIQESDTELLFSGLGSGEEVLPTLPTESVNFTEVEQINNTLYPHTSQVESTSSDKIEDFNRMENVAKEVGPLVSQTDIFEGSGSVTSTTLIEILSDTGAEGPTVAPLPFSTDIGHPQNQTVRWAEEIQTSRPQTITEQDSNKNSSTAEINETTTSSTDFLARAYGFEMAKEFVTSAPKPSDLYYEPSGEGSGEVDIVDSFHTSATTQATRQESSTTFVSDGSLEKHPEVPSAKAVTADGFPTVSVMLPLHSEQNKSSPDPTSTLSNTVSYERSTDGSFQDRFREFEDSTLKPNRKKPTENIIIDLDKEDKDLILTITESTILEILPELTSDKNTIIDIDHTKPVYEDILGMQTDIDTEVPSEPHDSNDESNDDSTQVQEIYEAAVNLSLTEETFEGSADVLASYTQATHDESMTYEDRSQLDHMGFHFTTGIPAPSTETELDVLLPTATSLPIPRKSATVIPEIEGIKAEAKALDDMFESSTLSDGQAIADQSEIIPTLGQFERTQEEYEDKKHAGPSFQPEFSSGAEEALVDHTPYLSIATTHLMDQSVTEVPDVMEGSNPPYYTDTTLAVSTFAKLSSQTPSSPLTIYSGSEASGHTEIPQPSALPGIDVGSSVMSPQDSFKEIHVNIEATFKPSSEEYLHITEPPSLSPDTKLEPSEDDGKPELLEEMEASPTELIAVEGTEILQDFQNKTDGQVSGEAIKMFPTIKTPEAGTVITTADEIELEGATQWPHSTSASATYGVEAGVVPWLSPQTSERPTLSSSPEINPETQAALIRGQDSTIAASEQQVAARILDSNDQATVNPVEFNTEVATPPFSLLETSNETDFLIGINEESVEGTAIYLPGPDRCKMNPCLNGGTCYPTETSYVCTCVPGYSGDQCELDFDECHSNPCRNGATCVDGFNTFRCLCLPSYVGALCEQDTETCDYGWHKFQGQCYKYFAHRRTWDAAERECRLQGAHLTSILSHEEQMFVNRVGHDYQWIGLNDKMFEHDFRWTDGSTLQYENWRPNQPDSFFSAGEDCVVIIWHENGQWNDVPCNYHLTYTCKKGTVACGQPPVVENAKTFGKMKPRYEINSLIRYHCKDGFIQRHLPTIRCLGNGRWAIPKITCMNPSAYQRTYSMKYFKNSSSAKDNSINTSKHDHRWSRRWQESRR

SEQ ID NO: 8970 - protein, 1642 aa, Homo sapiens
MFINIKSILWMCSTLIVTHALHKVKVGKSPPVRGSLSGKVSLPCHFSTMPTLPPSYNTSEFLRIKWSKIEVDKNGKDLKETTVLVAQNGNIKIGQDYKGRVSVPTHPEAVGDASLTVVKLLASDAGLYRCDVMYGIEDTQDTVSLTVDGVVFHYRAATSRYTLNFEAAQKACLDVGAVIATPEQLFAAYEDGFEQCDAGWLADQTVRYPIRAPRVGCYGDKMGKAGVRTYGFRSPQETYDVYCYVDHLDGDVFHLTVPSKFTFEEAAKECENQDARLATVGELQAAWRNGFDQCDYGWLSDASVRHPVTVARAQCGGGLLGVRTLYRFENQTGFPPPDSRFDAYCFKPKEATTIDLSILAETASPSLSKEPQMVSDRTTPIIPLVDELPVIPTEFPPVGNIVSFEQKATVQPQAITDSLATKLPTPTGSTKKPWDMDDYSPSASGPLGKLDISEIKEEVLQSTTGVSHYATDSWDGVVEDKQTQESVTQIEQIEVGPLVTSMEILKHIPSKEFPVTETPLVTARMILESKTEKKMVSTVSELVTTGHYGFTLGEEDDEDRTLTVGSDESTLIFDQIPEVITVSKTSEDTIHTHLEDLESVSASTTVSPLIMPDNNGSSMDDWEERQTSGRITEEFLGKYLSTTPFPSQHRTEIELFPYSGDKILVEGISTVIYPSLQTEMTHRRERTETLIPEMRTDTYTDEIQEEITKSPFMGKTEEEVFSGMKLSTSLSEPIHVTESSVEMTKSFDFPTLITKLSAEPTEVRDMEEDFTATPGTTKYDENITTVLLAHGTLSVEAATVSKWSWDEDNTTSKPLESTEPSASSKLPPALLTTVGMNGKDKDIPSFTEDGADEFTLIPDSTQKQLEEVTDEDIAAHGKFTIRFQPTTSTGIAEKSTLRDSTTEEKVPPITSTEGQVYATMEGSALGEVEDVDLSKPVSTVPQFAHTSEVEGLAFVSYSSTQEPTTYVDSSHTIPLSVIPKTDWGVLVPSVPSEDEVLGEPSQDILVIDQTRLEATISPETMRTTKITEGTTQEEFPWKEQTAEKPVPALSSTAWTPKEAVTPLDEQEGDGSAYTVSEDELLTGSERVPVLETTPVGKIDHSVSYPPGAVTEHKVKTDEVVTLTPRIGPKVSLSPGPEQKYETEGSSTTGFTSSLSPFSTHITQLMEETTTEKTSLEDIDLGSGLFEKPKATELIEFSTIKVTVPSDITTAFSSVDRLHTTSAFKPSSAITKKPPLIDREPGEETTSDMVIIGESTSHVPPTTLEDIVAKETETDIDREYFTTSSPPATQPTRPPTVEDKEAFGPQALSTPQPPASTKFHPDINVYIIEVRENKTGPDRCKMNPCLNGGTCYPTETSYVCTCVPGYSGDQCELDFDECHSNPCRNGATCVDGFNTFRCLCLPSYVGALCEQDTETCDYGWHKFQGQCYKYFAHRRTWDAAERECRLQGAHLTSILSHEEQMFVNRVGHDYQWIGLNDKMFEHDFRWTDGSTLQYENWRPNQPDSFFSAGEDCVVIIWHENGQWNDVPCNYHLTYTCKKGTVACGQPPVVENAKTFGKMKPRYEINSLIRYHCKDGFIQRHLPTIRCLGNGRWAIPKITCMNPSAYQRTYSMKYFKNSSSAKDNSINTSKHDHRWSRRWQESRR

SEQ ID NO: 8971 - protein, 2409 aa, Homo sapiens
MFINIKSILWMCSTLIVTHALHKVKVGKSPPVRGSLSGKVSLPCHFSTMPTLPPSYNTSEFLRIKWSKIEVDKNGKDLKETTVLVAQNGNIKIGQDYKGRVSVPTHPEAVGDASLTVVKLLASDAGLYRCDVMYGIEDTQDTVSLTVDGVVFHYRAATSRYTLNFEAAQKACLDVGAVIATPEQLFAAYEDGFEQCDAGWLADQTVRYPIRAPRVGCYGDKMGKAGVRTYGFRSPQETYDVYCYVDHLDGDVFHLTVPSKFTFEEAAKECENQDARLATVGELQAAWRNGFDQCDYGWLSDASVRHPVTVARAQCGGGLLGVRTLYRFENQTGFPPPDSRFDAYCFKRRMSDLSVIGHPIDSESKEDEPCSEETDPVHDLMAEILPEFPDIIEIDLYHSEENEEEEEECANATDVTTTPSVQYINGKHLVTTVPKDPEAAEARRGQFESVAPSQNFSDSSESDTHPFVIAKTELSTAVQPNESTETTESLEVTWKPETYPETSEHFSGGEPDVFPTVPFHEEFESGTAKKGAESVTERDTEVGHQAHEHTEPVSLFPEESSGEIAIDQESQKIAFARATEVTFGEEVEKSTSVTYTPTIVPSSASAYVSEEEAVTLIGNPWPDDLLSTKESWVEATPRQVVELSGSSSIPITEGSGEAEEDEDTMFTMVTDLSQRNTTDTLITLDTSRIITESFFEVPATTIYPVSEQPSAKVVPTKFVSETDTSEWISSTTVEEKKRKEEEGTTGTASTFEVYSSTQRSDQLILPFELESPNVATSSDSGTRKSFMSLTTPTQSEREMTDSTPVFTETNTLENLGAQTTEHSSIHQPGVQEGLTTLPRSPASVFMEQGSGEAAADPETTTVSSFSLNVEYAIQAEKEVAGTLSPHVETTFSTEPTGLVLSTVMDRVVAENITQTSREIVISERLGEPNYGAEIRGFSTGFPLEEDFSGDFREYSTVSHPIAKEETVMMEGSGDAAFRDTQTSPSTVPTSVHISHISDSEGPSSTMVSTSAFPWEEFTSSAEGSGEQLVTVSSSVVPVLPSAVQKFSGTASSIIDEGLGEVGTVNEIDRRSTILPTAEVEGTKAPVEKEEVKVSGTVSTNFPQTIEPAKLWSRQEVNPVRQEIESETTSEEQIQEEKSFESPQNSPATEQTIFDSQTFTETELKTTDYSVLTTKKTYSDDKEMKEEDTSLVNMSTPDPDANGLESYTTLPEATEKSHFFLATALVTESIPAEHVVTDSPIKKEESTKHFPKGMRPTIQESDTELLFSGLGSGEEVLPTLPTESVNFTEVEQINNTLYPHTSQVESTSSDKIEDFNRMENVAKEVGPLVSQTDIFEGSGSVTSTTLIEILSDTGAEGPTVAPLPFSTDIGHPQNQTVRWAEEIQTSRPQTITEQDSNKNSSTAEINETTTSSTDFLARAYGFEMAKEFVTSAPKPSDLYYEPSGEGSGEVDIVDSFHTSATTQATRQESSTTFVSDGSLEKHPEVPSAKAVTADGFPTVSVMLPLHSEQNKSSPDPTSTLSNTVSYERSTDGSFQDRFREFEDSTLKPNRKKPTENIIIDLDKEDKDLILTITESTILEILPELTSDKNTIIDIDHTKPVYEDILGMQTDIDTEVPSEPHDSNDESNDDSTQVQEIYEAAVNLSLTEETFEGSADVLASYTQATHDESMTYEDRSQLDHMGFHFTTGIPAPSTETELDVLLPTATSLPIPRKSATVIPEIEGIKAEAKALDDMFESSTLSDGQAIADQSEIIPTLGQFERTQEEYEDKKHAGPSFQPEFSSGAEEALVDHTPYLSIATTHLMDQSVTEVPDVMEGSNPPYYTDTTLAVSTFAKLSSQTPSSPLTIYSGSEASGHTEIPQPSALPGIDVGSSVMSPQDSFKEIHVNIEATFKPSSEEYLHITEPPSLSPDTKLEPSEDDGKPELLEEMEASPTELIAVEGTEILQDFQNKTDGQVSGEAIKMFPTIKTPEAGTVITTADEIELEGATQWPHSTSASATYGVEAGVVPWLSPQTSERPTLSSSPEINPETQAALIRGQDSTIAASEQQVAARILDSNDQATVNPVEFNTEVATPPFSLLETSNETDFLIGINEESVEGTAIYLPGPDRCKMNPCLNGGTCYPTETSYVCTCVPGYSGDQCELDFDECHSNPCRNGATCVDGFNTFRCLCLPSYVGALCEQDTETCDYGWHKFQGQCYKYFAHRRTWDAAERECRLQGAHLTSILSHEEQMFVNRVGHDYQWIGLNDKMFEHDFRWTDGSTLQYENWRPNQPDSFFSAGEDCVVIIWHENGQWNDVPCNYHLTYTCKKGTVACGQPPVVENAKTFGKMKPRYEINSLIRYHCKDGFIQRHLPTIRCLGNGRWAIPKITCMNPSAYQRTYSMKYFKNSSSAKDNSINTSKHDHRWSRRWQESRR

SEQ ID NO: 8972 - protein, 1594 aa, Homo sapiens
MPTLPPSYNTSEFLRIKWSKIEVDKNGKDLKETTVLVAQNGNIKIGQDYKGRVSVPTHPEAVGDASLTVVKLLASDAGLYRCDVMYGIEDTQDTVSLTVDGVVFHYRAATSRYTLNFEAAQKACLDVGAVIATPEQLFAAYEDGFEQCDAGWLADQTVRYPIRAPRVGCYGDKMGKAGVRTYGFRSPQETYDVYCYVDHLDGDVFHLTVPSKFTFEEAAKECENQDARLATVGELQAAWRNGFDQCDYGWLSDASVRHPVTVARAQCGGGLLGVRTLYRFENQTGFPPPDSRFDAYCFKPKEATTIDLSILAETASPSLSKEPQMVSDRTTPIIPLVDELPVIPTEFPPVGNIVSFEQKATVQPQAITDSLATKLPTPTGSTKKPWDMDDYSPSASGPLGKLDISEIKEEVLQSTTGVSHYATDSWDGVVEDKQTQESVTQIEQIEVGPLVTSMEILKHIPSKEFPVTETPLVTARMILESKTEKKMVSTVSELVTTGHYGFTLGEEDDEDRTLTVGSDESTLIFDQIPEVITVSKTSEDTIHTHLEDLESVSASTTVSPLIMPDNNGSSMDDWEERQTSGRITEEFLGKYLSTTPFPSQHRTEIELFPYSGDKILVEGISTVIYPSLQTEMTHRRERTETLIPEMRTDTYTDEIQEEITKSPFMGKTEEEVFSGMKLSTSLSEPIHVTESSVEMTKSFDFPTLITKLSAEPTEVRDMEEDFTATPGTTKYDENITTVLLAHGTLSVEAATVSKWSWDEDNTTSKPLESTEPSASSKLPPALLTTVGMNGKDKDIPSFTEDGADEFTLIPDSTQKQLEEVTDEDIAAHGKFTIRFQPTTSTGIAEKSTLRDSTTEEKVPPITSTEGQVYATMEGSALGEVEDVDLSKPVSTVPQFAHTSEVEGLAFVSYSSTQEPTTYVDSSHTIPLSVIPKTDWGVLVPSVPSEDEVLGEPSQDILVIDQTRLEATISPETMRTTKITEGTTQEEFPWKEQTAEKPVPALSSTAWTPKEAVTPLDEQEGDGSAYTVSEDELLTGSERVPVLETTPVGKIDHSVSYPPGAVTEHKVKTDEVVTLTPRIGPKVSLSPGPEQKYETEGSSTTGFTSSLSPFSTHITQLMEETTTEKTSLEDIDLGSGLFEKPKATELIEFSTIKVTVPSDITTAFSSVDRLHTTSAFKPSSAITKKPPLIDREPGEETTSDMVIIGESTSHVPPTTLEDIVAKETETDIDREYFTTSSPPATQPTRPPTVEDKEAFGPQALSTPQPPASTKFHPDINVYIIEVRENKTGPDRCKMNPCLNGGTCYPTETSYVCTCVPGYSGDQCELDFDECHSNPCRNGATCVDGFNTFRCLCLPSYVGALCEQDTETCDYGWHKFQGQCYKYFAHRRTWDAAERECRLQGAHLTSILSHEEQMFVNRVGHDYQWIGLNDKMFEHDFRWTDGSTLQYENWRPNQPDSFFSAGEDCVVIIWHENGQWNDVPCNYHLTYTCKKGTVACGQPPVVENAKTFGKMKPRYEINSLIRYHCKDGFIQRHLPTIRCLGNGRWAIPKITCMNPSAYQRTYSMKYFKNSSSAKDNSINTSKHDHRWSRRWQESRR

SEQ ID NO: 8973 - protein, 655 aa, Homo sapiens
MFINIKSILWMCSTLIVTHALHKVKVGKSPPVRGSLSGKVSLPCHFSTMPTLPPSYNTSEFLRIKWSKIEVDKNGKDLKETTVLVAQNGNIKIGQDYKGRVSVPTHPEAVGDASLTVVKLLASDAGLYRCDVMYGIEDTQDTVSLTVDGVVFHYRAATSRYTLNFEAAQKACLDVGAVIATPEQLFAAYEDGFEQCDAGWLADQTVRYPIRAPRVGCYGDKMGKAGVRTYGFRSPQETYDVYCYVDHLDGDVFHLTVPSKFTFEEAAKECENQDARLATVGELQAAWRNGFDQCDYGWLSDASVRHPVTVARAQCGGGLLGVRTLYRFENQTGFPPPDSRFDAYCFKRPDRCKMNPCLNGGTCYPTETSYVCTCVPGYSGDQCELDFDECHSNPCRNGATCVDGFNTFRCLCLPSYVGALCEQDTETCDYGWHKFQGQCYKYFAHRRTWDAAERECRLQGAHLTSILSHEEQMFVNRVGHDYQWIGLNDKMFEHDFRWTDGSTLQYENWRPNQPDSFFSAGEDCVVIIWHENGQWNDVPCNYHLTYTCKKGTVACGQPPVVENAKTFGKMKPRYEINSLIRYHCKDGFIQRHLPTIRCLGNGRWAIPKITCMNPSAYQRTYSMKYFKNSSSAKDNSINTSKHDHRWSRRWQESRR

SEQ ID NO: 8974 - protein, 479 aa, Homo sapiens
MASTIKEALSVVSEDQSLFECAYGTPHLAKTEMTASSSSDYGQTSKMSPRVPQQDWLSQPPARVTIKMECNPSQVNGSRNSPDECSVAKGGKMVGSPDTVGMNYGSYMEEKHMPPPNMTTNERRVIVPADPTLWSTDHVRQWLEWAVKEYGLPDVNILLFQNIDGKELCKMTKDDFQRLTPSYNADILLSHLHYLRETPLPHLTSDDVDKALQNSPRLMHARNTGGAAFIFPNTSVYPEATQRITTRPDLPYEPPRRSAWTGHGHPTPQSKAAQPSPSTVPKTEDQRPQLDPYQILGPTSSRLANPGSGQIQLWQFLLELLSDSSNSSCITWEGTNGEFKMTDPDEVARRWGERKSKPNMNYDKLSRALRYYYDKNIMTKVHGKRYAYKFDFHGIAQALQPHPPESSLYKYPSDLPYMGSYHAHPQKMNFVAPHPPALPVTSSSFFAAPNPYWNSPTGGIYPNTRLPTSHMPSHLGTYY

SEQ ID NO: 8975 - protein, 363 aa, Homo sapiens
MVGSPDTVGMNYGSYMEEKHMPPPNMTTNERRVIVPADPTLWSTDHVRQWLEWAVKEYGLPDVNILLFQNIDGKELCKMTKDDFQRLTPSYNADILLSHLHYLRETPLPHLTSDDVDKALQNSPRLMHARNTDLPYEPPRRSAWTGHGHPTPQSKAAQPSPSTVPKTEDQRPQLDPYQILGPTSSRLANPGSGQIQLWQFLLELLSDSSNSSCITWEGTNGEFKMTDPDEVARRWGERKSKPNMNYDKLSRALRYYYDKNIMTKVHGKRYAYKFDFHGIAQALQPHPPESSLYKYPSDLPYMGSYHAHPQKMNFVAPHPPALPVTSSSFFAAPNPYWNSPTGGIYPNTRLPTSHMPSHLGTYY

SEQ ID NO: 8976 - protein, 462 aa, Homo sapiens
MIQTVPDPAAHIKEALSVVSEDQSLFECAYGTPHLAKTEMTASSSSDYGQTSKMSPRVPQQDWLSQPPARVTIKMECNPSQVNGSRNSPDECSVAKGGKMVGSPDTVGMNYGSYMEEKHMPPPNMTTNERRVIVPADPTLWSTDHVRQWLEWAVKEYGLPDVNILLFQNIDGKELCKMTKDDFQRLTPSYNADILLSHLHYLRETPLPHLTSDDVDKALQNSPRLMHARNTDLPYEPPRRSAWTGHGHPTPQSKAAQPSPSTVPKTEDQRPQLDPYQILGPTSSRLANPGSGQIQLWQFLLELLSDSSNSSCITWEGTNGEFKMTDPDEVARRWGERKSKPNMNYDKLSRALRYYYDKNIMTKVHGKRYAYKFDFHGIAQALQPHPPESSLYKYPSDLPYMGSYHAHPQKMNFVAPHPPALPVTSSSFFAAPNPYWNSPTGGIYPNTRLPTSHMPSHLGTYY

SEQ ID NO: 8977 - protein, 486 aa, Homo sapiens
MIQTVPDPAAHIKEALSVVSEDQSLFECAYGTPHLAKTEMTASSSSDYGQTSKMSPRVPQQDWLSQPPARVTIKMECNPSQVNGSRNSPDECSVAKGGKMVGSPDTVGMNYGSYMEEKHMPPPNMTTNERRVIVPADPTLWSTDHVRQWLEWAVKEYGLPDVNILLFQNIDGKELCKMTKDDFQRLTPSYNADILLSHLHYLRETPLPHLTSDDVDKALQNSPRLMHARNTGGAAFIFPNTSVYPEATQRITTRPDLPYEPPRRSAWTGHGHPTPQSKAAQPSPSTVPKTEDQRPQLDPYQILGPTSSRLANPGSGQIQLWQFLLELLSDSSNSSCITWEGTNGEFKMTDPDEVARRWGERKSKPNMNYDKLSRALRYYYDKNIMTKVHGKRYAYKFDFHGIAQALQPHPPESSLYKYPSDLPYMGSYHAHPQKMNFVAPHPPALPVTSSSFFAAPNPYWNSPTGGIYPNTRLPTSHMPSHLGTYY

SEQ ID NO: 8978 - protein, 486 aa, Homo sapiens; identical to SEQ ID NO: 8977

SEQ ID NO: 8979 - protein, 171 aa, Homo sapiens
MASTIKEALSVVSEDQSLFECAYGTPHLAKTEMTASSSSDYGQTSKMSPRVPQQDWLSQPPARVTIKMECNPSQVNGSRNSPDECSVAKGGKMVGSPDTVGMNYGSYMEEKHMPPPNMTTNERRVIVPADLPYEPPRRSAWTGHGHPTPQSKGTVLAPMTLSFMSQAVDDC

SEQ ID NO: 8980 - protein, 462 aa, Homo sapiens; identical to SEQ ID NO: 8976

SEQ ID NO: 8981 - protein, 387 aa, Homo sapiens
MVGSPDTVGMNYGSYMEEKHMPPPNMTTNERRVIVPADPTLWSTDHVRQWLEWAVKEYGLPDVNILLFQNIDGKELCKMTKDDFQRLTPSYNADILLSHLHYLRETPLPHLTSDDVDKALQNSPRLMHARNTGGAAFIFPNTSVYPEATQRITTRPDLPYEPPRRSAWTGHGHPTPQSKAAQPSPSTVPKTEDQRPQLDPYQILGPTSSRLANPGSGQIQLWQFLLELLSDSSNSSCITWEGTNGEFKMTDPDEVARRWGERKSKPNMNYDKLSRALRYYYDKNIMTKVHGKRYAYKFDFHGIAQALQPHPPESSLYKYPSDLPYMGSYHAHPQKMNFVAPHPPALPVTSSSFFAAPNPYWNSPTGGIYPNTRLPTSHMPSHLGTYY

SEQ ID NO: 8982 - protein, 469 aa, Homo sapiens
MNDFGIKNMDQVAPVANSYRGTLKRQPAFDTFDGSLFAVFPSLNEEQTLQEVPTGLDSISHDSANCELPLLTPCSKAVMSQALKATFSGFKKEQRRLGIPKNPWLWSEQQVCQWLLWATNEFSLVNVNLQRFGMNGQMLCNLGKERFLELAPDFVGDILWEHLEQMIKENQEKTEDQYEENSHLTSVPHWINSNTLGFGTEQAPYGMQTQNYPKGGLLDSMCPASTPSVLSSEQEFQMFPKSRLSSVSVTYCSVSQDFPGSNLNLLTNNSGTPKDHDSPENGADSFESSDSLLQSWNSQSSLLDVQRVPSFESFEDDCSQSLCLNKPTMSFKDYIQERSDPVEQGKPVIPAAVLAGFTGSGPIQLWQFLLELLSDKSCQSFISWTGDGWEFKLADPDEVARRWGKRKNKPKMNYEKLSRGLRYYYDKNIIHKTSGKRYVYRFVCDLQNLLGFTPEELHAILGVQPDTED

SEQ ID NO: 8983 - protein, 469 aa, Homo sapiens; identical to SEQ ID NO: 8982

SEQ ID NO: 8984 - protein, 168 aa, Homo sapiens
MNDFGIKNMDQVAPVANSYRGTLKRQPAFDTFDGSLFAVFPSLNEEQTLQEVPTGLDSISHDSANCELPLLTPCSKAVMSQALKATFSGFKKEQRRLGIPKNPWLWSEQQVCQWLLWATNEFSLVNVNLQRFGMNGQMLCNLGKERFLELAPDFVGDILWEHLEQMIK

SEQ ID NO: 8985 - protein, 270 aa, Homo sapiens
MNDFGIKNMDQVAPVANSYRGTLKRQPAFDTFDGSLFAVFPSLNEEQTLQEVPTGLDSISHDSANCELPLLTPCSKAVMSQALKATFSGFKKEQRRLGIPKNPWLWSEQQVCQWLLWATNEFSLVNVNLQRFGMNGQMLCNLGKERFLELAPDFVGDILWEHLEQMIKENQEKTEDQYEENSHLTSVPHWINSNTLGFGTEQAPYGMQTQNYPKGGLLDSMCPASTPSVLSSEQEFQMFPKSRLSSVSVTYCSVSQDFPGSNLNLLTNNS

SEQ ID NO: 8986 - protein, 189 aa, Homo sapiens
MTEYKLVVVGAGGVGKSALTIQLIQNHFVDEYDPTIEDSYRKQVVIDGETCLLDILDTAGQEEYSAMRDQYMRTGEGFLCVFAINNTKSFEDIHQYREQIKRVKDSDDVPMVLVGNKCDLAARTVESRQAQDLARSYGIPYIETSAKTRQGVEDAFYTLVREIRQHKLRKLNPPDESGPGCMSCKCVLS

SEQ ID NO: 8987 - protein, 170 aa, Homo sapiens
MTEYKLVVVGAGGVGKSALTIQLIQNHFVDEYDPTIEDSYRKQVVIDGETCLLDILDTAGQEEYSAMRDQYMRTGEGFLCVFAINNTKSFEDIHQYREQIKRVKDSDDVPMVLVGNKCDLAARTVESRQAQDLARSYGIPYIETSAKTRQGSRSGSSSSSGTLWDPPGPM

SEQ ID NO: 8988 - protein, 189 aa, Homo sapiens; identical to SEQ ID NO: 8986

SEQ ID NO: 8989 - protein, 170 aa, Homo sapiens; identical to SEQ ID NO: 8987

SEQ ID NO: 8990 - protein, 189 aa, Homo sapiens; identical to SEQ ID NO: 8986

SEQ ID NO: 8991 - protein, 170 aa, Homo sapiens; identical to SEQ ID NO: 8987

SEQ ID NO: 8992 - protein, 466 aa, Homo sapiens
MSTRSVSSSSYRRMFGGPGTASRPSSSRSYVTTSTRTYSLGSALRPSTSRSLYASSPGGVYATRSSAVRLRSSVPGVRLLQDSVDFSLADAINTEFKNTRTNEKVELQELNDRFANYIDKVRFLEQQNKILLAELEQLKGQGKSRLGDLYEEEMRELRRQVDQLTNDKARVEVERDNLAEDIMRLREKLQEEMLQREEAENTLQSFRQDVDNASLARLDLERKVESLQEEIAFLKKLHEEEIQELQAQIQEQHVQIDVDVSKPDLTAALRDVRQQYESVAAKNLQEAEEWYKSKFADLSEAANRNNDALRQAKQESTEYRRQVQSLTCEVDALKGTNESLERQMREMEENFAVEAANYQDTIGRLQDEIQNMKEEMARHLREYQDLLNVKMALDIEIATYRKLLEGEESRISLPLPNFSSLNLRETNLDSLPLVDTHSKRTLLIKTVETRDGQVINETSQHHDDLE

SEQ ID NO: 8993 - protein, 173 aa, Homo sapiens
GFLVPLWLMRNCFRLQEEMLQREEAENTLQSFRQDVDNASLARLDLERKVESLQEEIAFLKKLHEEEIQELQAQIQEQHVQIDVDVSKPDLTAALRDVRQQYESVAAKNLQEAEEWYKSKFADLSEAANRNNDALRQAKQESTEYRRQVQSLTCEVDALKGTVSTNPAVKEGK

SEQ ID NO: 8994 - protein, 228 aa, Homo sapiens
MRNCFRLQEEMLQREEAENTLQSFRQDVDNASLARLDLERKVESLQEEIAFLKKLHEEEIQELQAQIQEQHVQIDVDVSKPDLTAALRDVRQQYESVAAKNLQEAEEWYKSKFADLSEAANRNNDALRQAKQESTEYRRQVQSLTCEVDALKGTNESLERQMREMEENFAVEAANYQDTIGRLQDEIQNMKEEMARHLREYQDLLNVKMALDIEIATYRKLLEGEESR

SEQ ID NO: 8995 - protein, 431 aa, Homo sapiens
MSTRSVSSSSYRRMFGGPGTASRPSSSRSYVTTSTRTYSLGSALRPSTSRSLYASSPGGVYATRSSAVRLRSSVPGVRLLQDSVDFSLADAINTEFKNTRTNEKVELQELNDRFANYIDKVRFLEQQNKILLAELEQLKGQGKSRLGDLYEEEMRELRRQVDQLTNDKARVEVERDNLAEDIMRLREKLQEEMLQREEAENTLQSFRQDVDNASLARLDLERKVESLQEEIAFLKKLHEEEIQELQAQIQEQHVQIDVDVSKPDLTAALRDVRQQYESVAAKNLQEAEEWYKSKFADLSEAANRNNDALRQAKQESTEYRRQVQSLTCEVDALKGTNESLERQMREMEENFAVEAANYQDTIGRLQDEIQNMKEEMARHLREYQDLLNVKMALDIEIATYRKLLEGEESRISLPLPNFSSLNLRGKHFISL

SEQ ID NO: 8996 - protein, 466 aa, Homo sapiens; identical to SEQ ID NO: 8992

SEQ ID NO: 8997 - protein, 407 aa, Homo sapiens
MFGGPGTASRPSSSRSYVTTSTRTYSLGSALRPSTSRSLYASSPGGVYATRSSAVRLRSSVPGVRLLQDSVDFSLADAINTEFKNTRTNEKVELQELNDRFANYIDKVRFLEQQNKILLAELEQLKGQGKSRLGDLYEEEMRELRRQVDQLTNDKARVEVERDNLAEDIMRLREKLQEEMLQREEAENTLQSFRQDVDNASLARLDLERKVESLQEEIAFLKKLHEEEIQELQAQIQEQHVQIDVDVSKPDLTAALRDVRQQYESVAAKNLQEAEEWYKSKFADLSEAANRNNDALRQAKQESTEYRRQVQSLTCEVDALKGTNESLERQMREMEENFAVEAANYQDTIGRLQDEIQNMKEEMARHLREYQDLLNVKMALDIEIATYRKLLEGEESRILCLFQTFPP

SEQ ID NO: 8998 - protein, 1134 aa, Homo sapiens
MPVFHTRTIESILEPVAQQISHLVIMHEEGEVDGKAIPDLTAPVAAVQAAVSNLVRVGKETVQTTEDQILKRDMPPAFIKVENACTKLVQAAQMLQSDPYSVPARDYLIDGSRGILSGTSDLLLTFDEAEVRKIIRVCKGILEYLTVAEVVETMEDLVTYTKNLGPGMTKMAKMIDERQQELTHQEHRVMLVNSMNTVKELLPVLISAMKIFVTTKNSKNQGIEEALKNRNFTVEKMSAEINEIIRVLQLTSWDEDAWASKDTEAMKRALASIDSKLNQAKGWLRDPSASPGDAGEQAIRQILDEAGKVGELCAGKERREILGTCKMLGQMTDQVADLRARGQGSSPVAMQKAQQVSQGLDVLTAKVENAARKLEAMTNSKQSIAKKIDAAQNWLADPNGGPEGEEQIRGALAEARKIAELCDDPKERDDILRSLGEISALTSKLADLRRQGKGDSPEARALAKQVATALQNLQTKTNRAVANSRPAKAAVHLEGKIEQAQRWIDNPTVDDRGVGQAAIRGLVAEGHRLANVMMGPYRQDLLAKCDRVDQLTAQLADLAARGEGESPQARALASQLQDSLKDLKARMQEAMTQEVSDVFSDTTTPIKLLAVAATAPPDAPNREEVFDERAANFENHSGKLGATAEKAAAVGTANKSTVEGIQASVKTARELTPQVVSAARILLRNPGNQAAYEHFETMKNQWIDNVEKMTGLVDEAIDTKSLLDASEEAIKKDLDKCKVAMANIQPQMLVAGATSIARRANRILLVAKREVENSEDPKFREAVKAASDELSKTISPMVMDAKAVAGNISDPGLQKSFLDSGYRILGAVAKVREAFQPQEPDFPPPPPDLEQLRLTDELAPPKPPLPEGEVPPPRPPPPEEKDEEFPEQKAGEVINQPMMMAARQLHDEARKWSSKPGIPAAEVGIGVVAEADAADAAGFPVPPDMEDDYEPELLLMPSNQPVNQPILAAAQSLHREATKWSSKGNDIIAAAKRMALLMAEMSRLVRGGSGTKRALIQCAKDIAKASDEVTRLAKEVAKQCTDKRIRTNLLQVCERIPTISTQLKILSTVKATMLGRTNISDEESEQATEMLVHNAQNLMQSVKETVREAEAASIKIRTDAGFTLRWVRKTPWYQ

SEQ ID NO: 8999 - protein, 1066 aa, Homo sapiens
MPVFHTRTIESILEPVAQQISHLVIMHEEGEVDGKAIPDLTAPVAAVQAAVSNLVRVGKETVQTTEDQILKRDMPPAFIKVENACTKLVQAAQMLQSDPYSVPARDYLIDGSRGILSGTSDLLLTFDEAEVRKIIRVCKGILEYLTVAEVVETMEDLVTYTKNLGPGMTKMAKMIDERQQELTHQEHRVMLVNSMNTVKELLPVLISAMKIFVTTKNSKNQGIEEALKNRNFTVEKMSAEINEIIRVLQLTSWDEDAWASKDTEAMKRALASIDSKLNQAKGWLRDPSASPGDAGEQAIRQILDEAGKVGELCAGKERREILGTCKMLGQMTDQVADLRARGQGSSPVAMQKAQQVSQGLDVLTAKVENAARKLEAMTNSKQSIAKKIDAAQNWLADPNGGPEGEEQIRGALAEARKIAELCDDPKERDDILRSLGEISALTSKLADLRRQGKGDSPEARALAKQVATALQNLQTKTNRAVANSRPAKAAVHLEGKIEQAQRWIDNPTVDDRGVGQAAIRGLVAEGHRLANVMMGPYRQDLLAKCDRVDQLTAQLADLAARGEGESPQARALASQLQDSLKDLKARMQEAMTQEVSDVFSDTTTPIKLLAVAATAPPDAPNREEVFDERAANFENHSGKLGATAEKAAAVGTANKSTVEGIQASVKTARELTPQVVSAARILLRNPGNQAAYEHFETMKNQWIDNVEKMTGLVDEAIDTKSLLDASEEAIKKDLDKCKVAMANIQPQMLVAGATSIARRANRILLVAKREVENSEDPKFREAVKAASDELSKTISPMVMDAKAVAGNISDPGLQKSFLDSGYRILGAVAKVREAFQPQEPDFPPPPPDLEQLRLTDELAPPKPPLPEGEVPPPRPPPPEEKDEEFPEQKAGEVINQPMMMAARQLHDEARKWSSKGNDIIAAAKRMALLMAEMSRLVRGGSGTKRALIQCAKDIAKASDEVTRLAKEVAKQCTDKRIRTNLLQVCERIPTISTQLKILSTVKATMLGRTNISDEESEQATEMLVHNAQNLMQSVKETVREAEAASIKIRTDAGFTLRWVRKTPWYQ

SEQ ID NO: 9000 - protein, 927 aa, Homo sapiens
MLQSDPYSVPARDYLIDGSRGILSGTSDLLLTFDEAEVRKIIRVCKGILEYLTVAEVVETMEDLVTYTKNLGPGMTKMAKMIDERQQELTHQEHRVMLVNSMNTVKELLPVLISAMKIFVTTKNSKNQGIEEALKNRNFTVEKMSAEINEIIRVLQLTSWDEDAWASKDTEAMKRALASIDSKLNQAKGWLRDPSASPGDAGEQAIRQILDEAGKVGELCAGKERREILGTCKMLGQMTDQVADLRARGQGSSPVAMQKAQQVSQGLDVLTAKVENAARKLEAMTNSKQSIAKKIDAAQNWLADPNGGPEGEEQIRGALAEARKIAELCDDPKERDDILRSLGEISALTSKLADLRRQGKGDSPEARALAKQVATALQNLQTKTNRAVANSRPAKAAVHLEGKIEQAQRWIDNPTVDDRGVGQAAIRGLVAEGHRLANVMMGPYRQDLLAKCDRVDQLTAQLADLAARGEGESPQARALASQLQDSLKDLKARMQEAMTQEVSDVFSDTTTPIKLLAVAATAPPDAPNREEVFDERAANFENHSGKLGATAEKAAAVGTANKSTVEGIQASVKTARELTPQVVSAARILLRNPGNQAAYEHFETMKNQWIDNVEKMTGLVDEAIDTKSLLDASEEAIKKDLDKCKVAMANIQPQMLVAGATSIARRANRILLVAKREVENSEDPKFREAVKAASDELSKTISPMVMDAKAVAGNISDPGLQKSFLDSGYRILGAVAKVREAFQPQEPDFPPPPPDLEQLRLTDELAPPKPPLPEGEVPPPRPPPPEEKDEEFPEQKAGEVINQPMMMAARQLHDEARKWSSKPGIPAAEVGIGVVAEADAADAAGFPVPPDMEDDYEPELLLMPSNQPVNQPILAAAQSLHREATKWSSKGNDIIAAAKRMALLMAEMSRLVRGGSVPRTSPRPQMR

SEQ ID NO: 9001 - protein, 327 aa, Homo sapiens
MPVFHTRTIESILEPVAQQISHLVIMHEEGEVDGKAIPDLTAPVAAVQAAVSNLVRVGKETVQTTEDQILKRDMPPAFIKVENACTKLVQAAQMLQSDPYSVPARDYLIDGSRGILSGTSDLLLTFDEAEVPPPRPPPPEEKDEEFPEQKAGEVINQPMMMAARQLHDEARKWSSKGNDIIAAAKRMALLMAEMSRLVRGGSGTKRALIQCAKDIAKASDEVTRLAKEVAKQCTDKRIRTNLLQVCERIPTISTQLKILSTVKATMLGRTNISDEESEQATEMLVHNAQNLMQSVKETVREAEAASIKIRTDAGFTLRWVRKTPWYQ

SEQ ID NO: 9002 - protein, 806 aa, Homo sapiens
GQMTDQVADLRARGQGSSPVAMQKAQQVSQGLDVLTAKVENAARKLEAMTNSKQSIAKKIDAAQNWLADPNGGPEGEEQIRGALAEARKIAELCDDPKERDDILRSLGEISALTSKLADLRRQGKGDSPEARALAKQVATALQNLQTKTNRAVANSRPAKAAVHLEGKIEQAQRWIDNPTVDDRGVGQAAIRGLVAEGHRLANVMMGPYRQDLLAKCDRVDQLTAQLADLAARGEGESPQARALASQLQDSLKDLKARMQEAMTQEVSDVFSDTTTPIKLLAVAATAPPDAPNREEVFDERAANFENHSGKLGATAEKAAAVGTANKSTVEGIQASVKTARELTPQVVSAARILLRNPGNQAAYEHFETMKNQWIDNVEKMTGLVDEAIDTKSLLDASEEAIKKDLDKCKVAMANIQPQMLVAGATSIARRANRILLVAKREVENSEDPKFREAVKAASDELSKTISPMVMDAKAVAGNISDPGLQKSFLDSGYRILGAVAKVREAFQPQEPDFPPPPPDLEQLRLTDELAPPKPPLPEGEVPPPRPPPPEEKDEEFPEQKAGEVINQPMMMAARQLHDEARKWSSKPGIPAAEVGIGVVAEADAADAAGFPVPPDMEDDYEPELLLMPSNQPVNQPILAAAQSLHREATKWSSKGNDIIAAAKRMALLMAEMSRLVRGGSGTKRALIQCAKDIAKASDEVTRLAKEVAKQCTDKRIRTNLLQVCERIPTISTQLKILSTVKATMLGRTNISDEESEQATEMLVHNAQNLMQSVKETVREAEAASIKIRTDAGFTLRWVRKTPWYQ

SEQ ID NO: 9003 - protein, 1006 aa, Homo sapiens
MPPAFIKVENACTKLVQAAQMLQSDPYSVPARDYLIDGSRGILSGTSDLLLTFDEAEVRKIIRVCKGILEYLTVAEVVETMEDLVTYTKNLGPGMTKMAKMIDERQQELTHQEHRVMLVNSMNTVKELLPVLISAMKIFVTTKNSKNQGIEEALKNRNFTVEKMSAEINEIIRVLQLTSWDEDAWASKDTEAMKRALASIDSKLNQAKGWLRDPSASPGDAGEQAIRQILDEAGKVGELCAGKERREILGTCKMLGQMTDQVADLRARGQGSSPVAMQKAQQVSQGLDVLTAKVENAARKLEAMTNSKQSIAKKIDAAQNWLADPNGGPEGEEQIRGALAEARKIAELCDDPKERDDILRSLGEISALTSKLADLRRQGKGDSPEARALAKQVATALQNLQTKTNRAVANSRPAKAAVHLEGKIEQAQRWIDNPTVDDRGVGQAAIRGLVAEGHRLANVMMGPYRQDLLAKCDRVDQLTAQLADLAARGEGESPQARALASQLQDSLKDLKARMQEAMTQEVSDVFSDTTTPIKLLAVAATAPPDAPNREEVFDERAANFENHSGKLGATAEKAAAVGTANKSTVEGIQASVKTARELTPQVVSAARILLRNPGNQAAYEHFETMKNQWIDNVEKMTGLVDEAIDTKSLLDASEEAIKKDLDKCKVAMANIQPQMLVAGATSIARRANRILLVAKREVENSEDPKFREAVKAASDELSKTISPMVMDAKAVAGNISDPGLQKSFLDSGYRILGAVAKVREAFQPQEPDFPPPPPDLEQLRLTDELAPPKPPLPEGEVPPPRPPPPEEKDEEFPEQKAGEVINQPMMMAARQLHDEARKWSSKGNDIIAAAKRMALLMAEMSRLVRGGSGTKRALIQCAKDIAKASDEVTRLAKEVAKQCTDKRIRTNLLQVCERIPTISTQLKILSTVKATMLGRTNISDEESEQATEMLVHNAQNLMQSVKETVRELKLLQSKFEQMLDLHCAGLERLPGTSRHLAEPGWHRNLY

SEQ ID NO: 9004 - protein, 189 aa, Homo sapiens [sequence omitted]

SEQ ID NO: 9005 - protein, 188 aa, Homo sapiens [sequence omitted]

SEQ ID NO: 9006 - protein, 75 aa, Homo sapiens
MTEYKLVVVGAGGVGKSALTIQLIQNHFVDEYDPTIEGVDDAFYTLVREIRKHKEKMSKDGKKKKKKSKTKCVIM

SEQ ID NO: 9007 - protein, 976 aa, Homo sapiens [sequence omitted]

SEQ ID NO: 9008 - protein, 972 aa, Homo sapiens
MRGARGAWDFLCVLLLLLRVQTGSSQPSVSPGEPSPPSIHPGKSDLIVRVGDEIRLLCTDPGFVKWTFEILDETNENKQNEWITEKAEATNTGKYTCTNKHGLSNSIYVFVRDPAKLFLVDRSLYGKEDNDTLVRCPLTDPEVTNYSLKGCQGKPLPKDLRFIPDPKAGIMIKSVKRAYHRLCLHCSVDQEGKSVLSEKFILKVRPAFKAVPVVSVSKASYLLREGEEFTVTCTIKDVSSSVYSTWKRENSQTKLQEKYNSWHHGDFNYERQATLTISSARVNDSGVFMCYANNTFGSANVTTTLEVVDKGFINIFPMINTTVFVNDGENVDLIVEYEAFPKPEHQQWIYMNRTFTDKWEDYPKSENESNIRYVSELHLTRLKGTEGGTYTFLVSNSDVNAAIAFNVYVNTKPEILTYDRLVNGMLQCVAAGFPEPTIDWYFCPGTEQRCSASVLPVDVQTLNSSGPPFGKLVVQSSIDSSAFKHNGTVECKAYNDVGKTSAYFNFAFKEQIHPHTLFTPLLIGFVIVAGMMCIIVMILTYKYLQKPMYEVQWKVVEEINGNNYVYIDPTQLPYDHKWEFPRNRLSFGKTLGAGAFGKVVEATAYGLIKSDAAMTVAVKMLKPSAHLTEREALMSELKVLSYLGNHMNIVNLLGACTIGGPTLVITEYCCYGDLLNFLRRKRDSFICSKQEDHAEAALYKNLLHSKESSCSDSTNEYMDMKPGVSYVVPTKADKRRSVRIGSYIERDVTPAIMEDDELALDLEDLLSFSYQVAKGMAFLASKNCIHRDLAARNILLTHGRITKICDFGLARDIKNDSNYVVKGNARLPVKWMAPESIFNCVYTFESDVWSYGIFLWELFSLGSSPYPGMPVDSKFYKMIKEGFRMLSPEHAPAEMYDIMKTCWDADPLKRPTFKQIVQLIEKQISESTNHIYSNLANCSPNRQKPVVDHSVRINSVGSTASSSQPLLVHDDV

SEQ ID NO: 9009 - protein, 413 aa, Homo sapiens
MRGARGAWDFLCVLLLLLRVQTGSSQPSVSPGEPSPPSIHPGKSDLIVRVGDEIRLLCTDPGFVKWTFEILDETNENKQNEWITEKAEATNTGKYTCTNKHGLSNSIYVFVRDPAKLFLVDRSLYGKEDNDTLVRCPLTDPEVTNYSLKGCQGKPLPKDLRFIPDPKAGIMIKSVKRAYHRLCLHCSVDQEGKSVLSEKFILKVRPAFKAVPVVSVSKASYLLREGEEFTVTCTIKDVSSSVYSTWKRENSQTKLQEKYNSWHHGDFNYERQATLTISSARVNDSGVFMCYANNTFGSANVTTTLEVVDKGFINIFPMINTTVFVNDGENVDLIVEYEAFPKPEHQQWIYMNRTFTDKWEDYPKSENESNIRYVSELHLTRLKGTEGGTYTFLVSNSDVNAAIAFNVYVNSKL

SEQ ID NO: 9010 - protein, 403 aa, Homo sapiens
MASELAMSNSDLPTSPLAMEYVNDFDLMKFEVKKEPVETDRIISQCGRLIAGGSLSSTPMSTPCSSVPPSPSFSAPSPGSGSEQKAHLEDYYWMTGYPQQLNPEALGFSPEDAVEALISNSHQLQGGFDGYARGAQQLAAAAGAGAGASLGGSGEEMGPAAAVVSAVIAAAAAQSGAGPHYHHHHHHAAGHHHHPTAGAPGAAGSAAASAGGAGGAGGGGPASAGGGGGGGGGGGGGGAAGAGGALHPHHAAGGLHFDDRFSDEQLVTMSVRELNRQLRGVSKEEVIRLKQKRRTLKNRGYAQSCRFKRVQQRHVLESEKNQLLQQVDHLKQEISRLVRERDAYKEKYEKLVSSGFRENGSSSDNPSSPEFFITEPTRKLEPSVGYATFWKPQHRVLTSVFTK

SEQ ID NO: 9011 - protein, 373 aa, Homo sapiens
MASELAMSNSDLPTSPLAMEYVNDFDLMKFEVKKEPVETDRIISQCGRLIAGGSLSSTPMSTPCSSVPPSPSFSAPSPGSGSEQKAHLEDYYWMTGYPQQLNPEALGFSPEDAVEALISNSHQLQGGFDGYARGAQQLAAAAGAGAGASLGGSGEEMGPAAAVVSAVIAAAAAQSGAGPHYHHHHHHAAGHHHHPTAGAPGAAGSAAASAGGAGGAGGGGPASAGGGGGGGGGGGGGGAAGAGGALHPHHAAGGLHFDDRFSDEQLVTMSVRELNRQLRGVSKEEVIRLKQKRRTLKNRGYAQSCRFKRVQQRHVLESEKNQLLQQVDHLKQEISRLVRERDAYKEKYEKLVSSGFRENGSSSDNPSSPEFFM

SEQ ID NO: 9012 - protein, 353 aa, Homo sapiens
MAAELAMGAELPSSPLAIEYVNDFDLMKFEVKKEPPEAERFCHRLPPGSLSSTPLSTPCSSVPSSPSFCAPSPGTGGGGGAGGGGGSSQAGGAPGPPSGGPGAVGGTSGKPALEDLYWMSGYQHHLNPEALNLTPEDAVEALIGSGHHGAHHGAHHPAAAAAYEAFRGPGFAGGGGADDMGAGHHHGAHHAAHHHHAAHHHHHHHHHHGGAGHGGGAGHHVRLEERFSDDQLVSMSVRELNRQLRGFSKEEVIRLKQKRRTLKNRGYAQSCRFKRVQQRHILESEKCQLQSQVEQLKLEVGRLAKERDLYKEKYEKLAGRGGPGSAGGAGFPREPSPPQAGPGGAKGTADFFL

SEQ ID NO: 9013 - protein, 323 aa, Homo sapiens
MAAELSMGPELPTSPLAMEYVNDFDLLKFDVKKEPLGRAERPGRPCTRLQPAGSVSSTPLSTPCSSVPSSPSFSPTEQKTHLEDLYWMASNYQQMNPEALNLTPEDAVEALIGSHPVPQPLQSFDSFRGAHHHHHHHHPHPHHAYPGAGVAHDELGPHAHPHHHHHHQASPPPSSAASPAQQLPTSHPGPGPHATASATAAGGNGSVEDRFSDDQLVSMSVRELNRHLRGFTKDEVIRLKQKRRTLKNRGYAQSCRYKRVQQKHHLENEKTQLIQQVEQLKQEVSRLARERDAYKVKCEKLANSGFREAGSTSDSPSSPEFFL

SEQ ID NO: 9014 - protein, 323 aa, Homo sapiens; identical to SEQ ID NO: 9013

SEQ ID NO: 9015 - protein, 410 aa, Homo sapiens
MAKRSRSEDEDDDLQYADHDYEVPQQKGLKKLWNRVKWTRDEDDKLKKLVEQHGTDDWTLIASHLQNRSDFQCQHRWQKVLNPELIKGPWTKEEDQRVIELVQKYGKKRKMRVGHSPGSELRDGSLNDGGNMALKHTPLKTLPFSPSQFFNTCPGNEQLNIENPSFTSTPICGQKALITTPLHKETTPKDQKENVGFRTPTIRRSILGTTPRTPTPFKNALAAQEKKYGPLKIVSQPLAFLEEDIREVLKEETGTDLFLKEEDEPAYKSCKQENTASGKKVRKSLVLDNWEKEESGTQLLTEDISDMQSENRFTTSLLMIPLLEIHDNRCNLIPEKQDINSTNKTYTLTKKKPNPNTSKVVKLEKNLQSNCEWETVVYGKTEDQLIMTEQARRYLSTYTATSSTSRALIL

SEQ ID NO: 9016 - protein, 752 aa, Homo sapiens
MAKRSRSEDEDDDLQYADHDYEVPQQKGLKKLWNRVKWTRDEDDKLKKLVEQHGTDDWTLIASHLQNRSDFQCQHRWQKVLNPELIKGPWTKEEDQRVIELVQKYGPKRWSLIAKHLKGRIGKQCRERWHNHLNPEVKKSSWTEEEDRIIYEAHKRLGNRWAEIAKLLPGRTDNSIKNHWNSTMRRKVEQEGYLQDGIKSERSSSKLQHKPCAAMDHMQTQNQFYIPVQIPGYQYVSPEGNCIEHVQPTSAFIQQPFIDEDPDKEKKIKELEMLLMSAENEVRRKRIPSQPGSFSSWSGSFLMDDNMSNTLNSLDEHTSEFYSMDENQPVSAQQNSPTKFLAVEANAVLSSLQTIPEFAETLELIESDPVAWSDVTSFDISDAAASPIKSTPVKLMRIQHNEGAMECQFNVSLVLEGKKNTCNGGNSEAVPLTSPNIAKFSTPPAILRKKRKMRVGHSPGSELRDGSLNDGGNMALKHTPLKTLPFSPSQFFNTCPGNEQLNIENPSFTSTPICGQKALITTPLHKETTPKDQKENVGFRTPTIRRSILGTTPRTPTPFKNALAAQEKKYGPLKIVSQPLAFLEEDIREVLKEETGTDLFLKEEDEPAYKSCKQENTASGKKVRKSLVLDNWEKEESGTQLLTEDISDMQSENRFTTSLLMIPLLEIHDNRCNLIPEKQDINSTNKTYTLTKKKPNPNTSKVVKLEKNLQSNCEWETVVYGKTEDQLIMTEQARRYLSTYTATSSTSRALIL

SEQ ID NO: 9017 - protein, 692 aa, Homo sapiens
MAKRSRSEDEDDDLQYADHDYEVPQQKGLKKLWNRVKWTRDEDDKLKKLVEQHGTDDWTLIASHLQNRSDFQCQHRWQKVLNPELIKGPWTKEEDQRVIELVQKYGPKRWSLIAKHLKGRIGKQCRERWHNHLNPEVKKSSWTEEEDRIIYEAHKRLGNRWAEIAKLLPGRTDNSIKNHWNSTMRRKVEQEGYLQDGIKSERSSSKLQHKPCAAMDHMQTQNQFYIPVQIPGYQYVSPEGNCIEHVQPTSAFIQQPFIDEDPDKEKKIKELEMLLMSAENEVRRKRIPSQPGSFSSWSGSFLMDDNMSNTLNSLDEHTSEFYSMDENQPVSAQQNSPTKFLAVEANAVLSSLQTIPEFAETLELIESDPVAWSDVTSFDISDAAASPIKSTPVKLMRIQHNEGAMECQFNVSLVLEGKKNTCNGGNSEAVPLTSPNIAKFSTPPAILRKKRKMRVGHSPGSELRDGSLNDGGNMALKHTPLKTLPFSPSQFFNTCPGNEQLNIENPSFTSTPICGQKALITTPLHKETTPKDQKENVGFRTPTIRRSILGTTPRTPTPFKNALAAQEKKYGPLKIVSQPLAFLEEDIREVLKEETGTDLFLKEEDEPAYKSCKQENTASGKKVRKSLVLDNWEKEESGTQLLTEDISDMQSNCEWETVVYGKTEDQLIMTEQARRYLSTYTATSSTSRALIL

SEQ ID NO: 9018 - protein, 236 aa, Homo sapiens
MCVCAGCRAAPSRRGAGPLQVAGGWSEGADMDYDSYQHYFYDYDCGEDFYRSTAPSEDIWKKFELVPSPPTSPPWGLGPGAGDPAPGIGPPEPWPGGCTGDEAESRGHSKGWGRNYASIIRRDCMWSGFSARERLERAVSDRLAPGAPRGNPPKASAAPDCTPSLEAGNPAPAAPCPLGEPKTQACSGSESPSDSGKDLPEPSKRGPPHGWPKLCPCLRSGIGSSQALGPSPPLFG

SEQ ID NO: 9019 - protein, 364 aa, Homo sapiens
MDYDSYQHYFYDYDCGEDFYRSTAPSEDIWKKFELVPSPPTSPPWGLGPGAGDPAPGIGPPEPWPGGCTGDEAESRGHSKGWGRNYASIIRRDCMWSGFSARERLERAVSDRLAPGAPRGNPPKASAAPDCTPSLEAGNPAPAAPCPLGEPKTQACSGSESPSDSENEEIDVVTVEKRQSLGIRKPVTITVRADPLDPCMKHFHISIHQQQHNYAARFPPESCSQEEASERGPQEEVLERDAAGEKEDEEDEEIVSPPPVESEAAQSCHPKPVSSDTEDVTKRKNHNFLERKRRNDLRSRFLALRDQVPTLASCSKAPKVVILSKALEYLQALVGAEKRMATEKRQLRCRQQQLQKRIAYLTGY

SEQ ID NO: 9020 - protein, 394 aa, Homo sapiens
MCVCAGCRAAPSRRGAGPLQVAGGWSEGADMDYDSYQHYFYDYDCGEDFYRSTAPSEDIWKKFELVPSPPTSPPWGLGPGAGDPAPGIGPPEPWPGGCTGDEAESRGHSKGWGRNYASIIRRDCMWSGFSARERLERAVSDRLAPGAPRGNPPKASAAPDCTPSLEAGNPAPAAPCPLGEPKTQACSGSESPSDSENEEIDVVTVEKRQSLGIRKPVTITVRADPLDPCMKHFHISIHQQQHNYAARFPPESCSQEEASERGPQEEVLERDAAGEKEDEEDEEIVSPPPVESEAAQSCHPKPVSSDTEDVTKRKNHNFLERKRRNDLRSRFLALRDQVPTLASCSKAPKVVILSKALEYLQALVGAEKRMATEKRQLRCRQQQLQKRIAYLTGY

SEQ ID NO: 9021 - protein, 206 aa, Homo sapiens
MDYDSYQHYFYDYDCGEDFYRSTAPSEDIWKKFELVPSPPTSPPWGLGPGAGDPAPGIGPPEPWPGGCTGDEAESRGHSKGWGRNYASIIRRDCMWSGFSARERLERAVSDRLAPGAPRGNPPKASAAPDCTPSLEAGNPAPAAPCPLGEPKTQACSGSESPSDSGKDLPEPSKRGPPHGWPKLCPCLRSGIGSSQALGPSPPLFG

SEQ ID NO: 9022 - protein, 100 aa, Homo sapiens
MDYDSYQHYFYDYDCGEDFYRSTAPSEDIWKKFELVPSPPTSPPWGLGPGAGDPAPGIGPPEPWPGGCTGDEAESRGHSKGWGRNYASIIRRDCMWSGFS

SEQ ID NO: 9023 - protein, 213 aa, Homo sapiens
MPRRAENWDEAEVGAEEAGVEEYGPEEDGGEESGAEESGPEESGPEELGAEEEMEAGRPRPVLRSVNSREPSQVIFCNRSPRVVLPVWLNFDGEPQPYPTLPPGTGRRIHSYRGHLWLFRDAGTHDGLLVNQTELFVPSLNVDGQPIFANITLPVYTLKERCLQVVRSLVKPENYRRLDIVRSLYEDLEDHPNVQKDLERLTQERIAHQRMGD

SEQ ID NO: 9024 - protein, 172 aa, Homo sapiens
MPRRAENWDEAEVGAEEAGVEEYGPEEDGGEESGAEESGPEESGPEELGAEEEMEAGRPRPVLRSVNSREPSQVIFCNRSPRVVLPVWLNFDGEPQPYPTLPPGTGRRIHSYRVYTLKERCLQVVRSLVKPENYRRLDIVRSLYEDLEDHPNVQKDLERLTQERIAHQRMGD

SEQ ID NO: 9025 - protein, 131 aa, Homo sapiens
MPRRAENWDEAEVGAEEAGVEEYGPEEDSYRGHLWLFRDAGTHDGLLVNQTELFVPSLNVDGQPIFANITLPVYTLKERCLQVVRSLVKPENYRRLDIVRSLYEDLEDHPNVQKDLERLTQERIAHQRMGD

SEQ ID NO: 9026 - protein, 426 aa, Homo sapiens
MVHFCGLLTLHREPVPLKSISVSVNIYEFVAGVSATLNYENEEKVPLEAFFVFPMDEDSAVYSFEALVDGKKIVAELQDKMKARTNYEKAISQGHQAFLLEGDSSSRDVFSCNVGNLQPGSKAAVTLKYVQELPLEADGALRFVLPAVLNPRYQFSGSSKDSCLNVKTPIVPVEDLPYTLSMVATIDSQHGIEKVQSNCPLSPTEYLGEDKTSAQVSLAAGHKFDRDVELLIYYNEVHTPSVVLEMGMPNMKPGHLMGDPSAMVSFYPNIPEDQPSNTCGEFIFLMDRSGSMQSPMSSQDTSQLRIQAAKETLILLLKSLPIGCYFNIYGFGSSYEACFPESVKYTQQTMEEALGRVKLMQADLGGTEILAPLQNIYRGPSIPGHPLQVFERPYTLTVLLLHLSPEGNLCVIRPRHSRWTITVSVG

SEQ ID NO: 9027 - protein, 786 aa, Homo sapiens
MVHFCGLLTLHREPVPLKSISVSVNIYEFVAGVSATLNYENEEKVPLEAFFVFPMDEDSAVYSFEALVDGKKIVAELQDKMKARTNYEKAISQGHQAFLLEGDSSSRDVFSCNVGNLQPGSKAAVTLKYVQELPLEADGALRFVLPAVLNPRYQFSGSSKDSCLNVKTPIVPVEDLPYTLSMVATIDSQHGIEKVQSNCPLSPTEYLGEDKTSAQVSLAAGHKFDRDVELLIYYNEVHTPSVVLEMGMPNMKPGHLMGDPSAMVSFYPNIPEDQPSNTCGEFIFLMDRSGSMQSPMSSQDTSQLRIQAAKETLILLLKSLPIGCYFNIYGFGSSYEACFPESVKYTQQTMEEALGRVKLMQADLGGTEILAPLQNIYRGPSIPGHPLQLFVFTDGEVTDTFSVIKEVRINRQKHRCFSFGIGEGTSTSLIKGIARASGGTSEFITGKDRMQSKALRTLKRSLQPVVEDVSLSWHLPPGLSAKMLSPEQTVIFRGQRLISYAQLTGRMPAAETTGEVCLKYTLQGKTFEDKVTFPLQPKPDVNLTIHRLAAKSLLQTKDMGLRETPASDKKDALNLSLESGVISSFTAFIAINKELNKPVQGPLAHRDVPRPILLGASAPLKIKCQSGFRKALHSDRPPSASQPRGELMCYKAKTFQMDDYSLCGLISHKDQHSPGFGENHLVQLIYHQNANGSWDLNEDLAKILGMSLEEIMAAQPAELVDSSGWATILAVIWLHSNGKDLKCEWELLERKAVAWMRAHAGSTMPSVVKAAITFLKSSVDPAIFAF

SEQ ID NO: 9028 - protein, 415 aa, Homo sapiens
MVHFCGLLTLHREPVPLKSISVSVNIYEFVAGVSATLNYENEEKVPLEAFFVFPMDEDSAVYSFEALVDGKKIVAELQDKMKARTNYEKAISQGHQAFLLEGDSSSRDVFSCNVGNLQPGSKAAVTLKYVQELPLEADGALRFVLPAVLNPRYQFSGSSKDSCLNVKTPIVPVEDLPYTLSMVATIDSQHGIEKVQSNCPLSPTEYLGEDKTSAQVSLAAGHKFDRDVELLIYYNEVHTPSVVLEMGMPNMKPGHLMGDPSAMVSFYPNIPEDQPSNTCGEFIFLMDRSGSMQSPMSSQDTSQLRIQAAKETLILLLKSLPIGCYFNIYGFGSSYEACFPESVKYTQQTMEEALGRVKLMQADLGGTEILAPLQNIYRGPSIPGHPLQLFVFTDGEVTDTFSVIKEVRINRQKHR

SEQ ID NO: 9029 - protein, 786 aa, Homo sapiens; identical to SEQ ID NO: 9027

SEQ ID NO: 9030 - protein, 415 aa, Homo sapiens; identical to SEQ ID NO: 9028

SEQ ID NO: 9031 - protein, 766 aa, Homo sapiens [sequence omitted]

SEQ ID NO: 9032 - protein, 648 aa, Homo sapiens [sequence omitted]

SEQ ID NO: 9033 - protein, 668 aa, Homo sapiens
MEHIQGAWKTISNGFGFKDAVFDGSSCISPTIVQQFGYQRRASDDGKLTDPSKTSNTIRVFLPNKQRTVVNVRNGMSLHDCLMKALKVRGLQPECCAVFRLLHEHKGKKARLDWNTDAASLIGEELQVDFLDHVPLTTHNFARKTFLKLAFCDICQKFLLNGFRCQTCGYKFHEHCSTKVPTMCVDWSNIRQLLLFPNSTIGDSGVPALPSLTMRRMRESVSRMPVSSQHRYSTPHAFTFNTSSPSSEGSLSQRQRSTSTPNVHMVSTTLPVDSRMIENNNLSASPRAWSRRFCLRGRDAIRSHSESASPSALSSSPNNLSPTGWSQPKTPVPAQRERAPVSGTQEKNKIRPRGQRDSSYYWEIEASEVMLSTRIGSGSFGTVYKGKWHGDVAVKILKVVDPTPEQFQAFRNEVAVLRKTRHVNILLFMGYMTKDNLAIVTQWCEGSSLYKHLHVQETKFQMFQLIDIARQTAQGMDYLHAKNIIHRDMKSNNIFLHEGLTVKIGDFGLATVKSRWSGSQQVEQPTGSVLWMAPEVIRMQDNNPFSFQSDVYSYGIVLYELMTGELPYSHINNRDQIIFMVGRGYASPDLSKLYKNCPKAMKRLVADCVKKVKEERPLFPQILSSIELLQHSLPKINRSASEPSLHRAAHTEDINACTLTTSPRLPVF

SEQ ID NO: 9034 - protein, 433 aa, Homo sapiens
MCVDWSNIRQLFSQHRYSTPHAFTFNTSSPSSEGSLSQRQRSTSTPNVHMVSTTLPVDSRMIEDAIRSHSESASPSALSSSPNNLSPTGWSQPKTPVPAQRERAPVSGTQEKNKIRPRGQRDSSYYWEIEASEVMLSTRIGSGSFGTVYKGKWHGDVAVKILKVVDPTPEQFQAFRNEVAVLRKTRHVNILLFMGYMTKDNLAIVTQWCEGSSLYKHLHVQETKFQMFQLIDIARQTAQGMDYLHAKNIIHRDMKSNNIFLHEGLTVKIGDFGLATVKSRWSGSQQVEQPTGSVLWMAPEVIRMQDNNPFSFQSDVYSYGIVLYELMTGELPYSHINNRDQIIFMVGRGYASPDLSKLYKNCPKAMKRLVADCVKKVKEERPLFPQILSSIELLQHSLPKINRSASEPSLHRAAHTEDINACTLTTSPRLPVF

SEQ ID NO: 9035 - protein, 567 aa, Homo sapiens
MMANSQILLRQATLSVFSCRTSKEQCKKARLDWNTDAASLIGEELQVDFLDHVPLTTHNFARKTFLKLAFCDICQKFLLNGFRCQTCGYKFHEHCSTKVPTMCVDWSNIRQLLLFPNSTIGDSGVPALPSLTMRRMRESVSRMPVSSQHRYSTPHAFTFNTSSPSSEGSLSQRQRSTSTPNVHMVSTTLPVDSRMIEDAIRSHSESASPSALSSSPNNLSPTGWSQPKTPVPAQRERAPVSGTQEKNKIRPRGQRDSSYYWEIEASEVMLSTRIGSGSFGTVYKGKWHGDVAVKILKVVDPTPEQFQAFRNEVAVLRKTRHVNILLFMGYMTKDNLAIVTQWCEGSSLYKHLHVQETKFQMFQLIDIARQTAQGMDYLHAKNIIHRDMKSNNIFLHEGLTVKIGDFGLATVKSRWSGSQQVEQPTGSVLWMAPEVIRMQDNNPFSFQSDVYSYGIVLYELMTGELPYSHINNRDQIIFMVGRGYASPDLSKLYKNCPKAMKRLVADCVKKVKEERPLFPQILSSIELLQHSLPKINRSASEPSLHRAAHTEDINACTLTTSPRLPVF

SEQ ID NO: 9036 - protein, 536 aa, Homo sapiens
MGSNKSKPKDASQRRRSLEPAENVHGAGGGAFPASQTPSKPASADGHRGPSAAFAPAAAEPKLFGGFNSSDTVTSPQRAGPLAGGVTTFVALYDYESRTETDLSFKKGERLQIVNNTEGDWWLAHSLSTGQTGYIPSNYVAPSDSIQAEEWYFGKITRRESERLLLNAENPRGTFLVRESETTKGAYCLSVSDFDNAKGLNVKHYKIRKLDSGGFYITSRTQFNSLQQLVAYYSKHADGLCHRLTTVCPTSKPQTQGLAKDAWEIPRESLRLEVKLGQGCFGEVWMGTWNGTTRVAIKTLKPGTMSPEAFLQEAQVMKKLRHEKLVQLYAVVSEEPIYIVTEYMSKGSLLDFLKGETGKYLRLPQLVDMAAQIASGMAYVERMNYVHRDLRAANILVGENLVCKVADFGLARLIEDNEYTARQGAKFPIKWTAPEAALYGRFTIKSDVWSFGILLTELTTKGRVPYPGMVNREVLDQVERGYRMPCPPECPESLHDLMCQCWRKEPEERPTFEYLQAFLEDYFTSTEPQYQPGENL

SEQ ID NO: 9037 - protein, 542 aa, Homo sapiens
MGSNKSKPKDASQRRRSLEPAENVHGAGGGAFPASQTPSKPASADGHRGPSAAFAPAAAEPKLFGGFNSSDTVTSPQRAGPLAGGVTTFVALYDYESRTETDLSFKKGERLQIVNNTRKVDVREGDWWLAHSLSTGQTGYIPSNYVAPSDSIQAEEWYFGKITRRESERLLLNAENPRGTFLVRESETTKGAYCLSVSDFDNAKGLNVKHYKIRKLDSGGFYITSRTQFNSLQQLVAYYSKHADGLCHRLTTVCPTSKPQTQGLAKDAWEIPRESLRLEVKLGQGCFGEVWMGTWNGTTRVAIKTLKPGTMSPEAFLQEAQVMKKLRHEKLVQLYAVVSEEPIYIVTEYMSKGSLLDFLKGETGKYLRLPQLVDMAAQIASGMAYVERMNYVHRDLRAANILVGENLVCKVADFGLARLIEDNEYTARQGAKFPIKWTAPEAALYGRFTIKSDVWSFGILLTELTTKGRVPYPGMVNREVLDQVERGYRMPCPPECPESLHDLMCQCWRKEPEERPTFEYLQAFLEDYFTSTEPQYQPGENL

SEQ ID NO: 9038 - protein, 536 aa, Homo sapiens; identical to SEQ ID NO: 9036

SEQ ID NO: 9039 - protein, 536 aa, Homo sapiens; identical to SEQ ID NO: 9036

SEQ ID NO: 9040 - protein, 536 aa, Homo sapiens; identical to SEQ ID NO: 9036

SEQ ID NO: 9041 - protein, 140 aa, Homo sapiens
MPLVKRNIDPRHLCHTALPRGIKNELECVTNISLANIIRQLSSLSKYAEDIFGELFNEAHSFSFRVNSLQERVDRLSVSVTQLDPKEEELSLQDITMRKAFRSSTIQDQQLFDRKTLPIPLQETYDVCEQPPPLNILTPY

SEQ ID NO: 9042 - protein, 559 aa, Homo sapiens
MPLVKRNIDPRHLCHTALPRGIKNELECVTNISLANIIRQLSSLSKYAEDIFGELFNEAHSFSFRVNSLQERVDRLSVSVTQLDPKEEELSLQDITMRKAFRSSTIQDQQLFDRKTLPIPLQETYDVCEQPPPLNILTPYRDDGKEGLKFYTNPSYFFDLWKEKMLQDTEDKRKEKRKQKQKNLDRPHEPEKVPRAPHDRRREWQKLAQGPELAEDDANLLHKHIEVANGPASHFETRPQTYVDHMDGSYSLSALPFSQMSELLTRAEERVLVRPHEPPPPPPMHGAGDAKPIPTCISSATGLIENRPQSPATGRTPVFVSPTPPPPPPPLPSALSTSSLRASMTSTPPPPVPPPPPPPATALQAPAVPPPPAPLQIAPGVLHPAPPPIAPPLVQPSPPVARAAPVCETVPVHPLPQGEVQGLPPPPPPPPLPPPGIRPSSPVTVTALAHPPSGLHPTPSTAPGPHVPLMPPSPPSQVIPASEPKRHPSTLPVISDARSVLLEAIRKGIQLRKVEEQREQEAKHERIENDVATILSRRIAVEYSDSEDDSEFDEVDWLE

SEQ ID NO: 9043 - protein, 140 aa, Homo sapiens; identical to SEQ ID NO: 9041

SEQ ID NO: 9044 - protein, 559 aa, Homo sapiens; identical to SEQ ID NO: 9042

SEQ ID NO: 9045 - protein, 559 aa, Homo sapiens; identical to SEQ ID NO: 9042

SEQ ID NO: 9046 - protein, 559 aa, Homo sapiens; identical to SEQ ID NO: 9042

SEQ ID NO: 9047 - protein, 559 aa, Homo sapiens; identical to SEQ ID NO: 9042

SEQ ID NO: 9048 - protein, 89 aa, Homo sapiens
MPLVKRNIDPRHLCHTALPRGIKNELECVTNISLANIIRQLSSLSKYAEDIFGELFNEAHSFSFRVNSLQERVDRLSVSVTQLDPKEEE

SEQ ID NO: 9049 - protein, 180 aa, Homo sapiens
MPLVKRNIDPRHLCHTALPRGIKNELECVTNISLANIIRQLSSLSKYAEDIFGELFNEAHSFSFRVNSLQERVDRLSVSVTQLDPKEEELSLQDITMRKAFRSSTIQDQQLFDRKTLPIPLQETYDVCEQPPPLNILTPYRDDGKEGLKFYTNPSYFFDLWKEKMLQDTEDKRKEKRKQK

SEQ ID NO: 9050 - protein, 89 aa, Homo sapiens; identical to SEQ ID NO: 9048

SEQ ID NO: 9051 - protein, 498 aa, Homo sapiens
MPLVTRNIEPRHLCRQTLPSVRSELECVTNITLANVIRQLGSLSKYAEDIFGELFTQANTFASRVSSLAERVDRLQVKVTQLDPKEEEVSLQGINTRKAFRSSTIQDQKLFDRNSLPVPVLETYNTCDTPPPLNNLTPYRDDGKEALKFYTDPSYFFDLWKEKMLQDTKDIMKEKRKHRKEKKDNPNRGNVNPRKIKTRKEEWEKMKMGQEFVESKEKLGTSGYPPTLVYQNGSIGCVENVDASSYPPPPQSDSASSPSPSFSEDNLPPPPAEFSYPVDNQRGSGLAGPKRSSVVSPSHPPPAPPLGSPPGPKPGFAPPPAPPPPPPPMIGIPPPPPPVGFGSPGTPPPPSPPSFPPHPDFAAPPPPPPPPAADYPTLPPPPLSQPTGGAPPPPPPPPPPGPPPPPFTGADGQPAIPPPLSDTTKPKSSLPAVSDARSDLLSAIRQGFQLRRVEEQREQEKRDVVGNDVATILSRRIAVEYSDSEDDSSEFDEDDWSD

SEQ ID NO: 9052 - protein, 281 aa, Homo sapiens
MPLVTRNIEPRHLCRQTLPSVRSELECVTNITLANVIRQLGSLSKYAEDIFGELFTQANTFASRVSSLAERVDRLQVKVTQLDPKEEEVSLQGINTRKAFRSSTIQDQKLFDRNSLPVPVLETYNTCDTPPPLNNLTPYRDDGKEALKFYTDPSYFFDLWKEKMLQDTKDIMKEKRKHRKEKKDNPNRGNVNPRKIKTRKEEWEKMKMGQEFVESKEKLGTSGYPPTLVYQNGSIGCVENVDASSYPPPPQSDSASSPSPSFSEDNLPPPPAEFRFSAAQG

SEQ ID NO: 9053 - protein, 510 aa, Homo sapiens
MPVPPPPAPPPPPTFALANTEKPTLNKTEQAGRNALLSDISKGKKLKKTVTNDRSAPILDKPKGAGAGGGGGGFGGGGGFGGGGGGGGGGSFGGGGPPGLGGLFQAGMPKLRSTANRDNDSGGSRPPLLPPGGRSTSAKPFSPPSGPGRFPVPSPGHRSGPPEPQRNRMPPPRPDVGSKPDSIPPPVPSTPRPIQSSPHNRGSPPVPGGPRQPSPGPTPPPFPGNRGTALGGGSIRQSPLSSSSPFSNRPPLPPTPSRALDDKPPPPPPPVGNRPSIHREAVPPPPPQNNKPPVPSTPRPSASSQAPPPPPPPSRPGPPPLPPSSSGNDETPRLPQRNLSLSSSTPPLPSPGRSGPLPPPPSERPPPPVRDPPGRSGPLPPPPPVSRNGSTSRALPATPQLPSRSGVDSPRSGPRPPLPPDRPSAGAPPPPPPSTSIRNGFQDSPCEDEWESRFYFHPISDLPPPEPYVQTTKSYPSKLARNESRSGSNRRERGAPPLPPIPRPPKQAAE

SEQ ID NO: 9054 - protein, 503 aa, Homo sapiens
MPVPPPPAPPPPPTFALANTEKPTLNKTEQAGRNALLSDISKGKKLKKTVTNDRSAPILDKPKGAGAGGGGGGFGGGGGFGGGGGGGGGGSFGGGGPPGLGGLFQAGMPKLRSTANRDNDSGGSRPPLLPPGGRSTSAKPFSPPSGPGRFPVPSPGHRSGPPEPQRNRMPPPRPDVGSKPDSIPPPVPSTPRPIQSSPHNRGSPPVPGGPRQPSPGPTPPPFPGNRGTALGGGSIRQSPLSSSSPFSNRPPLPPTPSRALDDKPPPPPPPVGNRPSIHREAVPPPPPQNNKPPVPSTPRPSASSQAPPPPPPPSRPGPPPLPPSSSGNDETPRLPQRNLSLSSSTPPLPSPGRSGPLPPPPSERPPPPVRDPPGRSGPLPPPPPVSRNGSTSRALPATPQLPSRSGVDSPRSGPRPPLPPDRPSAGAPPPPPPSTSIRNGFQDSPCEDEWESRFYFHPISDLPPPEPYVQTTKSYPSKLARNESRSGSNRRERGAPPLPPIPR

SEQ ID NO: 9055 - protein, 503 aa, Homo sapiens; identical to SEQ ID NO: 9054

SEQ ID NO: 9056 - protein, 503 aa, Homo sapiens; identical to SEQ ID NO: 9054

SEQ ID NO: 9057 - protein, 359 aa, Homo sapiens
MPVPPPPAPPPPPTFALANTEKPTLNKTEQAGRNALLSDISKGKKLKKTVTNDRSAPILDKPKGAGAGGGGGGFGGGGGFGGGGGGGGGGSFGGGGPPGLGGLFQAGMPKLRSTANRDNDSGGSRPPLLPPGGRSTSAKPFSPPSGPGRFPVPSPGHRSGPPEPQRNRMPPPRPDVGSKPDSIPPPVPSTPRPIQSSPHNRGSPPVPGGPRQPSPGPTPPPPPPVRDPPGRSGPLPPPPPVSRNGSTSRALPATPQLPSRSGVDSPRSGPRPPLPPDRPSAGAPPPPPPSTSIRNGFQDSPCEDEWESRFYFHPISDLPPPEPYVQTTKSYPSKLARNESRSGSNRRERGAPPLPPIPR

SEQ ID NO: 9058 - protein, 493 aa, Homo sapiens
MPVPPPPAPPPPPTFALANTEKPTLNKTEQAGRNALLSDISKGKKLKKTVTNDRSAPILDKPKGAGAGGGGGGFGGGGGFGGGGGGGGGGSFGGGGPPGLGGLFQAGMPKLRSTANRDNDSGGSRPPLLPPGGRSTSAKPFSPPSGPGRFPVPSPGHRSGPPEPQRNRMPPPRPDVGSKPDSIPPPVPSTPRPIQSSPHNRGSPPVPGGPRQPSPGPTPPPFPGNRGTALGGGSIRQSPLSSSSPFSNRPPLPPTPSRALDDKPPPPPPPVGNRPSIHREAVPPPPPQNNKPPVPSTPRPSASSQAPPPPPPPSRPGPPPLPPSSSGNDETPRLPQRNLSLSSSTPPLPSPGRSGPLPPPPSERPPPPVRDPPGRSGPLPPPPPVSRNGSTSRALPATPQLPSRSGVDSPRSGPRPPLPPDRPSAGAPPPPPPSTSIRNGFQDSPCEDEWESRFYFHPISDLPPPEPYVQTTKSYPSKLARNESRSEYFCQGF

SEQ ID NO: 9059 - protein, 100 aa, Homo sapiens
MPVPPPPAPPPPPTFALANTEKPTLNKTEQAGRNALLSDISKGKKLKKTVTNDRSAPILDKPKGAGAGGGGGGFGGGGGFGGGGGGGGGGSFGGGGPPGL

SEQ ID NO: 9060 - protein, 548 aa, Homo sapiens
MKTLETQPLAPDCCPSDQDPAPAHPSPHASPMNKNADSELMPPPPERGDPPRLSPDPVAGSAVSQELREGDPVSLSTPLETEFGSPSELSPRIEEQELSENTSLPAEEANGSLSEEEANGPELGSGKAMEDTSGEPAAEDEGDTAWNYSFSQLPRFLSGSWSEFSTQPENFLKGCKWAPDGSCILTNSADNILRIYNLPPELYHEGEQVEYAEMVPVLRMVEGDTIYDYCWYSLMSSAQPDTSYVASSSRENPIHIWDAFTGELRASFRAYNHLDELTAAHSLCFSPDGSQLFCGFNRTVRVFSTARPGRDCEVRATFAKKQGQSGIISCIAFSPAQPLYACGSYGRSLGLYAWDDGSPLALLGGHQGGITHLCFHPDGNRFFSGARKDAELLCWDLRQSGYPLWSLGREVTTNQRIYFDLDPTGQFLVSGSTSGAVSVWDTDGPGNDGKPEPVLSFLPQKDCTNGVSLHPSLPLLATASGQRVFPEPTESGDEGEELGLPLLSTRHVHLECRLQLWWCGGAPDSSIPDDHQGEKGQGGTEGGVGELI

SEQ ID NO: 9061 - protein, 548 aa, Homo sapiens; identical to SEQ ID NO: 9060

SEQ ID NO: 9062 - protein, 548 aa, Homo sapiens; identical to SEQ ID NO: 9060

SEQ ID NO: 9063 - protein, 188 aa, Homo sapiens
MKTLETQPLAPDCCPSDQDPAPAQPDTSYVASSSRENPIHIWDAFTGELRASFRAYNHLDELTAAHSLCFSPDGSQLFCGFNRTVRVFSTARPGRDCEVRATFGKHLCLQGRRRGKGTATCTGAFCEPGATCGGSRRPLYGPGSRCSPVGRGANRLRAGRKPSQGQPAGQRTASFLNSYPVSCGAFGL

SEQ ID NO: 9064 - protein, 548 aa, Homo sapiens; identical to SEQ ID NO: 9060

SEQ ID NO: 9065 - protein, 432 aa, Homo sapiens
MDTEKSGKREFDVRQTPQVNINPFTPDSLLLHSSGQCRRRKRTYWNDSCGEDMEASDYELEDETRPAKRITITESNMKSRYTTEFHELEKIGSGEFGSVFKCVKRLDGCIYAIKRSKKPLAGSVDEQNALREVYAHAVLGQHSHVVRYFSAWAEDDHMLIQNEYCNGGSLADAISENYRIMSYFKEAELKDLLLQVGRGLRYIHSMSLVHMDIKPSNIFISRTSIPNAASEEGDEDDWASNKVMFKIGDLGHVTRISSPQVEEGDSRFLANEVLQENYTHLPKADIFALALTVVCAAGAEPLPRNGDQWHEIRQGRLPRIPQVLSQEFTELLKVMIHPDPERRPSAMALVKHSVLLSASRKSAEQLRIELNAEKFKNSLLQKELKKAQMAKAAAEERALFTDRMATRSTTQSNRTSRLIGKKMNRSVSLTIY

SEQ ID NO: 9066 - protein, 646 aa, Homo sapiens
MSFLSRQQPPPPRRAGAACTLRQKLIFSPCSDCEEEEEEEEEEGSGHSTGEDSAFQEPDSPLPPARSPTEPGPERRRSPGPAPGSPGELEEDLLLPGACPGADEAGGGAEGDSWEEEGFGSSSPVKSPAAPYFLGSSFSPVRCGGPGDASPRGCGARRAGEGRRSPRPDHPGTPPHKTFRKLRLFDTPHTPKSLLSKARGIDSSSVKLRGSSLFMDTEKSGKREFDVRQTPQVNINPFTPDSLLLHSSGQCRRRKRTYWNDSCGEDMEASDYELEDETRPAKRITITESNMKSRYTTEFHELEKIGSGEFGSVFKCVKRLDGCIYAIKRSKKPLAGSVDEQNALREVYAHAVLGQHSHVVRYFSAWAEDDHMLIQNEYCNGGSLADAISENYRIMSYFKEAELKDLLLQVGRGLRYIHSMSLVHMDIKPSNIFISRTSIPNAASEEGDEDDWASNKVMFKIGDLGHVTRISSPQVEEGDSRFLANEVLQENYTHLPKADIFALALTVVCAAGAEPLPRNGDQWHEIRQGRLPRIPQVLSQEFTELLKVMIHPDPERRPSAMALVKHSVLLSASRKSAEQLRIELNAEKFKNSLLQKELKKAQMAKAAAEERALFTDRMATRSTTQSNRTSRLIGKKMNRSVSLTIY

SEQ ID NO: 9067 - protein, 517 aa, Homo sapiens
LQDPASTCVPEPASQHTLRSGPGCLQQPEQQGVRDPGGIWAKLGAAEASAERLQGRRSRGASGSEPQQMGSDVRDLNALLPAVPSLGGGGGCALPVSGAAQWAPVLDFAPPGASAYGSLGGPAPPPAPPPPPPPPPHSFIKQEPSWGGAEPHEEQCLSAFTVHFSGQFTGTAGACRYGPFGPPPPSQASSGQARMFPNAPYLPSCLESQPAIRNQGYSTVTFDGTPSYGHTPSHHAAQFPNHSFKHEDPMGQQGSLGEQQYSVPPPVYGCHTPTDSCTGSQALLLRTPYSSDNLYQMTSQLECMTWNQMNLGATLKGVAAGSSSSVKWTEGQSNHSTGYESDNHTTPILCGAQYRIHTHGVFRGIQDVRRVPGVAPTLVRSASETSEKRPFMCAYPGCNKRYFKLSHLQMHSRKHTGEKPYQCDFKDCERRFSRSDQLKRHQRRHTGVKPFQCKTCQRKFSRSDHLKTHTRTHTGKTSEKPFSCRWPSCQKKFARSDELVRHHNMHQRNMTKLQLAL

SEQ ID NO: 9068 - protein, 317 aa, Homo sapiens
LQDPASTCVPEPASQHTLRSGPGCLQQPEQQGVRDPGGIWAKLGAAEASAERLQGRRSRGASGSEPQQMGSDVRDLNALLPAVPSLGGGGGCALPVSGAAQWAPVLDFAPPGASAYGSLGGPAPPPAPPPPPPPPPHSFIKQEPSWGGAEPHEEQCLSAFTVHFSGQFTGTAGACRYGPFGPPPPSQASSGQARMFPNAPYLPSCLESQPAIRNQGYSTVTFDGTPSYGHTPSHHAAQFPNHSFKHEDPMGQQGSLGEQQYSVPPPVYGCHTPTDSCTGSQALLLRTPYSSDNLYQMTSQLECMTWNQMNLGATLKG

SEQ ID NO: 9069 - protein, 302 aa, Homo sapiens
MEKGYSTVTFDGTPSYGHTPSHHAAQFPNHSFKHEDPMGQQGSLGEQQYSVPPPVYGCHTPTDSCTGSQALLLRTPYSSDNLYQMTSQLECMTWNQMNLGATLKGVAAGSSSSVKWTEGQSNHSTGYESDNHTTPILCGAQYRIHTHGVFRGIQDVRRVPGVAPTLVRSASETSEKRPFMCAYPGCNKRYFKLSHLQMHSRKHTGEKPYQCDFKDCERRFSRSDQLKRHQRRHTGVKPFQCKTCQRKFSRSDHLKTHTRTHTGEKPFSCRWPSCQKKFARSDELVRHHNMHQRNMTKLQLAL

SEQ ID NO: 9070 - protein, 514 aa, Homo sapiens
LQDPASTCVPEPASQHTLRSGPGCLQQPEQQGVRDPGGIWAKLGAAEASAERLQGRRSRGASGSEPQQMGSDVRDLNALLPAVPSLGGGGGCALPVSGAAQWAPVLDFAPPGASAYGSLGGPAPPPAPPPPPPPPPHSFIKQEPSWGGAEPHEEQCLSAFTVHFSGQFTGTAGACRYGPFGPPPPSQASSGQARMFPNAPYLPSCLESQPAIRNQGYSTVTFDGTPSYGHTPSHHAAQFPNHSFKHEDPMGQQGSLGEQQYSVPPPVYGCHTPTDSCTGSQALLLRTPYSSDNLYQMTSQLECMTWNQMNLGATLKGVAAGSSSSVKWTEGQSNHSTGYESDNHTTPILCGAQYRIHTHGVFRGIQDVRRVPGVAPTLVRSASETSEKRPFMCAYPGCNKRYFKLSHLQMHSRKHTGEKPYQCDFKDCERRFSRSDQLKRHQRRHTGVKPFQCKTCQRKFSRSDHLKTHTRTHTGEKPFSCRWPSCQKKFARSDELVRHHNMHQRNMTKLQLAL

SEQ ID NO: 9071 - protein, 497 aa, Homo sapiens
LQDPASTCVPEPASQHTLRSGPGCLQQPEQQGVRDPGGIWAKLGAAEASAERLQGRRSRGASGSEPQQMGSDVRDLNALLPAVPSLGGGGGCALPVSGAAQWAPVLDFAPPGASAYGSLGGPAPPPAPPPPPPPPPHSFIKQEPSWGGAEPHEEQCLSAFTVHFSGQFTGTAGACRYGPFGPPPPSQASSGQARMFPNAPYLPSCLESQPAIRNQGYSTVTFDGTPSYGHTPSHHAAQFPNHSFKHEDPMGQQGSLGEQQYSVPPPVYGCHTPTDSCTGSQALLLRTPYSSDNLYQMTSQLECMTWNQMNLGATLKGHSTGYESDNHTTPILCGAQYRIHTHGVFRGIQDVRRVPGVAPTLVRSASETSEKRPFMCAYPGCNKRYFKLSHLQMHSRKHTGEKPYQCDFKDCERRFSRSDQLKRHQRRHTGVKPFQCKTCQRKFSRSDHLKTHTRTHTGEKPFSCRWPSCQKKFARSDELVRHHNMHQRNMTKLQLAL

SEQ ID NO: 9072 - protein, 131 aa, Homo sapiens
MGQQGSLGEQQYSVPPPVYGCHTPTDSCTGSQALLLRTPYSSDNLYQMTSQLECMTWNQMNLGATLKGVAAGSSSSVKWTEGQSNHSTGYESDNHTTPILCGAQYRIHTHGVFRGIQDVRRVPGVAPTLVR

SEQ ID NO: 9073 - protein, 178 aa, Homo sapiens
  VARIANT 1: note = MOD_RES - Any amino acid
XLGATLKGVAAGSSSSVKWTEGQSNHSTGYESDNHTTPILCGAQYRIHTHGVFRGIQDVRRVPGVAPTLVRSASETSEKRPFMCAYPGCNKRYFKLSHLQMHSRKHTGVKPFQCKTCQRKFSRSDHLKTHTRTHTGKTSEKPFSCRWPSCQKKFARSDELVRHHNMHQRNMTKLQLAL

SEQ ID NO: 9074 - protein, 288 aa, Homo sapiens
MEKGYSTVTFDGTPSYGHTPSHHAAQFPNHSFKHEDPMGQQGSLGEQQYSVPPPVYGCHTPTDSCTGSQALLLRTPYSSDNLYQMTSQLECMTWNQMNLGATLKGHSTGYESDNHTTPILCGAQYRIHTHGVFRGIQDVRRVPGVAPTLVRSASETSEKRPFMCAYPGCNKRYFKLSHLQMHSRKHTGEKPYQCDFKDCERRFSRSDQLKRHQRRHTGVKPFQCKTCQRKFSRSDHLKTHTRTHTGKTSEKPFSCRWPSCQKKFARSDELVRHHNMHQRNMTKLQLAL

SEQ ID NO: 9075 - protein, 354 aa, Homo sapiens
MRARPQVCEALLFALALQTGVCYGIKWLALSKTPSALALNQTQHCKQLEGLVSAQVQLCRSNLELMHTVVHAAREVMKACRRAFADMRWNCSSIELAPNYLLDLERGTRESAFVYALSAAAISHAIARACTSGDLPGCSCGPVPGEPPGPGNRWGGCADNLSYGLLMGAKFSDAPMKVKKTGSQANKLMRLHNSEVGRQALRASLEMKCKCHGVSGSCSIRTCWKGLQELQDVAADLKTRYLSATKVVHRPMGTRKHLVPKDLDIRPVKDSELVYLQSSPDFCMKNEKVGSHGTQDRQCNKTSNGSDSCDLMCCGRGYNPYTDRVVERCHCKYHWCCYVTCRRCERTVERYVCK

SEQ ID NO: 9076 - protein, 253 aa, Homo sapiens
MRARPQVCEALLFALALQTGVCYGIKWLALSKTPSALALNQTQHCKQLEGLVSAQVQLCRSNLELMHTVVHAAREVMKACRRAFADMRWNCSSIELAPNYLLDLERGTRESAFVYALSAAAISHAIARACTSGDLPGCSCGPVPGEPPGPGNRWGGCADNLSYGLLMGAKFSDAPMKVKKTGSQANKLMRLHNSEVGRQALRASLLVNSRCQAWEAACALPSLGSHQEQKVWPPWKEGRTSKETDKIKNNLAA

SEQ ID NO: 9077 - protein, 5 aa, Homo sapiens
MRARP

SEQ ID NO: 9078 - protein, 380 aa, Homo sapiens
MKKSIGILSPGVALGMAGSAMSSKFFLVALAIFFSFAQVVIEANSWWSLGMNNPVQMSEVYIIGAQPLCSQLAGLSQGQKKLCHLYQDHMQYIGEGAKTGIKECQYQFRHRRWNCSTVDNTSVFGRVMQIGSRETAFTYAVSAAGVVNAMSRACREGELSTCGCSRAARPKDLPRDWLWGGCGDNIDYGYRFAKEFVDARERERIHAKGSYESARILMNLHNNEAGRRTVYNLADVACKCHGVSGSCSLKTCWLQLADFRKVGDALKEKYDSAAAMRLNSRGKLVQVNSRFNSPTTQDLVYIDPSPDYCVRNESTGSLGTQGRLCNKTSEGMDGCELMCCGRGYDQFKTVQTERCHCKFHWCCYVKCKKCTEIVDQFVCK

SEQ ID NO: 9079 - protein, 129 aa, Homo sapiens
MKKSIGILSPGVALGMAGSAMSSKFFLVALAIFFSFAQVVIEANSWWSLGMNNPVQMSQDVGGHGWLRAHVLRPWLRPVQDRADGALPLQVPLVLLRQVQEVHGDRGPVCVQVVGATQHSAPLPGPAYL

SEQ ID NO: 9080 - protein, 380 aa, Homo sapiens; identical to SEQ ID NO: 9078

SEQ ID NO: 9081 - protein, 214 aa, Homo sapiens
MAGSAMSSKFFLVALAIFFSFAQVVIEANSWWSLGMNNPVQMSEVYIIGAQPLCSQLAGLSQGQKKLCHLYQDHMQYIGEGAKTGIKECQYQFRHRRWNCSTVDNTSVFGRVMQIGSRETAFTYAVSAAGVVNAMSRACREGELSTCGCSRAARPKDLPRDWLWGGCGDNIDYGYRFAKEFVDARERERIHAKGSYESARILMNLHNNEAGRRV

SEQ ID NO: 9082 - protein, 365 aa, Homo sapiens
MAGSAMSSKFFLVALAIFFSFAQVVIEANSWWSLGMNNPVQMSEVYIIGAQPLCSQLAGLSQGQKKLCHLYQDHMQYIGEGAKTGIKECQYQFRHRRWNCSTVDNTSVFGRVMQIGSRETAFTYAVSAAGVVNAMSRACREGELSTCGCSRAARPKDLPRDWLWGGCGDNIDYGYRFAKEFVDARERERIHAKGSYESARILMNLHNNEAGRRTVYNLADVACKCHGVSGSCSLKTCWLQLADFRKVGDALKEKYDSAAAMRLNSRGKLVQVNSRFNSPTTQDLVYIDPSPDYCVRNESTGSLGTQGRLCNKTSEGMDGCELMCCGRGYDQFKTVQTERCHCKFHWCCYVKCKKCTEIVDQFVCK

SEQ ID NO: 9083 - protein, 291 aa, Homo sapiens
MQYIGEGAKTGIKECQYQFRHRRWNCSTVDNTSVFGRVMQIGSRETAFTYAVSAAGVVNAMSRACREGELSTCGCSRAARPKDLPRDWLWGGCGDNIDYGYRFAKEFVDARERERIHAKGSYESARILMNLHNNEAGRRTVYNLADVACKCHGVSGSCSLKTCWLQLADFRKVGDALKEKYDSAAAMRLNSRGKLVQVNSRFNSPTTQDLVYIDPSPDYCVRNESTGSLGTQGRLCNKTSEGMDGCELMCCGRGYDQFKTVQTERCHCKFHWCCYVKCKKCTEIVDQFVCK

SEQ ID NO: 9084 - protein, 359 aa, Homo sapiens
MPSLLLLFTAALLSSWAQLLTDANSWWSLALNPVQRPEMFIIGAQPVCSQLPGLSPGQRKLCQLYQEHMAYIGEGAKTGIKECQHQFRQRRWNCSTADNASVFGRVMQIGSRETAFTHAVSAAGVVNAISRACREGELSTCGCSRTARPKDLPRDWLWGGCGDNVEYGYRFAKEFVDAREREKNFAKGSEEQGRVLMNLQNNEAGRRAVYKMADVACKCHGVSGSCSLKTCWLQLAEFRKVGDRLKEKYDSAAAMRVTRKGRLELVNSRFTQPTPEDLVYVDPSPDYCLRNESTGSLGTQGRLCNKTSEGMDGCELMCCGRGYNQFKSVQVERCHCKFHWCCFVRCKKCTEIVDQYICK

SEQ ID NO: 9085 - protein, 359 aa, Homo sapiens; identical to SEQ ID NO: 9084

SEQ ID NO: 9086 - protein, 359 aa, Homo sapiens; identical to SEQ ID NO: 9084

SEQ ID NO: 9087 - protein, 505 aa, Homo sapiens
MSSVQQQPPPPRRVTNVGSLLLTPQENESLFTFLGKKCVTMSSAVVQLYAADRNCMWSKKCSGVACLVKDNPQRSYFLRIFDIKDGKLLWEQELYNNFVYNSPRGYFHTFAGDTCQVALNFANEEEAKKFRKAVTDLLGRRQRKSEKRRDPPNGPNLPMATVDIKNPEITTNRFYGPQVNNISHTKEKKKGKAKKKRLTKADIGTPSNFQHIGHVGWDPNTGFDLNNLDPELKNLFDMCGISEAQLKDRETSKVIYDFIEKTGGVEAVKNELRRQAPPPPPPSRGGPPPPPPPPHNSGPPPPPARGRGAPPPPPSRAPTAAPPPPPPSRPSVAVPPPPPNRMYPPPPPALPSSAPSGPPPPPPSVLGVGPVAPPPPPPPPPPPGPPPPPGLPSDGDHQVPTTAGNKAALLDQIREGAQLKKVEQNSRPVSCSGRDALLDQIRQGIQLKSVADGQESTPPTPAPTSGIVGALMEVMQKRSKAIHSSDEDEDEDDEEDFEDDDEWED

SEQ ID NO: 9088 - protein, 57 aa, Homo sapiens
MSSVQQQPPPPRRVTNVGSLLLTPQENESLFTFLGKKCVTMSSAVVQLYAADRNLSC

SEQ ID NO: 9089 - protein, 379 aa, Homo sapiens
MARRSAFPAAALWLWSILLCLLALRAEAGPPQEESLYLWIDAHQARVLIGFEEDILIVSEGKMAPFTHDFRKAQQRMPAIPVNIHSMNFTWQAAGQAEYFYEFLSLRSLDKGIMADPTVNVPLLGTVPHKASVVQVGFPCLGKQDGVAAFEVDVIVMNSEGNTILQTPQNAIFFKTCQQAECPGGCRNGGFCNERRICECPDGFHGPHCEKALCTPRCMNGGLCVTPGFCICPPGFYGVNCDKANCSTTCFNGGTCFYPGKCICPPGLEGEQCEISKCPQPCRNGGKCIGKSKCKCSKGYQGDLCSKPVCEPGCGAHGTCHEPNKCQCQEGWHGRHCNKRYEASLIHALRPAGAQLRQHTPSLKKAEERRDPPESNYIW

SEQ ID NO: 9090 - protein, 39 aa, Homo sapiens
KKRKEKKREKRRGKERKELFKLVSHVLENRMGWQHLKWM

SEQ ID NO: 9091 - protein, 364 aa, Homo sapiens
MARASEAVSRILEEWHKAKVEAMTLDLALLRSVQHFAEAFKAKNVPLHVLVCNAATFALPWSLTKDGLETTFQVNHLGHFYLVQLLRMFCAAQLLPVSLWSPQSPIDLQILTTPWENWTSVASLQQKTTIGRCWLITGPSSATSSSPTSCTVAPTRGHVERSASWKYDVLQHSSQLVGVHTAVYLGEAFHQVHATGSCHHRVLCCCPRTGGSGRDVLQQLLPLHALTRSSERRDGPDPVGSERLIQERLASPAKWSSERMGTHTRPVCVPSRKCQGPLPNVPPTQIRKSKGNKSSHNRVKNLKYQWEAGNSWGKVSLFWGWARHRSLCFLVVACLKVKTCLVCRFRISLEKHQQFSFFYCYRIA

SEQ ID NO: 9092 - protein, 189 aa, Homo sapiens
MAALRYAGLDDTDSEDELPPGWEERTTKDGWVYYANHTEEKTQWEHPKTGKRKRVAGDLPYGWEQETDENGQVFFVDHINKRTTYLDPRLAFTVDDNPTKPTTRQRYDGSTTAMEILQGRDFTGKVVVVTGANSGIGFETAKSFALHGAHVILACRNMARASEAVSRILEEWKTKYHPPPEKCRIKIFH

SEQ ID NO: 9093 - protein, 311 aa, Homo sapiens
MAALRYAGLDDTDSEDELPPGWEERTTKDGWVYYANHTEEKTQWEHPKTGKRKRVAGDLPYGWEQETDENGQVFFVDHINKRTTYLDPRLAFTVDDNPTKPTTRQRYDGSTTAMEILQGRDFTGKVVVVTGANSGIATGSCHHRVLCCCPRTGGSGRDVLQQLLPLHALTRSSERRDGPDPVGAQREADPRTAWQPVRLSGAQSGWAHTPALCVSPHASARAGPLPNVPPTQIRKSKGNKSSHNRVKNLKYQWEAGNSWGKVSLFWGWARHRSLCFLVVACLKVKTCLVCRFRISLEKHQQFSFFYCYRIA

SEQ ID NO: 9094 - protein, 234 aa, Homo sapiens
MAALRYAGLDDTDSEDELPPGWEERTTKDGWVYYANHTEEKTQWEHPKTGKRKRVAGDLPYGWEQETDENGQVFFVDHINKRTTYLDPRLAFTVDDNPTKPTTRQRYDGSTTAMEILQGRDFTGKVVVVTGANSGIGFETAKSFALHGAHVILACRNMARASEAVSRILEEWQQGAATTVYCAAVPELEGLGGMYFNNCCRCMPSPEAQSEETARTLWALSERLIQERLGSQSG

SEQ ID NO: 9095 - protein, 414 aa, Homo sapiens
MAALRYAGLDDTDSEDELPPGWEERTTKDGWVYYANHTEEKTQWEHPKTGKRKRVAGDLPYGWEQETDENGQVFFVDHINKRTTYLDPRLAFTVDDNPTKPTTRQRYDGSTTAMEILQGRDFTGKVVVVTGANSGIGFETAKSFALHGAHVILACRNMARASEAVSRILEEWHKAKVEAMTLDLALLRSVQHFAEAFKAKNVPLHVLVCNAATFALPWSLTKDGLETTFQVNHLGHFYLVQLLQDVLCRSAPARVIVVSSESHRFTDINDSLGKLDFSRLSPTKNDYWAMLAYNRSKLCNILFSNELHRRLSPRGVTSNAVHPGNMMYSNIHRSWWVYTLLFTLARPFTKSMQQGAATTVYCAAVPELEGLGGMYFNNCCRCMPSPEAQSEETARTLWALSERLIQERLGSQSG

SEQ ID NO: 9096 - protein, 213 aa, Homo sapiens
MAALRYAGLDDTDSEDELPPGWEERTTKDGWVYYANHTEEKTQWEHPKTGKRKRVAGDLPYGWEQETDENGQVFFVDHINKRTTYLDPRLAFTVDDNPTKPTTRQRYDGSTTAMEILQGRDFTGKVVVVTGANSGIGKASCHVGRILKHTRVEELSLLPTAINRELPPPCTVLLSQNWRVWEGCTSTTAAAACPHQKLRAKRRPGPCGRSARG

SEQ ID NO: 9097 - protein, 414 aa, Homo sapiens; identical to SEQ ID NO: 9095

SEQ ID NO: 9098 - protein, 36 aa, Homo sapiens
MAALRYAGLDDTDSEDELPPGWEERTTKDGWVYYAK

SEQ ID NO: 9099 - protein, 261 aa, Homo sapiens
MVVVAAAPNPADGTPKVLLLSGQPASAAGAPAGQALPLMVPAQRGASPEAASGGLPQARKRQRLTHLSPEEKALRRKLKNRVAAQTARDRKKARMSELEQQVVDLEEENQKLLLENQLLREKTHGLVVENQELRQRLGMDALVAEEEAEAKGNEVRPVAGSAESAALRLRAPLQQVQAQLSPLQNISPWILAVLTLQIQSLISCWAFWTTWTQSCSSNALPQSLPAWRSSQRSTQKDPVPYQPPFLCQWGRHQPSWKPLMN

SEQ ID NO: 9100 - protein, 376 aa, Homo sapiens
MVVVAAAPNPADGTPKVLLLSGQPASAAGAPAGQALPLMVPAQRGASPEAASGGLPQARKRQRLTHLSPEEKALRRKLKNRVAAQTARDRKKARMSELEQQVVDLEEENQKLLLENQLLREKTHGLVVENQELRQRLGMDALVAEEEAEAKGNEVRPVAGSAESAAGAGPVVTPPEHLPMDSGGIDSSDSESDILLGILDNLDPVMFFKCPSPEPASLEELPEVYPEGPSSLPASLSLSVGTSSAKLEAINELIRFDHIYTKPLVLEIPSETESQANVVVKIEEAPLSPSENDHPEFIVSVKEEPVEDDLVPELGISNLLSSSHCPKPSSCLLDAYSDCGYGGSLSPFSDMSSLLGVNHSWEDTFANELFPQLISV

SEQ ID NO: 9101 - protein, 266 aa, Homo sapiens
MVVVAAAPNPADGTPKVLLLSGQPASAAGAPAGQALPLMVPAQRGASPEAASGGLPQARKRQRLTHLSPEEKALRRKLKNRVAAQTARDRKKARMSELEQQVVDLEEEVKLLKNQKLLLENQLLREKTHGLVVENQELRQRLGMDALVAEEEAEAKGNEVRPVAGSAESAALRLRAPLQQVQAQLSPLQNISPWILAVLTLQIQSLISCWAFWTTWTQSCSSNALPQSLPAWRSSQRSTQKDPVPYQPPFLCQWGRHQPSWKPLMN

SEQ ID NO: 9102 - protein, 211 aa, Homo sapiens
MRAPVFQALLLCGRRLVVQPLNSDMRKLKNRVAAQTARDRKKARMSELEQQVVDLEEENQKLLLENQLLREKTHGLVVENQELRQRLGMDALVAEEEAEAKGNEVRPVAGSAESAALRLRAPLQQVQAQLSPLQNISPWILAVLTLQIQSLISCWAFWTTWTQSCSSNALPQSLPAWRSSQRSTQKDPVPYQPPFLCQWGRHQPSWKPLMN

SEQ ID NO: 9103 - protein, 273 aa, Homo sapiens
MAAADGALPEAAALEQPAELPASVRASIERKRQRALMLRQARLAARPYSATAAAATGGMANVKAAPKIIDTGGGFILEEEEEEEQKIGKVVHQPGPVMEFDYVICEECGKEFMDSYLMNHFDLPTCDNCRDADDKHKLITKTEAKQEYLLKDCDLEKREPPLKFIVKKNPHHSQWGDMKLYLKLQIVKRSLEVWGSQEALEEAKEVRQENREKMKQKKFDKKVKELRRAVRSSVWKRETIVHQHEYGPEENLEDDMYRKTCTMCGHELTYEKM

SEQ ID NO: 9104 - protein, 940 aa, Homo sapiens
MARKRAAGGEPRGRELRSQKSKAKSKARREEEEEDAFEDEKPPKKSLLSKVSQGKRKRGCSHPGGSADGPAKKKVAKVTVKSENLKVIKDEALSDGDDLRDFPSDLKKAHHLKRGATMNEDSNEEEEESENDWEEVEELSEPVLGDVRESTAFSRSLLPVKPVEIEIETPEQAKTRERSEKIKLEFETYLRRAMKRFNKGVHEDTHKVHLLCLLANGFYRNNICSQPDLHAIGLSIIPARFTRVLPRDVDTYYLSNLVKWFIGTFTVNAELSASEQDNLQTTLERRFAIYSARDDEELVHIFLLILRALQLLTRLVLSLQPIPLKSATAKGKKPSKERLTADPGGSSETSSQVLENHTKPKTSKGTKQEETFAKGTCRPSAKGKRNKGGRKKRSKPSSSEEDEGPGDKQEKATQRRPHGRERRVASRVSYKEESGSDEAGSGSDFELSSGEASDPSDEDSEPGPPKQRKAPAPQRTKAGSKSASRTHRGSHRKDPSLPAASSSSSSSKRGKKMCSDGEKAEKRSIAGIDQWLEVFCEQEEKWVCVDCVHGVVGQPLTCYKYATKPMTYVVGIDSDGWVRDVTQRYDPVWMTVTRKCRVDAEWWAETLRPYQSPFMDREKKEDLEFQAKHMDQPLPTAIGLYKNHPLYALKRHLLKYEAIYPETAAILGYCRGEAVYSRDCVHTLHSRDTWLKKARVVRLGEVPYKMVKGFSNRARKARLAEPQLREENDLGLFGYWQTEEYQPPVAVDGKVPRNEFGNVYLFLPSMMPIGCVQLNLPNLHRVARKLDIDCVQAITGFDFHGGYSHPVTDGYIVCEEFKDVLLTAWENEQAVIERKEKEKKEKRALGNWKLLAKGLLIRERLKRRYGPKSEAAAPHTDAGGGLSSDEEEGTSSQAEAARILAASWPQNREDEEKQKLKGGPKKTKREKKAAASHLFPFEQL

SEQ ID NO: 9105 - protein, 903 aa, Homo sapiens
MARKRAAGGEPRGRELRSQKSKAKSKARREEEEEDAFEDEKPPKKSLLSKVSQGKRKRGCSHPGGSADGPAKKKVAKVTVKSENLKVIKDEALSDGDDLRDFPSDLKKAHHLKRGATMNEDSNEEEEESENDWEEAKTRERSEKIKLEFETYLRRAMKRFNKGVHEDTHKVHLLCLLANGFYRNNICSQPDLHAIGLSIIPARFTRVLPRDVDTYYLSNLVKWFIGTFTVNAELSASEQDNLQTTLERRFAIYSARDDEELVHIFLLILRALQLLTRLVLSLQPIPLKSATAKGKKPSKERLTADPGGSSETSSQVLENHTKPKTSKGTKQEETFAKGTCRPSAKGKRNKGGRKKRSKPSSSEEDEGPGDKQEKATQRRPHGRERRVASRVSYKEESGSDEAGSGSDFELSSGEASDPSDEDSEPGPPKQRKAPAPQRTKAGSKSASRTHRGSHRKDPSLPAASSSSSSSKRGKKMCSDGEKAEKRSIAGIDQWLEVFCEQEEKWVCVDCVHGVVGQPLTCYKYATKPMTYVVGIDSDGWVRDVTQRYDPVWMTVTRKCRVDAEWWAETLRPYQSPFMDREKKEDLEFQAKHMDQPLPTAIGLYKNHPLYALKRHLLKYEAIYPETAAILGYCRGEAVYSRDCVHTLHSRDTWLKKARVVRLGEVPYKMVKGFSNRARKARLAEPQLREENDLGLFGYWQTEEYQPPVAVDGKVPRNEFGNVYLFLPSMMPIGCVQLNLPNLHRVARKLDIDCVQAITGFDFHGGYSHPVTDGYIVCEEFKDVLLTAWENEQAVIERKEKEKKEKRALGNWKLLAKGLLIRERLKRRYGPKSEAAAPHTDAGGGLSSDEEEGTSSQAEAARILAASWPQNREDEEKQKLKGGPKKTKREKKAAASHLFPFEQL

SEQ ID NO: 9106 - protein, 140 aa, Homo sapiens
MARKRAAGGEPRGRELRSQKSKAKSKARREEEEEDAFEDEKPPKKSLLSKVSQGKRKRGCSHPGGSADGPAKKKVAKVTVKSENLKVIKDEALSDGDDLRDFPSDLKKAHHLKRGATMNEDSNEEEEESENDWEEVEVKR

SEQ ID NO: 9107 - protein, 168 aa, Homo sapiens
MARKRAAGGEPRGRELRSQKSKAKSKARHAFEDEKPPKKSLLSKVSQGKRKRGCSHPGGSADGPAKKKVAKVTVKSENLKVIKDEALSDGDDLRDFPSDLKKAHHLKRGATMNEDSNEEEEESENDWEEVEELSEPVLGDVRESTAFSRSLLPVKPVEIEIETPEQAK

SEQ ID NO: 9108 - protein, 153 aa, Homo sapiens
SSSKRGKKMCSDGEKAEKRSIAGIDQWLEVFCEQEEKWVCVDCVHGVVGQPLTCYKYATKPMTYVVGIDSDGWVRDVTQRYDPVWMTVTRKCRVDAEWWAETLRPYQSPFMDREKKEDLEGLCAHSAFQGHVAEESKSGEAWRSTLQDGERLF

SEQ ID NO: 9109 - protein, 58 aa, Homo sapiens
MCSDGEKAEKRSIAGIDQWLEVFCEQEEKWVCVDCRCGGPASDLLQVRHQAHDLCGGH

SEQ ID NO: 9110 - protein, 76 aa, Homo sapiens
KATQRRPHGRERRVASRVSYKEESGSDEAGSGSDFELSSGEASDPSDEDSEPGPPKQRKAPAPQRTKAGSKSASRT

SEQ ID NO: 9111 - protein, 282 aa, Homo sapiens
MEGDFSVCRNCKRHVVSANFTLHEAYCLRFLVLCPECEEPVPKETMEEHCKLEHQQANECQERPVECKFCKLDMQLSKLELHESYCGSRTELCQGCGQFIMHRMLAQHRDVCRSEQAQLGKGERISAPEREIYCHYCNQMIPENKYFHHMGKCCPDSEFKKHFPVGNPEILPSSLPSQAAENQTSTMEKDVRPKTRSINRFPLHSESSSKKAPRSKNKTLDPLLMSEPKPRTSSPRGDKAAYDILRRCSQCGILLPLPILNQHQEKCRWLASSKGKQVRNFS

SEQ ID NO: 9112 - protein, 301 aa, Homo sapiens
MEGDFSVCRNCKRHVVSANFTLHEAYCLRFLVLCPECEEPVPKETMEEHCKLEHQQVGCTMCQQSMQKSSLEFHKANECQERPVECKFCKLDMQLSKLELHESYCGSRTELCQGCGQFIMHRMLAQHRDVCRSEQAQLGKGERISAPEREIYCHYCNQMIPENKYFHHMGKCCPDSEFKKHFPVGNPEILPSSLPSQAAENQTSTMEKDVRPKTRSINRFPLHSESSSKKAPRSKNKTLDPLLMSEPKPRTSSPRGDKAAYDILRRCSQCGILLPLPILNQHQEKCRWLASSKGKQVRNFS

SEQ ID NO: 9113 - protein, 199 aa, Homo sapiens
MSLHYGCCCPECTSVAIKEMMWVIRPRVACVVKDAGSAGERISAPEREIYCHYCNQMIPENKYFHHMGKCCPDSEFKKHFPVGNPEILPSSLPSQAAENQTSTMEKDVRPKTRSINRFPLHSESSSKKAPRSKNKTLDPLLMSEPKPRTSSPRGDKAAYDILRRCSQCGILLPLPILNQHQEKCRWLASSKGKQVRNFS

SEQ ID NO: 9114 - protein, 164 aa, Homo sapiens
MEGDFSVCRNCKRHVVSANFTLHEAYCLRFLVLCPECEEPVPKETMEEHCKLEHQQVGCTMCQQSMQKSSLEFHKANECQERPVECKFCKLDMQLSKLELHESYCGSRTELCQGCGQFIMHRMLAQHRDVCRSEQAQLGKETSPDPGKCLSITVAAALSAHLWP

SEQ ID NO: 9115 - protein, 301 aa, Homo sapiens
MEGDFSVCRNCKRHVVSANFTLHEAYCLRFLVLCPECEEPVPKETMEEHCKLEHQQVSEMGSGRGKCSILPARKKANECQERPVECKFCKLDMQLSKLELHESYCGSRTELCQGCGQFIMHRMLAQHRDVCRSEQAQLGKGERISAPEREIYCHYCNQMIPENKYFHHMGKCCPDSEFKKHFPVGNPEILPSSLPSQAAENQTSTMEKDVRPKTRSINRFPLHSESSSKKAPRSKNKTLDPLLMSEPKPRTSSPRGDKAAYDILRRCSQCGILLPLPILNQHQEKCRWLASSKGKQVRNFS

SEQ ID NO: 9116 - protein, 497 aa, Homo sapiens
MTFNSFEGSKTCVPADINKEEEFVEEFNRLKTFANFPSGSPVSASTLARAGFLYTGEGDTVRCFSCHAAVDRWQYGDSAVGRHRKVSPNCRFINGFYLENSATQSTNSGIQNGQYKVENYLGSRDHFALDRPSETHADYLLRTGQVVDISDTIYPRNPAMYSEEARLKSFQNWPDYAHLTPRELASAGLYYTGIGDQVQCFCCGGKLKNWEPCDRAWSEHRRHFPNCFFVLGRNLNIRSESDAVSSDRNFPNSTNLPRNPSMADYEARIFTFGTWIYSVNKEQLARAGFYALGEGDKVKCFHCGGGLTDWKPSEDPWEQHAKWYPGCKYLLEQKGQEYINNIHLTHSLEECLVRTTEKTPSLTRRIDDTIFQNPMVQEAIRMGFSFKDIKKIMEEKIQISGSNYKSLEVLVADLVNAQKDSMQDESSQTSLQKEISTEEQLRRLQEEKLCKICMDRNIAIVFVPCGHLVTCKQCAEAVDKCPMCYTVITFKQKIFMS

SEQ ID NO: 9117 - protein, 497 aa, Homo sapiens; identical to SEQ ID NO: 9116

SEQ ID NO: 9118 - protein, 16 aa, Homo sapiens
MTFNSFEGSKTCVPAD

SEQ ID NO: 9119 - protein, 156 aa, Homo sapiens
MTFNSFEGSKTCVPADINKEEEFVEEFNRLKTFANFPSGSPVSASTLARAGFLYTGEGDTVRCFSCHAAVDRWQYGDSAVGRHRKVSPNCRFINGFYLENSATQSTNSGIQNGQYKVENYLGSRDHFALDRPSETHADYLLRTGQVVDISDTIYPR

SEQ ID NO: 9120 - protein, 497 aa, Homo sapiens; identical to SEQ ID NO: 9116

SEQ ID NO: 9121 - protein, 855 aa, Homo sapiens
MVVMARLSRPERPDLVFEEEDLPYEEEIMRNQFSVKCWLRYIEFKQGAPKPRLNQLYERALKLLPCSYKLWYRYLKARRAQVKHRCVTDPAYEDVNNCHERAFVFMHKMPRLWLDYCQFLMDQGRVTHTRRTFDRALRALPITQHSRIWPLYLRFLRSHPLPETAVRGYRRFLKLSPESAEEYIEYLKSSDRLDEAAQRLATVVNDERFVSKAGKSNYQLWHELCDLISQNPDKVQSLNVDAIIRGGLTRFTDQLGKLWCSLADYYIRSGHFEKARDVYEEAIRTVMTVRDFTQVFDSYAQFEESMIAAKMETASELGREEEDDVDLELRLARFEQLISRRPLLLNSVLLRQNPHHVHEWHKRVALHQGRPREIINTYTEAVQTVDPFKATGKPHTLWVAFAKFYEDNGQLDDARVILEKATKVNFKQVDDLASVWCQCGELELRHENYDEALRLLRKATALPARRAEYFDGSEPVQNRVYKSLKVWSMLADLEESLGTFQSTKAVYDRILDLRIATPQIVINYAMFLEEHKYFEESFKAYERGISLFKWPNVSDIWSTYLTKFIARYGGRKLERARDLFEQALDGCPPKYAKTLYLLYAQLEEEWGLARHAMAVYERATRAVEPAQQYDMFNIYIKRAAEIYGVTHTRGIYQKAIEVLSDEHAREMCLRFADMECKLGEIDRARAIYSFCSQICDPRTTGAFWQTWKDFEVRHGNEDTIKEMLRIRRSVQATYNTQVNFMASQMLKVSGSATGTVSDLAPGQSGMDDMKLLEQRAEQLAAEAERDQPLRAQSKILFVRSDASREELAELAQQVNPEEIQLGEDEDEDEMDLEPNEVRLEQQSVPAAVFGSLKED

SEQ ID NO: 9122 - protein, 852 aa, Homo sapiens [sequence omitted]

SEQ ID NO: 9123 - protein, 633 aa, Homo sapiens
MPEIRLRHVVSCSSQDSTHCAENLLKADTYRKWRAAKAGEKTISVVLQLEKEEQIHSVDIGNDGSAFVEVLVGSSAGGAGEQDYEVLLVTSSFMSPSESRSGSNPNRVRMFGPDKLVRAAAEKRWDRVKIVCSQPYSKDSPFGLSFVRFHSPPDKDEAEAPSQKVTVTKLGQFRVKEEDESANSLRPGALFFSRINKTSPVTASDPAGPSYAAATLQASSAASSASPVSRAIGSTSKPQESPKGKRKLDLNQEEKKTPSKPPAQLSPSVPKRPKLPAPTRTPATAPVPARAQGAVTGKPRGEGTEPRRPRAGPEELGKILQGVVVVLSGFQNPFRSELRDKALELGAKYRPDWTRDSTHLICAFANTPKYSQVLGLGGRIVRKEWVLDCHRMRRRLPSQRYLMAGPGSSSEEDEASHSGGSGDEAPKLPQKQPQTKTKPTQAAGPSSPQKPPTPEETKAASPVLQEDIDIEGVQSEGQDNGAEDSGDTEDELRRVAEQKEHRLPPGQEENGEDPYAGSTDENTDSEEHQEPPDLPVPELPDFFQGKHFFLYGEFPGDERRKLIRYVTAFNGELEDNMSDRVQFVITAQEWDPSFEEALMDNPSLAFVRPRWIYSCNEKQKLLPHQLYGVVPQA

SEQ ID NO: 9124 - protein, 647 aa, Homo sapiens
STSSFWPGEAHDVDMPEIRLRHVVSCSSQDSTHCAENLLKADTYRKWRAAKAGEKTISVVLQLEKEEQIHSVDIGNDGSAFVEVLVGSSAGGAGEQDYEVLLVTSSFMSPSESRSGSNPNRVRMFGPDKLVRAAAEKRWDRVKIVCSQPYSKDSPFGLSFVRFHSPPDKDEAEAPSQKVTVTKLGQFRVKEEDESANSLRPGALFFSRINKTSPVTASDPAGPSYAAATLQASSAASSASPVSRAIGSTSKPQESPKGKRKLDLNQEEKKTPSKPPAQLSPSVPKRPKLPAPTRTPATAPVPARAQGAVTGKPRGEGTEPRRPRAGPEELGKILQGVVVVLSGFQNPFRSELRDKALELGAKYRPDWTRDSTHLICAFANTPKYSQVLGLGGRIVRKEWVLDCHRMRRRLPSQRYLMAGPGSSSEEDEASHSGGSGDEAPKLPQKQPQTKTKPTQAAGPSSPQKPPTPEETKAASPVLQEDIDIEGVQSEGQDNGAEDSGDTEDELRRVAEQKEHRLPPGQEENGEDPYAGSTDENTDSEEHQEPPDLPVPELPDFFQGKHFFLYGEFPGDERRKLIRYVTAFNGELEDNMSDRVQFVITAQEWDPSFEEALMDNPSLAFVRPRWIYSCNEKQKLLPHQLYGVVPQA

SEQ ID NO: 9125 - protein, 400 aa, Homo sapiens
MPEIRLRHVVSCSSQDSTHCAENLLKADTYRKWRAAKAGEKTISVVLQLEKEEQIHSVDIGNDGSAFVEVLVGSSAGGAGEQDYEVLLVTSSFMSPSESRSGSNPNRVRMFGPDKLVRAAAEKRWDRVKIVCSQPYSKDSPFGLSFVRFHSPPDKDEAEAPSQKVTVTKLGQFRVKEEDESANSLRPGALFFSRINKTSPVTASDPAGPSYAAATLQASSAASSASPVSRAIGSTSKPQESPKGKRKLDLNQEEKKTPSKPPAQLSPSVPKRPKLPAPTRTPATAPVPARAQGAVTGKPRGEGTEPRRPRAGPEELGKILQGVVVVLSGFQNPFRSELRDKALELGAKYRPDWTRDSTHLICAFANTPKLPQKVPPQHTPDQNQAHSGSWTQLTPEAPNP

SEQ ID NO: 9126 - protein, 602 aa, Homo sapiens
MPEIRLRHVVSCSSQDSLEKEEQIHSVDIGNDGSAFVEVLVGSSAGGAGEQDYEVLLVTSSFMSPSESRSGSNPNRVRMFGPDKLVRAAAEKRWDRVKIVCSQPYSKDSPFGLSFVRFHSPPDKDEAEAPSQKVTVTKLGQFRVKEEDESANSLRPGALFFSRINKTSPVTASDPAGPSYAAATLQASSAASSASPVSRAIGSTSKPQESPKGKRKLDLNQEEKKTPSKPPAQLSPSVPKRPKLPAPTRTPATAPVPARAQGAVTGKPRGEGTEPRRPRAGPEELGKILQGVVVVLSGFQNPFRSELRDKALELGAKYRPDWTRDSTHLICAFANTPKYSQVLGLGGRIVRKEWVLDCHRMRRRLPSQRYLMAGPGSSSEEDEASHSGGSGDEAPKLPQKQPQTKTKPTQAAGPSSPQKPPTPEETKAASPVLQEDIDIEGVQSEGQDNGAEDSGDTEDELRRVAEQKEHRLPPGQEENGEDPYAGSTDENTDSEEHQEPPDLPVPELPDFFQGKHFFLYGEFPGDERRKLIRYVTAFNGELEDNMSDRVQFVITAQEWDPSFEEALMDNPSLAFVRPRWIYSCNEKQKLLPHQLYGVVPQA

SEQ ID NO: 9127 - protein, 280 aa, Homo sapiens
MCSAFHRAESGTELLARLEGRSSLKEIEPNLFADEDSPVHGDILEFHGPEGTGKTEMLYHLTARCILPKSEGGLEVEVLFIDTDYHFDMLRLVTILEHRLSQSSEEIIKYCLGRFFLVYCSSSTHLLLTLYSLESMFCSHPSLCLLILDSLSAFYWIDRVNGGESVNLQESTLRKCSQCLEKLVNDYRLVLFATTQTIMQKASSSSEEPSHASRRLCDVDIDYRPYLCKAWQQLVKHRMFFSKQDDSQSSNQFSLVSRCLKSNSLKKHFFIIGESGVEFC

SEQ ID NO: 9128 - protein, 346 aa, Homo sapiens
MDLDLLDLNPRIIAAIKKAKLKSVKEVLHFSGPDLKRLTNLSSPEVWHLLRTASLHLRGSSILTALQLHQQKERFPTQHQRLSLGCPVLDALLRGGLPLDGITELAGRSSAGKTQLALQLCLAVQFPRQHGGLEAGAVYICTEDAFPHKRLQQLMAQQPRLRTDVPGELLQKLRFGSQIFIEHVADVDTLLECVNKKVPVLLSRGMARLVVIDSVAAPFRCEFDSQASAPRARHLQSLGATLRELSSAFQSPVLCINQVTEAMEEQGAAHGPLGFWDERVSPALGITWANQLLVRLLADRLREEEAALGCPARTLRVLSAPHLPPSSCSYTISAEGVRGTPGTQSH

SEQ ID NO: 9129 - protein, 346 aa, Homo sapiens; identical to SEQ ID NO: 9128

SEQ ID NO: 9130 - protein, 346 aa, Homo sapiens; identical to SEQ ID NO: 9128

SEQ ID NO: 9131 - protein, 47 aa, Homo sapiens
MDLDLLDLNPRIIAAIKKAKLKSVKEVLHFSGPDLKRLTNLSSPEVW

SEQ ID NO: 9132 - protein, 45 aa, Homo sapiens
MDLDLLDLNPRIIAAIKKAKLKSVKEVLHFSGPDLKRLTNLSSPE

SEQ ID NO: 9133 - protein, 346 aa, Homo sapiens; identical to SEQ ID NO: 9128

SEQ ID NO: 9134 - protein, 346 aa, Homo sapiens; identical to SEQ ID NO: 9128

SEQ ID NO: 9135 - protein, 102 aa, Homo sapiens
MDLDLLDLNPRIIAAIKKAKLKSVKEVLHFSGPDLKRLTNLSSPEVWHLLRTASLHLRGSSILTALQLHQQKERFPTQHQRLSLGCPVLDALLRGGLPLDGI

SEQ ID NO: 9136 - protein, 61 aa, Homo sapiens
MDLDLLDLNPRIIAAIKKAKLKSVKEVLHFSGPDLKRLTNLSSPEVWHLLRTASLHLRGSS

SEQ ID NO: 9137 - protein, 112 aa, Homo sapiens
MDLDLLDLNPRIIAAIKKAKLKSVKEVLHFSGPDLKRLTNLSSPEVWHLLRTASLHLRGSSILTALQLHQQKERFPTQHQRLSLGCPVLDALLRGGLPLDGITELAGRSSAG

SEQ ID NO: 9138 - protein, 334 aa, Homo sapiens
MERKISRIHLVSEPSITHFLQVSWEKTLESGFVITLTDGHSAWTGTVSESEISQEADDMAMEKGKYVGELRKALLSGAGPADVYTFNFSKESCYFFFEKNLKDVSFRLGSFNLEKVENPAEVIRELICYCLDTIAENQAKNEHLQKENERLLRDWNDVQGRFEKCVSAKEALETDLYKRFILVLNEKKTKIRSLHNKLLNAAQEREKDIKQEGETAICSEMTADRDPVYDESTDEESENQTDLSGLASAAVSKDDSIISSLDVTDIAPSRKRRQRMQRNLGTEPKMAPQENQLQEKEKPDSSLPETSKKEHISAENMSLETLRNSSPEDLFDEI

SEQ ID NO: 9139 - protein, 336 aa, Homo sapiens
MERKISRIHLVSEPSITHFLQVSWEKTLESGFVITLTDGHSAWTGTVSESEISQEADDMAMEKGKYVGELRKALLSGAGPADVYTFNFSKESCYFFFEKNLKDVSFRLGSFNLEKVENPAEVIRELICYCLDTIAENQAKNEHLQKENERLLRDWNDVQGRFEKCVSAKEALETDLYKRFILVLNEKKTKIRSLHNKLLNAAQEREKDIKQEGETAICSEMTADRDPVYDESTDEESENQTDLSGLASAAVSKDDSIISSLDVTDIAPSRKRRQRMQRNLGTEPKMAPQENQLQEKENSRPDSSLPETSKKEHISAENMSLETLRNSSPEDLFDEI

SEQ ID NO: 9140 - protein, 334 aa, Homo sapiens; identical to SEQ ID NO: 9138

SEQ ID NO: 9141 - protein, 336 aa, Homo sapiens; identical to SEQ ID NO: 9139

SEQ ID NO: 9142 - protein, 61 aa, Homo sapiens
MQRNLGTEPKMAPQENQLQEKENSRPDSSLPETSKKEHISAENMSLETLRNSSPEDLFVSI

SEQ ID NO: 9143 - protein, 732 aa, Homo sapiens
MVRSGNKAAVVLCMDVGFTMSNSIPGIESPFEQAKKVITMFVQRQVFAENKDEIALVLFGTDGTDNPLSGGDQYQNITVHRHLMLPDFDLLEDIESKIQPGSQQADFLDALIVSMDVIQHETIGKKFEKRHIEIFTDLSSRFSKSQLDIIIHSLKKCDISLQFFLPFSLGKEDGSGDRGDGPFRLGGHGPSFPLKGITEQQKEGLEIVKMVMISLEGEDGLDEIYSFSESLRKLCVFKKIERHSIHWPCRLTIGSNLSIRIAAYKSILQERVKKTWTVVDAKTLKKEDIQKETVYCLNDDDETEVLKEDIIQGFRYGSDIVPFSKVDEEQMKYKSEGKCFSVLGFCKSSQVQRRFFMGNQVLKVFAARDDEAAAVALSSLIHALDDLDMVAIVRYAYDKRANPQVGVAFPHIKHNYECLVYVQLPFMEDLRQYMFSSLKNSKKYAPTEAQLNAVDALIDSMSLAKKDEKTDTLEDLFPTTKIPNPRFQRLFQCLLHRALHPREPLPPIQQHIWNMLNPPAEVTTKSQIPLSKIKTLFPLIEAKKKDQVTAQEIFQDNHEDGPTAKKLKTEQGGAHFSVSSLAEGSVTSVGSVNPAENFRVLVKQKKASFEEASNQLINHIEQFLDTNETPYFMKSIDCIRAFREEAIKFSEEQRFNNFLKALQEKVEIKQLNHFWEIVVQDGITLITKEEASGSSVTAEEAKKFLAPKDKPSGDTAAVFEEGGDVDDLLDMI

SEQ ID NO: 9144 - protein, 732 aa, Homo sapiens; identical to SEQ ID NO: 9143

SEQ ID NO: 9145 - protein, 609 aa, Homo sapiens
MSGWESYYKTEGDEEAEEEQEENLEASGDYKYSGRDSLIFLVDASKAMFESQSEDELTPFDMSIQCIQSVYISKIISSDRDLLAVVFYGTEKDKNSVNFKNIYVLQELDNPGAKRILELDQFKGQQGQKRFQDMMGHGSDYSLSEVLWVCANLFSDVQFKMSHKRIMLFTNEDNPHGNDSAKASRARTKAGDLRDTGIFLDLMHLKKPGGFDISLFYRDIISIAEDEDLRVHFEESSKLEDLLRKVRAKETRKRALSRLKLKLNKDIVISVGIYNLVQKALKPPPIKLYRETNEPVKTKTRTFNTSTGGLLLPSDTKRSQIYGSRQIILEKEETEELKRFDDPGLMLMGFKPLVLLKKHHYLRPSLFVYPEESLVIGSSTLFSALLIKCLEKEVAALCRYTPRRNIPPYFVALVPQEEELDDQKIQVTPPGFQLVFLPFADDKRKMPFTEKIMATPEQVGKMKAIVEKLRFTYRSDSFENPVLQQHFRNLEALALDLMEPEQAVDLTLPKVEAMNKRLGSLVDEFKELVYPPDYNPEGKVTKRKHDNEGSGSKRPKVEYSEEELKTHISKGTLGKFTVPMLKEACRAYGLKSGLKKQELLEALTKHFQD

SEQ ID NO: 9146 - protein, 609 aa, Homo sapiens; identical to SEQ ID NO: 9145

SEQ ID NO: 9147 - protein, 557 aa, Homo sapiens
MSGWESYYKTEGDEEAEEEQEENLEASGDYKYSGRDSLIFLVDASKAMFESQSEDELTPFDMSIQCIQSVYISKIISSDRDLLAVVFYGTEKDKNSVNFKNIYVLQELDNPGAKRILELDQFKGQQGQKRFQDMMGHGSDYSLSEVLWVCANLFSDVQFKMSHKRIMLFTNEDNPHGNDSAKASRARTKAGDLRDTGIFLDLMHLKKPGGFDISLFYRDIISIAEDEDLRVHFEESSKLEDLLRKVRAKETRKRALSRLKLKLNKDIVISVGIYNLVQKALKPPPIKLYRETNEPVKTKTRTFNTSTGGLLLPSDTKRSQIYGSRQIILEKEETEELKRFDDPGLMLMGFKPLVLLKKHHYLRPSLFVYPEESLVIGSSTLFSALLIKCLEKEVAALCRYTPRRNIPPYFVALVPQEEELDDQKIQVTPPGFQLVFLPFADDKRKMPFTEKIMATPEQVGKMKAIVEKLRFTYRSDSFENPVLQQHFRNLEALALDLMEPEQAVDLTLPKVEAMNKRLGSLVDEFKELVYPPDYNPEGKVTKRKHAKGPRWSIQKRS

SEQ ID NO: 9148 - protein, 568 aa, Homo sapiens
MSGWESYYKTEGDEEAEEEQEENLEASGDYKYSGRDSLIFLVDASKAMFESQSEDELTPFDMSIQELDNPGAKRILELDQFKGQQGQKRFQDMMGHGSDYSLSEVLWVCANLFSDVQFKMSHKRIMLFTNEDNPHGNDSAKASRARTKAGDLRDTGIFLDLMHLKKPGGFDISLFYRDIISIAEDEDLRVHFEESSKLEDLLRKVRAKETRKRALSRLKLKLNKDIVISVGIYNLVQKALKPPPIKLYRETNEPVKTKTRTFNTSTGGLLLPSDTKRSQIYGSRQIILEKEETEELKRFDDPGLMLMGFKPLVLLKKHHYLRPSLFVYPEESLVIGSSTLFSALLIKCLEKEVAALCRYTPRRNIPPYFVALVPQEEELDDQKIQVTPPGFQLVFLPFADDKRKMPFTEKIMATPEQVGKMKAIVEKLRFTYRSDSFENPVLQQHFRNLEALALDLMEPEQAVDLTLPKVEAMNKRLGSLVDEFKELVYPPDYNPEGKVTKRKHDNEGSGSKRPKVEYSEEELKTHISKGTLGKFTVPMLKEACRAYGLKSGLKKQELLEALTKHFQD

SEQ ID NO: 9149 - protein, 559 aa, Homo sapiens
MKKQRKNKKRTLKQVCIQSVYISKIISSDRDLLAVVFYGTEKDKNSVNFKNIYVLQELDNPGAKRILELDQFKGQQGQKRFQDMMGHGSDYSLSEVLWVCANLFSDVQFKMSHKRIMLFTNEDNPHGNDSAKASRARTKAGDLRDTGIFLDLMHLKKPGGFDISLFYRDIISIAEDEDLRVHFEESSKLEDLLRKVRAKETRKRALSRLKLKLNKDIVISVGIYNLVQKALKPPPIKLYRETNEPVKTKTRTFNTSTGGLLLPSDTKRSQIYGSRQIILEKEETEELKRFDDPGLMLMGFKPLVLLKKHHYLRPSLFVYPEESLVIGSSTLFSALLIKCLEKEVAALCRYTPRRNIPPYFVALVPQEEELDDQKIQVTPPGFQLVFLPFADDKRKMPFTEKIMATPEQVGKMKAIVEKLRFTYRSDSFENPVLQQHFRNLEALALDLMEPEQAVDLTLPKVEAMNKRLGSLVDEFKELVYPPDYNPEGKVTKRKHDNEGSGSKRPKVEYSEEELKTHISKGTLGKFTVPMLKEACRAYGLKSGLKKQELLEALTKHFQD

SEQ ID NO: 9150 - protein, 609 aa, Homo sapiens; identical to SEQ ID NO: 9145

SEQ ID NO: 9151 - protein, 476 aa, Homo sapiens [sequence omitted]

SEQ ID NO: 9152 - protein, 246 aa, Homo sapiens
MAGAPDERRRGPAAGEQLQQQHVSCQVFPERLAQGNPQQGFFSSFFTSNQKCQLRLLKTLETNPYVKLLLDAMKHSGCAVNKDRHFSCEDCNGNVSGGFDASTSQIVLCQNNIHNQAHMNRVVTHELIHAFDHCRAHVDWFTNIRHLACSEVRAANLSGDCSLVNEIFRLHFGLKQHHQTCVRDRATLSILAVRNISKEVAKKAVDEVFESCFNDHEPFGRIPHNKTYARYAHRDFENRDRYYSNI

SEQ ID NO: 9153 - protein, 504 aa, Homo sapiens
MDPGQQPPPQPAPQGQGQPPSQPPQGQGPPSGPGQPAPAATQAAPQAPPAGHQIVHVRGDSETDLEALFNAVMNPKTANVPQTVPMRLRKLPDSFFKPPEPKSHSRQASTDAGTAGALTPQHVRAHSSPASLQLGAVSPGTLTPTGVVSGPAATPTAQHLRQSSFEIPDDVPLPAGWEMAKTSSGQRYFLNHIDQTTTWQDPRKAMLSQMNVTAPTSPPVQQNMMNSASGPLPDGWEQAMTQDGEIYYINHKNKTTSWLDPRLDPRFAMNQRISQSAPVKQPPPLAPQSPQGGVMGGSNSNQQQQMRLQQLQMEKERLRLKQQELLRQAMRNINPSTANSPKCQELALRSQLPTLEQDGGTQNPVSSPGMSQELRTMTTNSSDPFLNSGTYHSRDESTDSGLSMSSYSVPRTPDDFLNSVDEMDTGDTINQSTLPSQQNRFPDYLEAIPGTNVDLGTLEGDGMNIEGEELMPSLQEALSSDILNDMESVLAATKLDKESFLTWL

SEQ ID NO: 9154 - protein, 454 aa, Homo sapiens
MDPGQQPPPQPAPQGQGQPPSQPPQGQGPPSGPGQPAPAATQAAPQAPPAGHQIVHVRGDSETDLEALFNAVMNPKTANVPQTVPMRLRKLPDSFFKPPEPKSHSRQASTDAGTAGALTPQHVRAHSSPASLQLGAVSPGTLTPTGVVSGPAATPTAQHLRQSSFEIPDDVPLPAGWEMAKTSSGQRYFLNHIDQTTTWQDPRKAMLSQMNVTAPTSPPVQQNMMNSASAMNQRISQSAPVKQPPPLAPQSPQGGVMGGSNSNQQQQMRLQQLQMEKERLRLKQQELLRQVRPQELALRSQLPTLEQDGGTQNPVSSPGMSQELRTMTTNSSDPFLNSGTYHSRDESTDSGLSMSSYSVPRTPDDFLNSVDEMDTGDTINQSTLPSQQNRFPDYLEAIPGTNVDLGTLEGDGMNIEGEELMPSLQEALSSDILNDMESVLAATKLDKESFLTWL

SEQ ID NO: 9155 - protein, 421 aa, Homo sapiens
MRLRKLPDSFFKPPEPKSHSRQASTDAGTAGALTPQHVRAHSSPASLQLGAVSPGTLTPTGVVSGPAATPTAQHLRQSSFEIPDDVPLPAGWEMAKTSSGQRYFLNHIDQTTTWQDPRKAMLSQMNVTAPTSPPVQQNMMNSASGPLPDGWEQAMTQDGEIYYINHKNKTTSWLDPRLDPRFGKAMNQRISQSAPVKQPPPLAPQSPQGGVMGGSNSNQQQQMRLQQLQMEKERLRLKQQELLRQAMRNINPSTANSPKCQELALRSQLPTLEQDGGTQNPVSSPGMSQELRTMTTNSSDPFLNSGTYHSRDESTDSGLSMSSYSVPRTPDDFLNSVDEMDTGDTINQSTLPSQQNRFPDYLEAIPGTNVDLGTLEGDGMNIEGEELMPSLQEALSSDILNDMESVLAATKLDKESFLTWL

SEQ ID NO: 9156 - protein, 326 aa, Homo sapiens
MAKTSSGQRYFLNHIDQTTTWQDPRKAMLSQMNVTAPTSPPVQQNMMNSASGPLPDGWEQAMTQDGEIYYINHKNKTTSWLDPRLDPRFAMNQRISQSAPVKQPPPLAPQSPQGGVMGGSNSNQQQQMRLQQLQMEKERLRLKQQELLRQAMRNINPSTANSPKCQELALRSQLPTLEQDGGTQNPVSSPGMSQELRTMTTNSSDPFLNSGTYHSRDESTDSGLSMSSYSVPRTPDDFLNSVDEMDTGDTINQSTLPSQQNRFPDYLEAIPGTNVDLGTLEGDGMNIEGEELMPSLQEALSSDILNDMESVLAATKLDKESFLTWL

SEQ ID NO: 9157 - protein, 488 aa, Homo sapiens
MDPGQQPPPQPAPQGQGQPPSQPPQGQGPPSGPGQPAPAATQAAPQAPPAGHQIVHVRGDSETDLEALFNAVMNPKTANVPQTVPMRLRKLPDSFFKPPEPKSHSRQASTDAGTAGALTPQHVRAHSSPASLQLGAVSPGTLTPTGVVSGPAATPTAQHLRQSSFEIPDDVPLPAGWEMAKTSSGQRYFLNHIDQTTTWQDPRKAMLSQMNVTAPTSPPVQQNMMNSASGPLPDGWEQAMTQDGEIYYINHKNKTTSWLDPRLDPRFAMNQRISQSAPVKQPPPLAPQSPQGGVMGGSNSNQQQQMRLQQLQMEKERLRLKQQELLRQELALRSQLPTLEQDGGTQNPVSSPGMSQELRTMTTNSSDPFLNSGTYHSRDESTDSGLSMSSYSVPRTPDDFLNSVDEMDTGDTINQSTLPSQQNRFPDYLEAIPGTNVDLGTLEGDGMNIEGEELMPSLQEALSSDILNDMESVLAATKLDKESFLTWL

SEQ ID NO: 9158 - protein, 492 aa, Homo sapiens
MDPGQQPPPQPAPQGQGQPPSQPPQGQGPPSGPGQPAPAATQAAPQAPPAGHQIVHVRGDSETDLEALFNAVMNPKTANVPQTVPMRLRKLPDSFFKPPEPKSHSRQASTDAGTAGALTPQHVRAHSSPASLQLGAVSPGTLTPTGVVSGPAATPTAQHLRQSSFEIPDDVPLPAGWEMAKTSSGQRYFLNHIDQTTTWQDPRKAMLSQMNVTAPTSPPVQQNMMNSASGPLPDGWEQAMTQDGEIYYINHKNKTTSWLDPRLDPRFAMNQRISQSAPVKQPPPLAPQSPQGGVMGGSNSNQQQQMRLQQLQMEKERLRLKQQELLRQVRPQELALRSQLPTLEQDGGTQNPVSSPGMSQELRTMTTNSSDPFLNSGTYHSRDESTDSGLSMSSYSVPRTPDDFLNSVDEMDTGDTINQSTLPSQQNRFPDYLEAIPGTNVDLGTLEGDGMNIEGEELMPSLQEALSSDILNDMESVLAATKLDKESFLTWL

SEQ ID NO: 9159 - protein, 450 aa, Homo sapiens
MDPGQQPPPQPAPQGQGQPPSQPPQGQGPPSGPGQPAPAATQAAPQAPPAGHQIVHVRGDSETDLEALFNAVMNPKTANVPQTVPMRLRKLPDSFFKPPEPKSHSRQASTDAGTAGALTPQHVRAHSSPASLQLGAVSPGTLTPTGVVSGPAATPTAQHLRQSSFEIPDDVPLPAGWEMAKTSSGQRYFLNHIDQTTTWQDPRKAMLSQMNVTAPTSPPVQQNMMNSASAMNQRISQSAPVKQPPPLAPQSPQGGVMGGSNSNQQQQMRLQQLQMEKERLRLKQQELLRQELALRSQLPTLEQDGGTQNPVSSPGMSQELRTMTTNSSDPFLNSGTYHSRDESTDSGLSMSSYSVPRTPDDFLNSVDEMDTGDTINQSTLPSQQNRFPDYLEAIPGTNVDLGTLEGDGMNIEGEELMPSLQEALSSDILNDMESVLAATKLDKESFLTWL

SEQ ID NO: 9160 - protein, 619 aa, Homo sapiens
MANDIDELIGIPFPNHSSEVLCSLNEQRHDGLLCDVLLVVQEQEYRTHRSVLAACSKYFKKLFTAGTLASQPYVYEIDFVQPEALAAILEFAYTSTLTITAGNVKHILNAARMLEIQCIVNVCLEIMEPGGDGGEEDDKEDDDDDEDDDDEEDEEEEEEEEEDDDDDTEDFADQENLPDPQDISCHQSPSKTDHLTEKAYSDTPRDFPDSFQAGSPGHLGVIRDFSIESLLRENLYPKANIPDRRPSLSPFAPDFFPHLWPGDFGAFAQLPEQPMDSGPLDLVIKNRKIKEEEKEELPPPPPPPFPNDFFKDMFPDLPGGPLGPIKAENDYGAYLNFLSATHLGGLFPPWPLVEERKLKPKASQQCPICHKVIMGAGKLPRHMRTHTGEKPYMCTICEVRFTRQDKLKIHMRKHTGERPYLCIHCNAKFVHNYDLKNHMRIHTGVRPYQCEFCYKSFTRSDHLHRHIKRQSCRMARPRRGRKPAAWRAASLLFGPGGPAPDKAAFVMPPALGEVGGHLGGAAVCLPGPSPAKHFLAAPKGALSLQELERQFEETQMKLFGRAQLEAERNAGGLLAFALAENVAAARPYFPLPDPWAAGLAGLPGLAGLNHVASMSEANN

SEQ ID NO: 9161 - protein, 619 aa, Homo sapiens; identical to SEQ ID NO: 9160

SEQ ID NO: 9162 - protein, 25 aa, Homo sapiens
MANDIDELIGIPFPNHSSEVLCSLN

SEQ ID NO: 9163 - protein, 18 aa, Homo sapiens
MANDIDELIGIPFPNHSS

SEQ ID NO: 9164 - protein, 1124 aa, Homo sapiens
MADGPRCKRRKQANPRRNNVTNYNTVVETNSDSDDEDKLHIVEEESVTDAADCEGVPEDDLPTDQTVLPGRSSEREGNAKNCWEDDRKEGQEILGPEAQADEAGCTVKDDECESDAENEQNHDPNVEEFLQQQDTAVIFPEAPEEDQRQGTPEASGHDENGTPDAFSQLLTCPYCDRGYKRFTSLKEHIKYRHEKNEDNFSCSLCSYTFAYRTQLERHMTSHKSGRDQRHVTQSGCNRKFKCTECGKAFKYKHHLKEHLRIHSGEKPYECPNCKKRFSHSGSYSSHISSKKCISLIPVNGRPRTGLKTSQCSSPSLSASPGSPTRPQIRQKIENKPLQEQLSVNQIKTEPVDYEFKPIVVASGINCSTPLQNGVFTGGGPLQATSSPQGMVQAVVLPTVGLVSPISINLSDIQNVLKVAVDGNVIRQVLENNQANLASKEQETINASPIQQGGHSVISAISLPLVDQDGTTKIIINYSLEQPSQLQVVPQNLKKENPVATNSCKSEKLPEDLTVKSEKDKSFEGGVNDSTCLLCDDCPGDINALPELKHYDLKQPTQPPPLPAAEAEKPESSVSSATGDGNLSPSQPPLKNLLSLLKAYYALNAQPSAEELSKIADSVNLPLDVVKKWFEKMQAGQISVQSSEPSSPEPGKVNIPAKNNDQPQSANANEPQDSTVNLQSPLKMTNSPVLPVGSTTNGSRSSTPSPSPLNLSSSRNTQGYLYTAEGAQEEPQVEPLDLSLPKQQGELLERSTITSVYQNSVYSVQEEPLNLSCAKKEPQKDSCVTDSEPVVNVIPPSANPINIAIPTVTAQLPTIVAIADQNSVPCLRALAANKQTILIPQVAYTYSTTVSPAVQEPPLKVIQPNGNQDERQDTSSEGVSNVEDQNDSDSTPPKKKMRKTENGMYACDLCDKIFQKSSSLLRHKYEHTGKRPHECGICKKAFKHKHHLIEHMRLHSGEKPYQCDKCGKRFSHSGSYSQHMNHRYSYCKREAEERDSTEQEEAGPEILSNEHVGARASPSQGDSDERESLTREEDEDSEKEEEEEDKEMEELQEEKECEKPQGDEEEEEEEEEVEEEEVEEAENEGEEAKTEGLMKDDRAESQASSLGQKVGESSEQVSEEKTNEA

SEQ ID NO: 9165 - protein, 1125 aa, Homo sapiens
MADGPRCKRRKQANPRRNNVTNYNTVVETNSDSDDEDKLHIVEEESVTDAADCEGVPEDDLPTDQTVLPGRSSEREGNAKNCWEDDTGKEGQEILGPEAQADEAGCTVKDDECESDAENEQNHDPNVEEFLQQQDTAVIFPEAPEEDQRQGTPEASGHDENGTPDAFSQLLTCPYCDRGYKRFTSLKEHIKYRHEKNEDNFSCSLCSYTFAYRTQLERHMTSHKSGRDQRHVTQSGCNRKFKCTECGKAFKYKHHLKEHLRIHSGEKPYECPNCKKRFSHSGSYSSHISSKKCISLIPVNGRPRTGLKTSQCSSPSLSASPGSPTRPQIRQKIENKPLQEQLSVNQIKTEPVDYEFKPIVVASGINCSTPLQNGVFTGGGPLQATSSPQGMVQAVVLPTVGLVSPISINLSDIQNVLKVAVDGNVIRQVLENNQANLASKEQETINASPIQQGGHSVISAISLPLVDQDGTTKIIINYSLEQPSQLQVVPQNLKKENPVATNSCKSEKLPEDLTVKSEKDKSFEGGVNDSTCLLCDDCPGDINALPELKHYDLKQPTQPPPLPAAEAEKPESSVSSATGDGNLSPSQPPLKNLLSLLKAYYALNAQPSAEELSKIADSVNLPLDVVKKWFEKMQAGQISVQSSEPSSPEPGKVNIPAKNNDQPQSANANEPQDSTVNLQSPLKMTNSPVLPVGSTTNGSRSSTPSPSPLNLSSSRNTQGYLYTAEGAQEEPQVEPLDLSLPKQQGELLERSTITSVYQNSVYSVQEEPLNLSCAKKEPQKDSCVTDSEPVVNVIPPSANPINIAIPTVTAQLPTIVAIADQNSVPCLRALAANKQTILIPQVAYTYSTTVSPAVQEPPLKVIQPNGNQDERQDTSSEGVSNVEDQNDSDSTPPKKKMRKTENGMYACDLCDKIFQKSSSLLRHKYEHTGKRPHECGICKKAFKHKHHLIEHMRLHSGEKPYQCDKCGKRFSHSGSYSQHMNHRYSYCKREAEERDSTEQEEAGPEILSNEHVGARASPSQGDSDERESLTREEDEDSEKEEEEEDKEMEELQEEKECEKPQGDEEEEEEEEEVEEEEVEEAENEGEEAKTEGLMKDDRAESQASSLGQKVGESSEQVSEEKTNEA

SEQ ID NO: 9166 - protein, 289 aa, Homo sapiens
MADGPRCKRRKQANPRRNNVTNYNTVVETNSDSDDEDKLHIVEEESVTDAADCEGVPEDDLPTDQTVLPGRSSEREGNAKNCWEDDTGKEGQEILGPEAQADEAGCTVKDDECESDAENEQNHDPNVEEFLQQQDTAVIFPEAPEEDQRQGTPEASGHDENGTPDAFSQLLTCPYCDRGYKRFTSLKEHIKYRHEKNEDNFSCSLCSYTFAYRTQLERHMTSHKSGRDQRHVTQSGCNRKFKCTECGKAFKYKHHLKEHLRIHSGEKPYECPNCKKRFSHSGSYSSHIS

SEQ ID NO: 9167 - protein, 906 aa, Homo sapiens
MTSHKSGRDQRHVTQSGCNRKFKCTECGKAFKYKHHLKEHLRIHSGEKPYECPNCKKRFSHSGSYSSHISSKKCISLIPVNGRPRTGLKTSQCSSPSLSASPGSPTRPQIRQKIENKPLQEQLSVNQIKTEPVDYEFKPIVVASGINCSTPLQNGVFTGGGPLQATSSPQGMVQAVVLPTVGLVSPISINLSDIQNVLKVAVDGNVIRQVLENNQANLASKEQETINASPIQQGGHSVISAISLPLVDQDGTTKIIINYSLEQPSQLQVVPQNLKKENPVATNSCKSEKLPEDLTVKSEKDKSFEGGVNDSTCLLCDDCPGDINALPELKHYDLKQPTQPPPLPAAEAEKPESSVSSATGDGNLSPSQPPLKNLLSLLKAYYALNAQPSAEELSKIADSVNLPLDVVKKWFEKMQAGQISVQSSEPSSPEPGKVNIPAKNNDQPQSANANEPQDSTVNLQSPLKMTNSPVLPVGSTTNGSRSSTPSPSPLNLSSSRNTQGYLYTAEGAQEEPQVEPLDLSLPKQQGELLERSTITSVYQNSVYSVQEEPLNLSCAKKEPQKDSCVTDSEPVVNVIPPSANPINIAIPTVTAQLPTIVAIADQNSVPCLRALAANKQTILIPQVAYTYSTTVSPAVQEPPLKVIQPNGNQDERQDTSSEGVSNVEDQNDSDSTPPKKKMRKTENGMYACDLCDKIFQKSSSLLRHKYEHTGKRPHECGICKKAFKHKHHLIEHMRLHSGEKPYQCDKCGKRFSHSGSYSQHMNHRYSYCKREAEERDSTEQEEAGPEILSNEHVGARASPSQGDSDERESLTREEDEDSEKEEEEEDKEMEELQEEKECEKPQGDEEEEEEEEEVEEEEVEEAENEGEEAKTEGLMKDDRAESQASSLGQKVGESSEQVSEEKTNEA

SEQ ID NO: 9168 - protein, 1108 aa, Homo sapiens
MKVTNYNTVVETNSDSDDEDKLHIVEEESVTDAADCEGVPEDDLPTDQTVLPGRSSEREGNAKNCWEDDTGKEGQEILGPEAQADEAGCTVKDDECESDAENEQNHDPNVEEFLQQQDTAVIFPEAPEEDQRQGTPEASGHDENGTPDAFSQLLTCPYCDRGYKRFTSLKEHIKYRHEKNEDNFSCSLCSYTFAYRTQLERHMTSHKSGRDQRHVTQSGCNRKFKCTECGKAFKYKHHLKEHLRIHSGEKPYECPNCKKRFSHSGSYSSHISSKKCISLIPVNGRPRTGLKTSQCSSPSLSASPGSPTRPQIRQKIENKPLQEQLSVNQIKTEPVDYEFKPIVVASGINCSTPLQNGVFTGGGPLQATSSPQGMVQAVVLPTVGLVSPISINLSDIQNVLKVAVDGNVIRQVLENNQANLASKEQETINASPIQQGGHSVISAISLPLVDQDGTTKIIINYSLEQPSQLQVVPQNLKKENPVATNSCKSEKLPEDLTVKSEKDKSFEGGVNDSTCLLCDDCPGDINALPELKHYDLKQPTQPPPLPAAEAEKPESSVSSATGDGNLSPSQPPLKNLLSLLKAYYALNAQPSAEELSKIADSVNLPLDVVKKWFEKMQAGQISVQSSEPSSPEPGKVNIPAKNNDQPQSANANEPQDSTVNLQSPLKMTNSPVLPVGSTTNGSRSSTPSPSPLNLSSSRNTQGYLYTAEGAQEEPQVEPLDLSLPKQQGELLERSTITSVYQNSVYSVQEEPLNLSCAKKEPQKDSCVTDSEPVVNVIPPSANPINIAIPTVTAQLPTIVAIADQNSVPCLRALAANKQTILIPQVAYTYSTTVSPAVQEPPLKVIQPNGNQDERQDTSSEGVSNVEDQNDSDSTPPKKKMRKTENGMYACDLCDKIFQKSSSLLRHKYEHTGKRPHECGICKKAFKHKHHLIEHMRLHSGEKPYQCDKCGKRFSHSGSYSQHMNHRYSYCKREAEERDSTEQEEAGPEILSNEHVGARASPSQGDSDERESLTREEDEDSEKEEEEEDKEMEELQEEKECEKPQGDEEEEEEEEEVEEEEVEEAENEGEEAKTEGLMKDDRAESQASSLGQKVGESSEQVSEEKTNEA

SEQ ID NO: 9169 - protein, 1059 aa, Homo sapiens
MADGPRCKRRKQANPRRNNVTNYNTVVETNSDSDDEDKLHIVEEESVTDAADCEGVPEDDLPTDQTVLPGRSSEREGNAKNCWEDDRKEGQEILGPEAQADEAGCTVKDDECESDAENEQNHDPNVEEFLQQQDTAVIFPEAPEEDQRQGTPEASGHDENGTPDAFSQLLTCPYCDRGYKRFTSLKEHIKYRHEKNEDNFSCSLCSYTFAYRTQLERHMTSHKSGRDQRHVTQSGCNRKFKCTECGKAFKYKHHLKEHLRIHSGEKPYECPNCKKRFSHSGSYSSHISSKKCISLIPVNGRPRTGLKTSQCSSPSLSASPGSPTRPQIRQKIENKPLQEQLSVNQIKTEPVDYEFKPIVVASGINCSTPLQNGVFTGGGPLQATSSPQGMVQAVVLPTVGLVSPISINLSDIQNVLKVAVDGNVIRQVLENNQANLASKEQETINASPIQQGGHSVISAISLPLVDQDGTTKIIINYSLEQPSQLQVVPQNLKKENPVATNSCKSEKLPEDLTVKSEKDKSFEGGVNDSTCLLCDDCPGDINALPELKHYDLKQPTQPPPLPAAEAEKPESSVSSATGDGNLSPSQPPLKNLLSLLKAYYALNAQPSAEELSKIADSVNLPLDVVKKWFEKMQAGQISVQSSEPSSPEPGKVNIPAKNNDQPQSANANEPQDSTVNLQSPLKMTNSPVLPVGSTTNGSRSSTPSPSPLNLSSSRNTQGYLYTAEGAQEEPQVEPLDLSLPKQQGELLERSTITSVYQNSVYSVQEEPLNLSCAKKEPQKDSCVTDSEPVVNVIPPSANPINIAIPTVTAQLPTIVAIADQNSVPCLRALAANKQTILIPQVAYTYSTTVSPAVQEPPLKVIQPNGNQDERQDTSSEGVSNVEDQNDSDSTPPKKKMRKTENGMYACDLCDKIFQKSSSLLRHKYEHTGKRPHECGICKKAFKHKHHLIEHMRLHSGEKPYQCDKCGKRFSHSGSYSQHMNHRYSYCKREAEERDSTEQEEAGPEILSNEHVGARASPSQGDSDERESLTREEDEDSEKEEEEEDKEMEELQEEKHKKKK

SEQ ID NO: 9170 - protein, 643 aa, Homo sapiens
MADGPRCKRRKQANPRRNNGTPDAFSQLLTCPYCDRGYKRFTSLKEHIKYRHEKNEDNFSCSLCSYTFAYRTQLERHMTSHKSGRDQRHVTQSGCNRKFKCTECGKAFKYKHHLKEHLRIHSGEKPYECPNCKKRFSHSGSYSSHISSKKCISLIPVNGRPRTGLKTSQCSSPSLSASPGSPTRPQIRQKIENKPLQEQLSVNQIKTEPVDYEFKPIVVASGINCSTPLQNGVFTGGGPLQATSSPQGMVQAVVLPTVGLVSPISINLSDIQNVLKVAVDGNVIRQVLENNQANLASKEQETINASPIQQGGHSVISAISLPLVDQDGTTKIIINYSLEQPSQLQVVPQNLKKENPVATNSCKSEKLPEDLTVKSEKDKSFEGGVNDSTCLLCDDCPGDINALPELKHYDLKQPTQPPPLPAAEAEKPESSVSSATGDGNLSPSQPPLKNLLSLLKAYYALNAQPSAEELSKIADSVNLPLDVVKKWFEKMQAGQISVQSSEPSSPEPGKVNIPAKNNDQPQSANANEPQDSTVNLQSPLKMTNSPVLPVGSTTNGSRSSTPSPSPLNLSSSRNTQGYLYTAEGAQEEPQVEPLDLSLPKQQGEEAKTEGLMKDDRAESQASSLGQKVGESSEQVSEEKTNEA

SEQ ID NO: 9171 - protein, 1057 aa, Homo sapiens
MADGPRCKRRKQANPRRNNGKEGQEILGPEAQADEAGCTVKDDECESDAENEQNHDPNVEEFLQQQDTAVIFPEAPEEDQRQGTPEASGHDENGTPDAFSQLLTCPYCDRGYKRFTSLKEHIKYRHEKNEDNFSCSLCSYTFAYRTQLERHMTSHKSGRDQRHVTQSGCNRKFKCTECGKAFKYKHHLKEHLRIHSGEKPYECPNCKKRFSHSGSYSSHISSKKCISLIPVNGRPRTGLKTSQCSSPSLSASPGSPTRPQIRQKIENKPLQEQLSVNQIKTEPVDYEFKPIVVASGINCSTPLQNGVFTGGGPLQATSSPQGMVQAVVLPTVGLVSPISINLSDIQNVLKVAVDGNVIRQVLENNQANLASKEQETINASPIQQGGHSVISAISLPLVDQDGTTKIIINYSLEQPSQLQVVPQNLKKENPVATNSCKSEKLPEDLTVKSEKDKSFEGGVNDSTCLLCDDCPGDINALPELKHYDLKQPTQPPPLPAAEAEKPESSVSSATGDGNLSPSQPPLKNLLSLLKAYYALNAQPSAEELSKIADSVNLPLDVVKKWFEKMQAGQISVQSSEPSSPEPGKVNIPAKNNDQPQSANANEPQDSTVNLQSPLKMTNSPVLPVGSTTNGSRSSTPSPSPLNLSSSRNTQGYLYTAEGAQEEPQVEPLDLSLPKQQGELLERSTITSVYQNSVYSVQEEPLNLSCAKKEPQKDSCVTDSEPVVNVIPPSANPINIAIPTVTAQLPTIVAIADQNSVPCLRALAANKQTILIPQVAYTYSTTVSPAVQEPPLKVIQPNGNQDERQDTSSEGVSNVEDQNDSDSTPPKKKMRKTENGMYACDLCDKIFQKSSSLLRHKYEHTGKRPHECGICKKAFKHKHHLIEHMRLHSGEKPYQCDKCGKRFSHSGSYSQHMNHRYSYCKREAEERDSTEQEEAGPEILSNEHVGARASPSQGDSDERESLTREEDEDSEKEEEEEDKEMEELQEEKECEKPQGDEEEEEEEEEVEEEEVEEAENEGEEAKTEGLMKDDRAESQASSLGQKVGESSEQVSEEKTNEA

SEQ ID NO: 9172 - protein, 1015 aa, Homo sapiens
MMNASQMQKMSKTMILMLKSFYNNKTLLSFFLRHLKRTRGRAHQKPVVMMKMEHQMHFHNYSPVHIVIGYKRFTSLKEHIKYRHEKNEDNFSCSLCSYTFAYRTQLERHMTSHKSGRDQRHVTQSGCNRKFKCTECGKAFKYKHHLKEHLRIHSGEKPYECPNCKKRFSHSGSYSSHISSKKCISLIPVNGRPRTGLKTSQCSSPSLSASPGSPTRPQIRQKIENKPLQEQLSVNQIKTEPVDYEFKPIVVASGINCSTPLQNGVFTGGGPLQATSSPQGMVQAVVLPTVGLVSPISINLSDIQNVLKVAVDGNVIRQVLENNQANLASKEQETINASPIQQGGHSVISAISLPLVDQDGTTKIIINYSLEQPSQLQVVPQNLKKENPVATNSCKSEKLPEDLTVKSEKDKSFEGGVNDSTCLLCDDCPGDINALPELKHYDLKQPTQPPPLPAAEAEKPESSVSSATGDGNLSPSQPPLKNLLSLLKAYYALNAQPSAEELSKIADSVNLPLDVVKKWFEKMQAGQISVQSSEPSSPEPGKVNIPAKNNDQPQSANANEPQDSTVNLQSPLKMTNSPVLPVGSTTNGSRSSTPSPSPLNLSSSRNTQGYLYTAEGAQEEPQVEPLDLSLPKQQGELLERSTITSVYQNSVYSVQEEPLNLSCAKKEPQKDSCVTDSEPVVNVIPPSANPINIAIPTVTAQLPTIVAIADQNSVPCLRALAANKQTILIPQVAYTYSTTVSPAVQEPPLKVIQPNGNQDERQDTSSEGVSNVEDQNDSDSTPPKKKMRKTENGMYACDLCDKIFQKSSSLLRHKYEHTGKRPHECGICKKAFKHKHHLIEHMRLHSGEKPYQCDKCGKRFSHSGSYSQHMNHRYSYCKREAEERDSTEQEEAGPEILSNEHVGARASPSQGDSDERESLTREEDEDSEKEEEEEDKEMEELQEEKECEKPQGDEEEEEEEEEVEEEEVEEAENEGEEAKTEGLMKDDRAESQASSLGQKVGESSEQVSEEKTNEA

SEQ ID NO: 9173 - protein, 1119 aa, Homo sapiens
MADGPRCKRRKQANPRRNNVTNYNTVVETNSDSDDEDKLHIVEEESVTDAADCEGVPEDDLPTDQTVLPGRSSEREGNAKNCWEDDRKEGQEILGPEAQADEAGCTVKDDECESDAENEQNHDPNVEEFLQQQDTAVIFPEAPEEDQRQGTPEASGHDENGTPDAFSQLLTCPYCDRGYKRFTSLKEHIKYRHEKNEDNFSCSLCSYTFAYRTQLERHMTSHKSGRDQRHVTQSGCNRKFKCTECGKAFKYKHHLKEHLRIHSGEKPYECPNCKKRFSHSGSYSSHISSKKCISLIPVNGRPRTGLKTSQCSSPSLSASPGSPTRPQIRQKIENKPLQEQLSVNQIKTEPVDYEFKPIVVASGINCSTPLQNGVFTGGGPLQATSSPQGMVQAVVLPTVGLVSPISINLSDIQNVLKVAVDGNVIRQVLENNQANLASKEQETINASPIQQGGHSVISAISLPLVDQDGTTKIIINYSLEQPSQLQVVPQNLKKENPVATNSCKSEKLPEDLTVKSEKDKSFEGGVNDSTCLLCDDCPGDINALPELKHYDLKQPTQPPPLPAAEAEKPESSVSSATGDGNLSPSQPPLKNLLSLLKAYYALNAQPSAEELSKIADSVNLPLDVVKKWFEKMQAGQISVQSSEPSSPEPGKVNIPAKNNDQPQSANANEPQDSTVNLQSPLKMTNSPVLPVGSTTNGSRSSTPSPSPLNLSSSRNTQGYLYTAEGAQEEPQVEPLDLSLPKQQGELLERSSLPEQCLFCPGRTLELVLKKEPQKDSCVTDSEPVVNVIPPSANPINIAIPTVTAQLPTIVAIADQNSVPCLRALAANKQTILIPQVAYTYSTTVSPAVQEPPLKVIQPNGNQDERQDTSSEGVSNVEDQNDSDSTPPKKKMRKTENGMYACDLCDKIFQKSSSLLRHKYEHTGKRPHECGICKKAFKHKHHLIEHMRLHSGEKPYQCDKCGKRFSHSGSYSQHMNHRYSYCKREAEERDSTEQEEAGPEILSNEHVGARASPSQGDSDERESLTREEDEDSEKEEEEEDKEMEELQEEKECEKPQGDEEEEEEEEEVEEEEVEEAENEGEEAKTEGLMKDDRAESQASSLGQKVGESSEQVSEEKTNEA

SEQ ID NO: 9174 - protein, 277 aa, Homo sapiens
MKVTNYNTVVETNSDSDDEDKLHIVEEESVTDAADCEGVPEDDLPTDQTVLPGRSSEREGNAKNCWEDDTGKEGQEILGPEAQADEAGCTVKDDECESDAENEQNHDPNVEEFLQQQDTAVIFPEAPEEDQRQGTPEASGHDENGTPDAFSQLLTCPYCDRGYKRFTSLKEHIKYRHEKNEDNFSCSLCSYTFAYRTQLERHMTSHKSGRDQRHVTQSGCNRKFKCTECGKAFKYKHHLKEHLRIHSGEKPYECPNCKKRFSHSGSYSSHISSKKCI

SEQ ID NO: 9175 - protein, 1104 aa, Homo sapiens
MADGPRCKRRKQANPRRNNVTNYNTVVETNSDSDDEDKLHIVEEESVTDAADCEGVPEDDLPTDQTVLPGRSSEREGNAKNCWEDDIKDDECESDAENEQNHDPNVEEFLQQQDTAVIFPEAPEEDQRQGTPEASGHDENGTPDAFSQLLTCPYCDRGYKRFTSLKEHIKYRHEKNEDNFSCSLCSYTFAYRTQLERHMTSHKSGRDQRHVTQSGCNRKFKCTECGKAFKYKHHLKEHLRIHSGEKPYECPNCKKRFSHSGSYSSHISSKKCISLIPVNGRPRTGLKTSQCSSPSLSASPGSPTRPQIRQKIENKPLQEQLSVNQIKTEPVDYEFKPIVVASGINCSTPLQNGVFTGGGPLQATSSPQGMVQAVVLPTVGLVSPISINLSDIQNVLKVAVDGNVIRQVLENNQANLASKEQETINASPIQQGGHSVISAISLPLVDQDGTTKIIINYSLEQPSQLQVVPQNLKKENPVATNSCKSEKLPEDLTVKSEKDKSFEGGVNDSTCLLCDDCPGDINALPELKHYDLKQPTQPPPLPAAEAEKPESSVSSATGDGNLSPSQPPLKNLLSLLKAYYALNAQPSAEELSKIADSVNLPLDVVKKWFEKMQAGQISVQSSEPSSPEPGKVNIPAKNNDQPQSANANEPQDSTVNLQSPLKMTNSPVLPVGSTTNGSRSSTPSPSPLNLSSSRNTQGYLYTAEGAQEEPQVEPLDLSLPKQQGELLERSTITSVYQNSVYSVQEEPLNLSCAKKEPQKDSCVTDSEPVVNVIPPSANPINIAIPTVTAQLPTIVAIADQNSVPCLRALAANKQTILIPQVAYTYSTTVSPAVQEPPLKVIQPNGNQDERQDTSSEGVSNVEDQNDSDSTPPKKKMRKTENGMYACDLCDKIFQKSSSLLRHKYEHTGKRPHECGICKKAFKHKHHLIEHMRLHSGEKPYQCDKCGKRFSHSGSYSQHMNHRYSYCKREAEERDSTEQEEAGPEILSNEHVGARASPSQGDSDERESLTREEDEDSEKEEEEEDKEMEELQEEKECEKPQGDEEEEEEEEEVEEEEVEEAENEGEEAKTEGLMKDDRAESQASSLGQKVGESSEQVSEEKTNEA

SEQ ID NO: 9176 - protein, 1214 aa, Homo sapiens
MKQPIMADGPRCKRRKQANPRRKNVVNYDNVVDTGSETDEEDKLHIAEDDGIANPLDQETSPASVPNHESSPHVSQALLPREEEEDEIREGGVEHPWHNNEILQASVDGPEEMKEDYDTMGPEATIQTAINNGTVKNANCTSDFEEYFAKRKLEERDGHAVSIEEYLQRSDTAIIYPEAPEELSRLGTPEANGQEENDLPPGTPDAFAQLLTCPYCDRGYKRLTSLKEHIKYRHEKNEENFSCPLCSYTFAYRTQLERHMVTHKPGTDQHQMLTQGAGNRKFKCTECGKAFKYKHHLKEHLRIHSGEKPYECPNCKKRFSHSGSYSSHISSKKCIGLISVNGRMRNNIKTGSSPNSVSSSPTNSAITQLRNKLENGKPLSMSEQTGLLKIKTEPLDFNDYKVLMATHGFSGTSPFMNGGLGATSPLGVHPSAQSPMQHLGVGMEAPLLGFPTMNSNLSEVQKVLQIVDNTVSRQKMDCKAEEISKLKGYHMKDPCSQPEEQGVTSPNIPPVGLPVVSHNGATKSIIDYTLEKVNEAKACLQSLTTDSRRQISNIKKEKLRTLIDLVTDDKMIENHNISTPFSCQFCKESFPGPIPLHQHERYLCKMNEEIKAVLQPHENIVPNKAGVFVDNKALLLSSVLSEKGMTSPINPYKDHMSVLKAYYAMNMEPNSDELLKISIAVGLPQEFVKEWFEQRKVYQYSNSRSPSLERSSKPLAPNSNPPTKDSLLPRSPVKPMDSITSPSIAELHNSVTNCDPPLRLTKPSHFTNIKPVEKLDHSRSNTPSPLNLSSTSSKNSHSSSYTPNSFSSEELQAEPLDLSLPKQMKEPKSIIATKNKTKASSISLDHNSVSSSSENSDEPLNLTFIKKEFSNSNNLDNKSTNPVFSMNPFSAKPLYTALPPQSAFPPATFMPPVQTSIPGLRPYPGLDQMSFLPHMAYTYPTGAATFADMQQRRKYQRKQGFQGELLDGAQDYMSGLDDMTDSDSCLSRKKIKKTESGMYACDLCDKTFQKSSSLLRHKYEHTGKRPHQCQICKKAFKHKHHLIEHSRLHSGEKPYQCDKCGKRFSHSGSYSQHMNHRYSYCKREAEEREAAEREAREKGHLEPTELLMNRAYLQSITPQGYSDSEERESMPRDGESEKEHEKEGEDGYGKLGRQDGDEEFEEEEEESENKSMDTDPETIRDEEETGDHSMDDSSEDGKMETKSDHEEDNMEDGM

SEQ ID NO: 9177 - protein, 424 aa, Homo sapiens
MADGPRCKRRKQANPRRKNVVNYDNVVDTGSETDEEDKLHIAEDDGIANPLDQETSPASVPNHESSPHVSQALLPREEEEDEIREGGVEHPWHNNEILQASVDGPEEMKEDYDTMGPEATIQTAINNGTVKNANCTSDFEEYFAKRKLEERDGHAVSIEEYLQRSDTAIIYPEAPEELSRLGTPEANGQEENDLPPGTPDAFAQLLTCPYCDRGYKRLTSLKEHIKYRHEKNEENFSCPLCSYTFAYRTQLERHMVTHKPGTDQHQMLTQGAGNRKFKCTECGKAFKYKHHLKEHLRIHSGEKPYECPNCKKRFSHSGSYSSHISSKKCIGLISVNGRMRNNIKTGSSPNSVSSSPTNSAITQLRNKLENGKPLSMSEQTGLLKSGRAQWLTPLIPALLEAEVGRSRGQKIETLLANMVEPRLY

SEQ ID NO: 9178 - protein, 439 aa, Homo sapiens
MKQPIMADGPRCKRRKQANPRRKNVVNYDNVVDTGSETDEEDKLHIAEDDGIANPLDQETSPASVPNHESSPHVSQALLPREEEEDEIREGGVEHPWHNNEILQASVDGPEEMKEDYDTMGPEATIQTAINNGTVKNANCTSDFEEYFAKRKLEERDGHAVSIEEYLQRSDTAIIYPEAPEELSRLGTPEANGQEENDLPPGTPDAFAQLLTCPYCDRGYKRLTSLKEHIKYRHEKNEENFSCPLCSYTFAYRTQLERHMVTHKPGTDQHQMLTQGAGNRKFKCTECGKAFKYKHHLKEHLRIHSGEKPYECPNCKKRFSHSGSYSSHISSKKCIGLISVNGRMRNNIKTGSSPNSVSSSPTNSAITQLRNKLENGKPLSMSEQTGLLKIKTEPLDFNDYKVLMATHGFSGTSPFMNGGLGATSPLGVHPSAQSPMQHL

SEQ ID NO: 9179 - protein, 135 aa, Homo sapiens
MKQPIMADGPRCKRRKQANPRRKNVVNYDNVVDTGSETDEEDKLHIAEDDGIANPLDQETSPASVPNHESSPHVSQALLPREEEEDEIREGGVEHPWHNNEILQASVDGPEEMKEDYDTMGPEATIQTAINNGTG

SEQ ID NO: 9180 - protein, 1214 aa, Homo sapiens; identical to SEQ ID NO: 9176

SEQ ID NO: 9181 - protein, 702 aa, Homo sapiens
MKQPIMADGPRCKRRKQANPRRKNVVNYDNVVDTGSETDEEDKLHIAEDDGIANPLDQETSPASVPNHESSPHVSQALLPREEEEDEIREGGVEHPWHNNEILQASVDGPEEMKEDYDTMGPEATIQTAINNGTVKNANCTSDFEEYFAKRKLEERDGHAVSIEEYLQRSDTAIIYPEAPEELSRLGTPEANGQEENDLPPGTPDAFAQLLTCPYCDRGYKRLTSLKEHIKYRHEKNEENFSCPLCSYTFAYRTQLERHMVTHKPGTDQHQMLTQGAGNRKFKCTECGKAFKYKHHLKEHLRIHSGEKPYECPNCKKRFSHSGSYSSHISSKKCIGLISVNGRMRNNIKTGSSPNSVSSSPTNSAITQLRNKLENGKPLSMSEQTGLLKIKTEPLDFNDYKVLMATHGFSGTSPFMNGGLGATSPLGVHPSAQSPMQHLGVGMEAPLLGFPTMNSNLSEVQKVLQIVDNTVSRQKMDCKAEEISKLKGYHMKDPCSQPEEQGVTSPNIPPVGLPVVSHNGATKSIIDYTLEKVNEAKACLQSLTTDSRRQISNIKKEKLRTLIDLVTDDKMIENHNISTPFSCQFCKESFPGPIPLHQHERYLCKMNEEIKAVLQPHENIVPNKAGVFVDNKALLLSSVLSEKGMTSPINPYKDHMSVLKAYYAMNMEPNSDELLKISIAVGLPQEFVKEWFEQRKVYQYSN

SEQ ID NO: 9182 - protein, 91 aa, Homo sapiens
MKQPIMADGPRCKRRKQANPRRKNVVNYDNVVDTGSETDEEDKLHIAEDDGIANPLDQETSPASVPNHESSPHVSQALLPREEEEDEIREG

SEQ ID NO: 9183 - protein, 63 aa, Homo sapiens
MKQPIMADGPRCKRRKQANPRRKNVVNYDNVVDTGSETDEEDKLHIAEDDGIANPLDQETSPA

SEQ ID NO: 9184 - protein, 1190 aa, Homo sapiens
MKQPIMADGPRCKRRKQANPRRKNVVNYDNVVDTGSETDEEDKLHIAEDDGIANPLDQETSPASVPNHESSPHVSQALLPREEEEDEIREGGVEHPWHNNEILQASVDGPVKNANCTSDFEEYFAKRKLEERDGHAVSIEEYLQRSDTAIIYPEAPEELSRLGTPEANGQEENDLPPGTPDAFAQLLTCPYCDRGYKRLTSLKEHIKYRHEKNEENFSCPLCSYTFAYRTQLERHMVTHKPGTDQHQMLTQGAGNRKFKCTECGKAFKYKHHLKEHLRIHSGEKPYECPNCKKRFSHSGSYSSHISSKKCIGLISVNGRMRNNIKTGSSPNSVSSSPTNSAITQLRNKLENGKPLSMSEQTGLLKIKTEPLDFNDYKVLMATHGFSGTSPFMNGGLGATSPLGVHPSAQSPMQHLGVGMEAPLLGFPTMNSNLSEVQKVLQIVDNTVSRQKMDCKAEEISKLKGYHMKDPCSQPEEQGVTSPNIPPVGLPVVSHNGATKSIIDYTLEKVNEAKACLQSLTTDSRRQISNIKKEKLRTLIDLVTDDKMIENHNISTPFSCQFCKESFPGPIPLHQHERYLCKMNEEIKAVLQPHENIVPNKAGVFVDNKALLLSSVLSEKGMTSPINPYKDHMSVLKAYYAMNMEPNSDELLKISIAVGLPQEFVKEWFEQRKVYQYSNSRSPSLERSSKPLAPNSNPPTKDSLLPRSPVKPMDSITSPSIAELHNSVTNCDPPLRLTKPSHFTNIKPVEKLDHSRSNTPSPLNLSSTSSKNSHSSSYTPNSFSSEELQAEPLDLSLPKQMKEPKSIIATKNKTKASSISLDHNSVSSSSENSDEPLNLTFIKKEFSNSNNLDNKSTNPVFSMNPFSAKPLYTALPPQSAFPPATFMPPVQTSIPGLRPYPGLDQMSFLPHMAYTYPTGAATFADMQQRRKYQRKQGFQGELLDGAQDYMSGLDDMTDSDSCLSRKKIKKTESGMYACDLCDKTFQKSSSLLRHKYEHTGKRPHQCQICKKAFKHKHHLIEHSRLHSGEKPYQCDKCGKRFSHSGSYSQHMNHRYSYCKREAEEREAAEREAREKGHLEPTELLMNRAYLQSITPQGYSDSEERESMPRDGESEKEHEKEGEDGYGKLGRQDGDEEFEEEEEESENKSMDTDPETIRDEEETGDHSMDDSSEDGKMETKSDHEEDNMEDGM

SEQ ID NO: 9185 - protein, 1214 aa, Homo sapiens; identical to SEQ ID NO: 9176

SEQ ID NO: 9186 - protein, 630 aa, Homo sapiens
MSISALGGRTKGKPLPPGEEERNNVLKQMKVRTTLKGDKSWITKQDESEGRTIELPSGRSRATSFSSAGEVPKPRPPSTRAPTGYIIRGVFTKPIDSSSQPQQQFPKANGTPKSAASLVRTANAGPPRPSSSGYKMTTEDYKKLAPYNIRRSSTSGDTEEEEEEEVVPFSSDEQKRRSEAASGVLRRTAPREHSYVLSAAKKSTGPTQETQAPFIAKRVEVVEEDGPSEKSQDPPALARSTPGSNRSSPGNKDKEAPCSRELQRDLAGEEAFRAPNTDAARSSAQLSDGNVGSGATGSRPEGLAAVDIGSERGSSSATSVSAVPADRKSNSTAAQEDAKADPKGALADYEGKDVATRVGEAWQERPGAPRGGQGDPAVPAQQPADPSTPERQSSPSGSEQLVRRESCGSSVLTDFEGKDVATKVGEAWQDRPGAPRGGQGDPAVPTQQPADPSTPEQQNSPSGSEQFVRRESCTSRVRSPSSCMVTVTVTATSEQPHIYIPAPASELDSSSTTKGILFVKEYVNASEVSSGKPVSARYSNVSSIEDSFAMEKKPPCGSTPYSERTTGGICTYCNREIRDCPKITLEHLGICCHEYCFKCGICSKPMGDLLDQIFIHRDTIHCGKCYEKLF

SEQ ID NO: 9187 - protein, 468 aa, Homo sapiens
MTTEDYKKLAPYNIRRSSTSGDTEEEEEEEVVPFSSDEQKRSSPTQETQAPFIAKRVEVVEEDGPSEKSQDPPALARSTPGSNRSSPGNKDKEAPCSRELQRDLAGEEAFRAPNTDAARSSAQLSDGNVGSGATGSRPEGLAAVDIGSERGSSSATSVSAVPADRKSNSTAAQEDAKADPKGALADYEGKDVATRVGEAWQERPGAPRGGQGDPAVPAQQPADPSTPERQSSPSGSEQLVRRESCGSSVLTDFEGKDVATKVGEAWQDRPGAPRGGQGDPAVPTQQPADPSTPEQQNSPSGSEQFVRRESCTSRVRSPSSCMVTVTVTATSEQPHIYIPAPASELDSSSTTKGILFVKEYVNASEVSSGKPVSARYSNVSSIEDSFAMEKKPPCGSTPYSERTTGGICTYCNREIRDCPKITLEHLGICCHEYCFKCGICSKPMGDLLDQIFIHRDTIHCGKCYEKLF

SEQ ID NO: 9188 - protein, 457 aa, Homo sapiens
MTTEDYKKLAPYNIRRSSTSGDTEEEEEEEVVPFSSDEQKRRSEAASGVLRRTAPREHSYVLSAAKKSTGSPTQETQAPFIAKRVEVVEEDGPSEKSQDPPALARSTPGSNSSRGEEIVRLQILTPRAGLRLVAPDVEGMSSSATSVSAVPADRKSNSTAAQEDAKADPKGALADYEGKDVATRVGEAWQERPGAPRGGQGDPAVPAQQPADPSTPERQSSPSGSEQLVRRESCGSSVLTDFEGKDVATKVGEAWQDRPGAPRGGQGDPAVPTQQPADPSTPEQQNSPSGSEQFVRRESCTSRVRSPSSCMVTVTVTATSEQPHIYIPAPASELDSSSTTKGILFVKEYVNASEVSSGKPVSARYSNVSSIEDSFAMEKKPPCGSTPYSERTTGGICTYCNREIRDCPKITLEHLGICCHEYCFKCGICSKPMGDLLDQIFIHRDTIHCGKCYEKLF

SEQ ID NO: 9189 - protein, 689 aa, Homo sapiens
MSISALGGRTKGKPLPPGEEERNNVLKQMKVRTTLKGDKSWITKQDESEGRTIELPSGRSRATSFSSAGEVPKPRPPSTRAPTGYIIRGVFTKPIDSSSQPQQQFPKANGTPKSAASLVRTANAGPPRPSSSGYKMTTEDYKKLAPYNIRRSSTSGDTEEEEEEEVVPFSSDEQKRRSEAASGVLRRTAPREHSYVLSAAKKSTGPTQETQAPFIAKRVEVVEEDGPSEKSQDPPALARSTPGSNSADGGRTKASRAIWIECLPSMPSPAGSQELSSRGEEIVRLQILTPRAGLRLVAPDVEGMRSSPGNKDKEAPCSRELQRDLAGEEAFRAPNTDAARSSAQLSDGNVGSGATGSRPEGLAAVDIGSERGSSSATSVSAVPADRKSNSTAAQEDAKADPKGALADYEGKDVATRVGEAWQERPGAPRGGQGDPAVPAQQPADPSTPERQSSPSGSEQLVRRESCGSSVLTDFEGKDVATKVGEAWQDRPGAPRGGQGDPAVPTQQPADPSTPEQQNSPSGSEQFVRRESCTSRVRSPSSCMVTVTVTATSEQPHIYIPAPASELDSSSTTKGILFVKEYVNASEVSSGKPVSARYSNVSSIEDSFAMEKKPPCGSTPYSERTTGGICTYCNREIRDCPKITLEHLGICCHEYCFKCGICSKPMGDLLDQIFIHRDTIHCGKCYEKLF

SEQ ID NO: 9190 - protein, 452 aa, Homo sapiens
MQRQAPYNIRRSSTSGDTEEEEEEEVVPFSSDEQKRRSEAASGVLRRTAPREHSYVLSAAKKSTGSPTQETQAPFIAKRVEVVEEDGPSEKSQDPPALARSTPGSNSSRGEEIVRLQILTPRAGLRLVAPDVEGMSSSATSVSAVPADRKSNSTAAQEDAKADPKGALADYEGKDVATRVGEAWQERPGAPRGGQGDPAVPAQQPADPSTPERQSSPSGSEQLVRRESCGSSVLTDFEGKDVATKVGEAWQDRPGAPRGGQGDPAVPTQQPADPSTPEQQNSPSGSEQFVRRESCTSRVRSPSSCMVTVTVTATSEQPHIYIPAPASELDSSSTTKGILFVKEYVNASEVSSGKPVSARYSNVSSIEDSFAMEKKPPCGSTPYSERTTGGICTYCNREIRDCPKITLEHLGICCHEYCFKCGICSKPMGDLLDQIFIHRDTIHCGKCYEKLF

SEQ ID NO: 9191 - protein, 475 aa, Homo sapiens
  VARIANT 1: note = MOD_RES - Any amino acid
XRSSTSGDTEEEEEEEVVPFSSDEQKRSLRRTAPREHSYVLSAAKKSTGSPTQETQAPFIAKRVEVVEEDGPSEKSQDPPALARSTPGSNRSSPGNKDKEAPCSRELQRDLAGEEAFRAPNTDAARSSAQLSDGNVGSGATGSRPEGLAAVDIGSERGSSSATSVSAVPADRKSNSTAAQEDAKADPKGALADYEGKDVATRVGEAWQERPGAPRGGQGDPAVPAQQPADPSTPERQSSPSGSEQLVRRESCGSSVLTDFEGKDVATKVGEAWQDRPGAPRGGQGDPAVPTQQPADPSTPEQQNSPSGSEQFVRRESCTSRVRSPSSCMVTVTVTATSEQPHIYIPAPASELDSSSTTKGILFVKEYVNASEVSSGKPVSARYSNVSSIEDSFAMEKKPPCGSTPYSERTTGGICTYCNREIRDCPKITLEHLGICCHEYCFKCGICSKPMGDLLDQIFIHRDTIHCGKCYEKLF

SEQ ID NO: 9192 - protein, 381 aa, Homo sapiens
MTTEDYKKLAPYNIRRSSTSGDTEEEEEEEVVPFSSDEQKRRSEAASGVLRRTAPREHSYVLSAAKKSTGSPTQETQAPFIAKRVEVVEEDGPSEKSQDPPALARSTPGSNSADGGRTKASRAIWIECLPSMPSPAGSQELSSRGEEIVRLQILTPRAGLRLVAPDVEGMRSSPGNKDKEAPCSRELQRDLAGEEAFRAPNTDAARSSAQLSDGNVGSGATGSRPEGLAAVDIGSERGSSSATSVSAVPADRKSNSTAAQEDAKADPKGALADYEGKDVATRVGEAWQERPGAPRGGQGDPAVPAQQPADPSTPERQSSPSGSEQLVRRESCGSSVLTDFEGKDVATKVGEAWQDRPGPSCTHSATCRSQYPRTAEQPQRI

SEQ ID NO: 9193 - protein, 211 aa, Homo sapiens
EEAFRAPNTDAARSSAQLSDGNVGSGATGSRPEGLAAVDIGSERGRLCAAASFASFLEDQDGHSANSQSCKPRPAAISSSATSVSAVPADRKSNSTAAQEDAKADPKGALADYEGKDVATRVGEAWQERPGAPRGGQGDPAVPAQQPADPSTPERQSSPSGSEQLVRRESCGSSVLTDFEGKDVATKVGEAWQDRPGAPRGGQGDPAVPTQ

SEQ ID NO: 9194 - protein, 221 aa, Homo sapiens
  VARIANT 1: note = MOD_RES - Any amino acid
XLRRTAPREHSYVLSAAKKSTGSPTQETQAPFIAKRVEVVEEDGPSEKSQDPPALARSTPGSNSADGGRTKASRAIWIECLPSMPSPAGSQELSSRGEEIVRLQILTPRAGLRLVAPDVEGMRSSPGNKDKEAPCSRELQRDLAGEEAFRAPNTDAARSSAQLSDGNVGSGATGSRPEGLAAVDIGSERGSSSATSVSAVPADRKSNSTAAQEDAKADPKG

SEQ ID NO: 9195 - protein, 137 aa, Homo sapiens
  VARIANT 1: note = MOD_RES - Any amino acid
XVLPRRHRHRLSRRGWRWWKRTGLLRRARTHLLWQDPLLAQTVRMEAGPKRLGQFGSSACQVCLAPLGARSSGLPQATKTRRPPAPESSRGTWLVRRLSGPPTQMLQAPVPLQSLLSLLIGRATAQQPRRMQRQTQR

SEQ ID NO: 9196 - protein, 690 aa, Homo sapiens
MSISALGGRTKGKPLPPGEEERNNVLKQMKVRTTLKGDKSWITKQDESEGRTIELPSGRSRATSFSSAGEVPKPRPPSTRAPTGYIIRGVFTKPIDSSSQPQQQFPKANGTPKSAASLVRTANAGPPRPSSSGYKMTTEDYKKLAPYNIRRSSTSGDTEEEEEEEVVPFSSDEQKRRSEAASGVLRRTAPREHSYVLSAAKKSTGSPTQETQAPFIAKRVEVVEEDGPSEKSQDPPALARSTPGSNSADGGRTKASRAIWIECLPSMPSPAGSQELSSRGEEIVRLQILTPRAGLRLVAPDVEGMRSSPGNKDKEAPCSRELQRDLAGEEAFRAPNTDAARSSAQLSDGNVGSGATGSRPEGLAAVDIGSERGSSSATSVSAVPADRKSNSTAAQEDAKADPKGALADYEGKDVATRVGEAWQERPGAPRGGQGDPAVPAQQPADPSTPERQSSPSGSEQLVRRESCGSSVLTDFEGKDVATKVGEAWQDRPGAPRGGQGDPAVPTQQPADPSTPEQQNSPSGSEQFVRRESCTSRVRSPSSCMVTVTVTATSEQPHIYIPAPASELDSSSTTKGILFVKEYVNASEVSSGKPVSARYSNVSSIEDSFAMEKKPPCGSTPYSERTTGGICTYCNREIRDCPKITLEHLGICCHEYCFKCGICSKPMGDLLDQIFIHRDTIHCGKCYEKLF

SEQ ID NO: 9197 - protein, 330 aa, Homo sapiens
  VARIANT 1: note = MOD_RES - Any amino acid
XSEMAARDELGLGGDSLEAMPVPAARGRPRITNGPEELAAPSPAALADYEGKDVATRVGEAWQERPGAPRGGQGDPAVPAQQPADPSTPERQSSPSGSEQLVRRESCGSSVLTDFEGKDVATKVGEAWQDRPGAPRGGQGDPAVPTQQPADPSTPEQQNSPSGSEQFVRRESCTSRVRSPSSCMVTVTVTATSEQPHIYIPAPASELDSSSTTKGILFVKEYVNASEVSSGKPVSARYSNVSSIEDSFAMEKKPPCGSTPYSERTTGGICTYCNREIRDCPKITLEHLGICCHEYCFKCGICSKPMGDLLDQIFIHRDTIHCGKCYEKLF

SEQ ID NO: 9198 - protein, 524 aa, Homo sapiens
MTTEDYKKLAPYNIRRSSTSGDTEEEEEEEVVPFSSDEQKRRSEAASGVLRRTAPREHSYVLSAAKKSTGPTQETQAPFIAKRVEVVEEDGPSEKSQDPPALARSTPGSNSSRGEEIVRLQILTPRAGLRLVAPDVEGMRSSPGNKDKEAPCSRELQRDLAGEEAFRAPNTDAARSSAQLSDGNVGSGATGSRPEGLAAVDIGSERGSSSATSVSAVPADRKSNSTAAQEDAKADPKGALADYEGKDVATRVGEAWQERPGAPRGGQGDPAVPAQQPADPSTPERQSSPSGSEQLVRRESCGSSVLTDFEGKDVATKVGEAWQDRPGAPRGGQGDPAVPTQQPADPSTPEQQNSPSGSEQFVRRESCTSRVRSPSSCMVTVTVTATSEQPHIYIPAPASELDSSSTTKGILFVKEYVNASEVSSGKPVSARYSNVSSIEDSFAMEKKPPCGSTPYSERTTGGICTYCNREIRDCPKITLEHLGICCHEYCFKCGICSKPMGDLLDQIFIHRDTIHCGKCYEKLF

SEQ ID NO: 9199 - protein, 721 aa, Homo sapiens
MSISALGGRTKGKPLPPGEEERNNVLKQMKVRTTLKGDKSWITKQDESEGRTIELPSGRSRATSFSSAGEVPKPRPPSTRAPTGYIIRGVFTKPIDSSSQPQQQFPKANGTPKSAASLVRTANAGPPRPSSSGYKMTTEDYKKLAPYNIRRSSTSGDTEEEEEEEVVPFSSDEQKRRSEAASGVLRRTAPREHSYVLSAAKKSTGPTQETQAPFIAKRVEVVEEDGPSEKSQDPPALARSTPGSNSADGGRTKASRAIWIECLPSMPSPAGSQELSSRGEEIVRLQILTPRAGLRLVAPDVEGMRSSPGNKDKEAPCSRELQRDLAGEEAFRAPNTDAARSSAQLSDGNVGSGATGSRPEGLAAVDIGSERGRLCAAASFASFLEDQDGHSANSQSCKPRPAAISSSATSVSAVPADRKSNSTAAQEDAKADPKGALADYEGKDVATRVGEAWQERPGAPRGGQGDPAVPAQQPADPSTPERQSSPSGSEQLVRRESCGSSVLTDFEGKDVATKVGEAWQDRPGAPRGGQGDPAVPTQQPADPSTPEQQNSPSGSEQFVRRESCTSRVRSPSSCMVTVTVTATSEQPHIYIPAPASELDSSSTTKGILFVKEYVNASEVSSGKPVSARYSNVSSIEDSFAMEKKPPCGSTPYSERTTGGICTYCNREIRDCPKITLEHLGICCHEYCFKCGICSKPMGDLLDQIFIHRDTIHCGKCYEKLF

SEQ ID NO: 9200 - protein, 692 aa, Homo sapiens
MSISALGGRTKGKPLPPGEEERNNVLKQMKVRTTLKGDKSWITKQDESEGRTIELPSGRSRATSFSSAGEVPKPRPPSTRAPTGYIIRGVFTKPIDSSSQPQQQFPKANGTPKSAASLVRTANAGPPRPSSSGYKMTTEDYKKLAPYNIRRSSTSGDTEEEEEEEVVPFSSDEQKRRSEAASGVLRRTAPREHSYVLSAAKKSTGPTQETQAPFIAKRVEVVEEDGPSEKSQDPPALARSTPGSNSADGGRTKASRAIWIECLPSMPSPAGSQELRSSPGNKDKEAPCSRELQRDLAGEEAFRAPNTDAARSSAQLSDGNVGSGATGSRPEGLAAVDIGSERGRLCAAASFASFLEDQDGHSANSQSCKPRPAAISSSATSVSAVPADRKSNSTAAQEDAKADPKGALADYEGKDVATRVGEAWQERPGAPRGGQGDPAVPAQQPADPSTPERQSSPSGSEQLVRRESCGSSVLTDFEGKDVATKVGEAWQDRPGAPRGGQGDPAVPTQQPADPSTPEQQNSPSGSEQFVRRESCTSRVRSPSSCMVTVTVTATSEQPHIYIPAPASELDSSSTTKGILFVKEYVNASEVSSGKPVSARYSNVSSIEDSFAMEKKPPCGSTPYSERTTGGICTYCNREIRDCPKITLEHLGICCHEYCFKCGICSKPMGDLLDQIFIHRDTIHCGKCYEKLF

SEQ ID NO: 9201 - protein, 632 aa, Homo sapiens
MQREEGFNTKMADGPDEYDTEAGCVPLLHPEEIKPQSHYNHGYGEPLGRKTHIDDYSTWDIVKATQYGIYERCRELVEAGYDVRQPDKENVTLLHWAAINNRIDLVKYYISKGAIVDQLGGDLNSTPLHWATRQGHLSMVVQLMKYGADPSLIDGEGCSCIHLAAQFGHTSIVAYLIAKGQDVDMMDQNGMTPLMWAAYRTHSVDPTRLLLTFNVSVNLGDKYHKNTALHWAVLAGNTTVISLLLEAGANVDAQNIKGESALDLAKQRKNVWMINHLQEARQAKGYDNPSFLRKLKADKEFRQKVMLGTPFLVIWLVGFIADLNIDSWLIKGLMYGGVWATVQFLSKSFFDHSMHSALPLGIYLATKFWMYVTWFFWFWNDLNFLFIHLPFLANSVALFYNFGKSWKSDPGIIKATEEQKKKTIVELAETGSLDLSIFCSTCLIRKPVRSKHCGVCNRCIAKFDHHCPWVGNCVGAGNHRYFMGYLFFLLFMICWMIYGCISYWGLHCETTYTKDGFWTYITQIATCSPWMFWMFLNSVFHFMWVAVLLMCQMYQISCLGITTNERMNARRYKHFKVTTTSIESPFNHGCVRNIIDFFEFRCCGLFRPVIVDWTRQYTIEYDQISGSGYQLV

SEQ ID NO: 9202 - protein, 216 aa, Homo sapiens
MSTIPKRAVCPFSTQRYGIYERCRELVEAGYDVRQPDKENVTLLHWAAINNRIDLVKYYISKGAIVDQLGGDLNSTPLHWATRQGHLSMVVQLMKYGADPSLIDGEGCSCIHLAAQFGHTSIVAYLIAKGQDVDMMDQNGMTPLMWAAYRTHSVDPTRLLLTFNVSVNLGDKYHKNTALHWAVLAGNTTVISLLLEAGANVDAQNIKAILRCHMAL

SEQ ID NO: 9203 - protein, 632 aa, Homo sapiens; identical to SEQ ID NO: 9201

SEQ ID NO: 9204 - DNA, 2667 bp, synthetic construct
  misc_feature 1..2667: note = Description of Artificial Sequence: Synthetic coding sequence
  source 1..2667: mol_type = other DNA
atgctgagcagactgttcagaatgcacggcctgttcgtggccagccacccctgggaggtgatcgtgggcaccgtgaccctgaccatctgcatgatgagcatgaacatgttcaccggcaacaacaagatctgcggctggaactacgagtgccccaagttcgaggaggacgtgctgagcagcgacatcatcatcctgaccatcaccagatgcatcgccatcctgtacatctacttccagttccagaacctgagacagctgggcagcaagtacatcctgggcatcgccggcctgttcaccatcttcagcagcttcgtgttcagcaccgtggtgatccacttcctggacaaggagctgaccggcctgaacgaggccctgcccttcttcctgctgctgatcgacctgagcagagccagcaccctggccaagttcgccctgagcagcaacagccaggacgaggtgagagagaacatcgccagaggcatggccatcctgggccccaccttcaccctggacgccctggtggagtgcctggtgatcggcgtgggcaccatgagcggcgtgagacagctggagatcatgtgctgcttcggctgcatgagcgtgctggccaactacttcgtgttcatgaccttcttccccgcctgcgtgagcctggtgctggagctgagcagagagagcagagagggcagacccatctggcagctgagccacttcgccagagtgctggaggaggaggagaacaagcccaaccccgtgacccagagagtgaagatgatcatgagcctgggcctggtgctggtgcacgcccacagcagatggatcgccgaccccagcccccagaacagcaccgccgacaccagcaaggtgagcctgggcctggacgagaacgtgagcaagagaatcgagcccagcgtgagcctgtggcagttctacctgagcaagatgatcagcatggacatcgagcaggtgatcaccctgagcctggccctgctgctggccgtgaagtacatcttcttcgagcagaccgagaccgagagcaccctgagcctgaagaaccccatcaccagccccgtggtgacccagaagaaggtgcccgacaactgctgcagaagagagcccatgctggtgagaaacaaccagaagtgcgacagcgtggaggaggagaccggcatcaacagagagagaaaggtggaggtgatcaagcccctggtggccgagaccgacacccccaacagagccaccttcgtggtgggcaacagcagcctgctggacaccagcagcgtgctggtgacccaggagcccgagatcgagctgcccagagagcccagacccaacgaggagtgcctgcagatcctgggcaacgccgagaagggcgccaagttcctgagcgacgccgagatcatccagctggtgaacgccaagcacatccccgcctacaagctggagaccctgatggagacccacgagagaggcgtgagcatcagaagacagctgctgagcaagaagctgagcgagcccagcagcctgcagtacctgccctacagagactacaactacagcctggtgatgggcgcctgctgcgagaacgtgatcggctacatgcccatccccgtgggcgtggccggccccctgtgcctggacgagaaggagttccaggtgcccatggccaccaccgagggctgcctggtggccagcaccaacagaggctgcagagccatcggcctgggcggcggcgccagcagcagagtgctggccgacggcatgaccagaggccccgtggtgagactgcccagagcctgcgacagcgccgaggtgaaggcctggctggagaccagcgagggcttcgccgtgatcaaggaggccttcgacagcaccagcagattcgccagactgcagaagctgcacaccagcatcgccggcagaaacctgtacatcagattccagagcagaagcggcgacgccatgggcatgaacatgatcagcaagggcaccgagaaggccctgagcaagctgcacgagtacttccccgagatgcagatcctggccgtgagcggcaactactgcaccgacaagaagcccgccgccatcaactggatcgagggcagaggcaagagcgtggtgtgcgaggccgtgatccccgccaaggtggtgagagaggtgctgaagaccaccaccgaggccatgatcgaggtgaacatcaacaagaacctggtgggcagcgccatggccggcagcatcggcggctacaacgcccacgccgccaacatcgtgaccgccatctacatcgcctgcggccaggacgccgcccagaacgtgggcagcagcaactgcatcaccctgatggaggccagcggccccaccaacgaggacctgtacatcagctgcaccatgcccagcatcgagatcggcaccgtgggcggcggcaccaacctgctgccccagcaggcctgcctgcagatgctgggcgtgcagggcgcctgcaaggacaaccccggcgagaacgccagacagctggccagaatcgtgtgcggcaccgtgatggccggcgagctgagcctgatggccgccctggccgccggccacctggtgaagagccacatgatccacaacagaagcaagatcaacctgcaggacctgcagggcgcctgcaccaagaagaccgcctag

SEQ ID NO: 9205 - DNA, 2508 bp, synthetic construct
  misc_feature 1..2508: note = Description of Artificial Sequence: Synthetic coding sequence
  source 1..2508: mol_type = other DNA
atgctgagcagactgttcagaatgcacggcctgttcgtggccagccacccctgggaggtgatcgtgggcaccgtgaccctgaccatctgcatgatgagcatgaacatgttcaccggcaacaacaagatctgcggctggaactacgagtgccccaagttcgaggaggacgtgctgagcagcgacatcatcatcctgaccatcaccagatgcatcgccatcctgtacatctacttccagttccagaacctgagacagctgggcagcaagtacatcctgggcatcgccggcctgttcaccatcttcagcagcttcgtgttcagcaccgtggtgatccacttcctggacaaggagctgaccggcctgaacgaggccctgcccttcttcctgctgctgatcgacctgagcagagccagcaccctggccaagttcgccctgagcagcaacagccaggacgaggtgagagagaacatcgccagaggcatggccatcctgggccccaccttcaccctggacgccctggtggagtgcctggtgatcggcgtgggcaccatgagcggcgtgagacagctggagatcatgtgctgcttcggctgcatgagcgtgctggccaactacttcgtgttcatgaccttcttccccgcctgcgtgagcctggtgctggagctgagcagagagagcagagagggcagacccatctggcagctgagccacttcgccagagtgctggaggaggaggagaacaagcccaaccccgtgacccagagagtgaagatgatcatgagcctgggcctggtgctggtgcacgcccacagcagatggatcgccgaccccagcccccagaacagcaccgccgacaccagcaaggtgagcctgggcctggacgagaacgtgagcaagagaatcgagcccagcgtgagcctgtggcagttctacctgagcaagatgatcagcatggacatcgagcaggtgatcaccctgagcctggccctgctgctggccgtgaagtacatcttcttcgagcagaccgagaccgagagcaccctgagcctgaagaaccccatcaccagccccgtggtgacccagaagaaggtgcccgacaactgctgcagaagagagcccatgctggtgagaaacaaccagaagtgcgacagcgtggaggaggagaccggcatcaacagagagagaaaggtggaggtgatcaagcccctggtggccgagaccgacacccccaacagagccaccttcgtggtgggcaacagcagcctgctggacaccagcagcgtgctggtgacccaggagcccgagatcgagctgcccagagagcccagacccaacgaggagtgcctgcagatcctgggcaacgccgagaagggcgccaagttcctgagcgacgccgagatcatccagctggtgaacgccaagcacatccccgcctacaagctggagaccctgatggagacccacgagagaggcgtgagcatcagaagacagctgctgagcaagaagctgagcgagcccagcagcctgcagtacctgccctacagagactacaactacagcctgctgggcggcggcgccagcagcagagtgctggccgacggcatgaccagaggccccgtggtgagactgcccagagcctgcgacagcgccgaggtgaaggcctggctggagaccagcgagggcttcgccgtgatcaaggaggccttcgacagcaccagcagattcgccagactgcagaagctgcacaccagcatcgccggcagaaacctgtacatcagattccagagcagaagcggcgacgccatgggcatgaacatgatcagcaagggcaccgagaaggccctgagcaagctgcacgagtacttccccgagatgcagatcctggccgtgagcggcaactactgcaccgacaagaagcccgccgccatcaactggatcgagggcagaggcaagagcgtggtgtgcgaggccgtgatccccgccaaggtggtgagagaggtgctgaagaccaccaccgaggccatgatcgaggtgaacatcaacaagaacctggtgggcagcgccatggccggcagcatcggcggctacaacgcccacgccgccaacatcgtgaccgccatctacatcgcctgcggccaggacgccgcccagaacgtgggcagcagcaactgcatcaccctgatggaggccagcggccccaccaacgaggacctgtacatcagctgcaccatgcccagcatcgagatcggcaccgtgggcggcggcaccaacctgctgccccagcaggcctgcctgcagatgctgggcgtgcagggcgcctgcaaggacaaccccggcgagaacgccagacagctggccagaatcgtgtgcggcaccgtgatggccggcgagctgagcctgatggccgccctggccgccggccacctggtgaagagccacatgatccacaacagaagcaagatcaacctgcaggacctgcagggcgcctgcaccaagaagaccgcctag

SEQ ID NO: 9206 - DNA, 798 bp, synthetic construct
  misc_feature 1..798: note = Description of Artificial Sequence: Synthetic coding sequence
  source 1..798: mol_type = other DNA
atgctgagcagactgttcagaatgcacggcctgttcgtggccagccacccctgggaggtgatcgtgggcaccgtgaccctgaccatctgcatgatgagcatgaacatgttcaccgagggcaccgagaaggccctgagcaagctgcacgagtacttccccgagatgcagatcctggccgtgagcggcaactactgcaccgacaagaagcccgccgccatcaactggatcgagggcagaggcaagagcgtggtgtgcgaggccgtgatccccgccaaggtggtgagagaggtgctgaagaccaccaccgaggccatgatcgaggtgaacatcaacaagaacctggtgggcagcgccatggccggcagcatcggcggctacaacgcccacgccgccaacatcgtgaccgccatctacatcgcctgcggccaggacgccgcccagaacgtgggcagcagcaactgcatcaccctgatggaggccagcggccccaccaacgaggacctgtacatcagctgcaccatgcccagcatcgagatcggcaccgtgggcggcggcaccaacctgctgccccagcaggcctgcctgcagatgctgggcgtgcagggcgcctgcaaggacaaccccggcgagaacgccagacagctggccagaatcgtgtgcggcaccgtgatggccggcgagctgagcctgatggccgccctggccgccggccacctggtgaagagccacatgatccacaacagaagcaagatcaacctgcaggacctgcagggcgcctgcaccaagaagaccgcctag

SEQ ID NO: 9207 - DNA, 57 bp, synthetic construct
  misc_feature 1..57: note = Description of Artificial Sequence: Synthetic coding sequence
  source 1..57: mol_type = other DNA
atgctgagcagactgttcagaatgcacggcctgttcgtggccagccacccctggtag

SEQ ID NO: 9208 - DNA, 336 bp, synthetic construct
  misc_feature 1..336: note = Description of Artificial Sequence: Synthetic coding sequence
  source 1..336: mol_type = other DNA
atgctgagcagactgttcagaatgcacggcctgttcgtggccagccacccctgggaggtgatcgtgggcaccgtgaccctgaccatctgcatgatgagcatgaacatgttcaccggcaacaacaagatctgcggctggaactacgagtgccccaagttcgaggaggacgtgctgagcagcgacatcatcatcctgaccatcaccagatgcatcgccatcctgtacatctacttccagttccagaacctgagacagctgggcagcaagtacatcctgggcatcgccggcctgttcaccatcttcagcagcttcgtgttcagcaccgtggtgatctag

SEQ ID NO: 9209 - DNA, 2667 bp, synthetic construct; identical to SEQ ID NO: 9204
  misc_feature 1..2667: note = Description of Artificial Sequence: Synthetic coding sequence
  source 1..2667: mol_type = other DNA

SEQ ID NO: 9210 - DNA, 2460 bp, synthetic construct
  misc_feature 1..2460: note = Description of Artificial Sequence: Synthetic coding sequence
  source 1..2460: mol_type = other DNA
atgcacagccaccccgtgtacctgctgcccgtgcccgagttcaccagcacctggatcaagatctacttcggctactgctggcccttccacaacttcctgaagttctgcatccagtacagctgccacagcctgctgagacagagaatcgacagactggaggaggccctgcccttcttcctgctgctgatcgacctgagcagagccagcaccctggccaagttcgccctgagcagcaacagccaggacgaggtgagagagaacatcgccagaggcatggccatcctgggccccaccttcaccctggacgccctggtggagtgcctggtgatcggcgtgggcaccatgagcggcgtgagacagctggagatcatgtgctgcttcggctgcatgagcgtgctggccaactacttcgtgttcatgaccttcttccccgcctgcgtgagcctggtgctggagctgagcagagagagcagagagggcagacccatctggcagctgagccacttcgccagagtgctggaggaggaggagaacaagcccaaccccgtgacccagagagtgaagatgatcatgagcctgggcctggtgctggtgcacgcccacagcagatggatcgccgaccccagcccccagaacagcaccgccgacaccagcaaggtgagcctgggcctggacgagaacgtgagcaagagaatcgagcccagcgtgagcctgtggcagttctacctgagcaagatgatcagcatggacatcgagcaggtgatcaccctgagcctggccctgctgctggccgtgaagtacatcttcttcgagcagaccgagaccgagagcaccctgagcctgaagaaccccatcaccagccccgtggtgacccagaagaaggtgcccgacaactgctgcagaagagagcccatgctggtgagaaacaaccagaagtgcgacagcgtggaggaggagaccggcatcaacagagagagaaaggtggaggtgatcaagcccctggtggccgagaccgacacccccaacagagccaccttcgtggtgggcaacagcagcctgctggacaccagcagcgtgctggtgacccaggagcccgagatcgagctgcccagagagcccagacccaacgaggagtgcctgcagatcctgggcaacgccgagaagggcgccaagttcctgagcgacgccgagatcatccagctggtgaacgccaagcacatccccgcctacaagctggagaccctgatggagacccacgagagaggcgtgagcatcagaagacagctgctgagcaagaagctgagcgagcccagcagcctgcagtacctgccctacagagactacaactacagcctggtgatgggcgcctgctgcgagaacgtgatcggctacatgcccatccccgtgggcgtggccggccccctgtgcctggacgagaaggagttccaggtgcccatggccaccaccgagggctgcctggtggccagcaccaacagaggctgcagagccatcggcctgggcggcggcgccagcagcagagtgctggccgacggcatgaccagaggccccgtggtgagactgcccagagcctgcgacagcgccgaggtgaaggcctggctggagaccagcgagggcttcgccgtgatcaaggaggccttcgacagcaccagcagattcgccagactgcagaagctgcacaccagcatcgccggcagaaacctgtacatcagattccagagcagaagcggcgacgccatgggcatgaacatgatcagcaagggcaccgagaaggccctgagcaagctgcacgagtacttccccgagatgcagatcctggccgtgagcggcaactactgcaccgacaagaagcccgccgccatcaactggatcgagggcagaggcaagagcgtggtgtgcgaggccgtgatccccgccaaggtggtgagagaggtgctgaagaccaccaccgaggccatgatcgaggtgaacatcaacaagaacctggtgggcagcgccatggccggcagcatcggcggctacaacgcccacgccgccaacatcgtgaccgccatctacatcgcctgcggccaggacgccgcccagaacgtgggcagcagcaactgcatcaccctgatggaggccagcggccccaccaacgaggacctgtacatcagctgcaccatgcccagcatcgagatcggcaccgtgggcggcggcaccaacctgctgccccagcaggcctgcctgcagatgctgggcgtgcagggcgcctgcaaggacaaccccggcgagaacgccagacagctggccagaatcgtgtgcggcaccgtgatggccggcgagctgagcctgatggccgccctggccgccggccacctggtgaagagccacatgatccacaacagaagcaagatcaacctgcaggacctgcagggcgcctgcaccaagaagaccgcctag

SEQ ID NO: 9211 - DNA, 1671 bp, synthetic construct
  misc_feature 1..1671: note = Description of Artificial Sequence: Synthetic coding sequence
  source 1..1671: mol_type = other DNA
atggccagaaccaccagccagctgtacgacgccgtgcccatccagagcagcgtggtgctgtgcagctgccccagccccagcatggtgagaacccagaccgagagcagcaccccccccggcatccccggcggcagcagacagggccccgccatggacggcaccgccgccgagcccagacccggcgccggcagcctgcagcacgcccagccccccccccagcccagaaagaagagacccgaggacttcaagttcggcaagatcctgggcgagggcagcttcagcaccgtggtgctggccagagagctggccaccagcagagagtacgccatcaagatcctggagaagagacacatcatcaaggagaacaaggtgccctacgtgaccagagagagagacgtgatgagcagactggaccaccccttcttcgtgaagctgtacttcaccttccaggacgacgagaagctgtacttcggcctgagctacgccaagaacggcgagctgctgaagtacatcagaaagatcggcagcttcgacgagacctgcaccagattctacaccgccgagatcgtgagcgccctggagtacctgcacggcaagggcatcatccacagagacctgaagcccgagaacatcctgctgaacgaggacatgcacatccagatcaccgacttcggcaccgccaaggtgctgagccccgagagcaagcaggccagagccaacagcttcgtgggcaccgcccagtacgtgagccccgagctgctgaccgagaagagcgcctgcaagagcagcgacctgtgggccctgggctgcatcatctaccagctggtggccggcctgccccccttcagagccggcaacgagtacctgatcttccagaagatcatcaagctggagtacgacttccccgagaagttcttccccaaggccagagacctggtggagaagctgctggtgctggacgccaccaagagactgggctgcgaggagatggagggctacggccccctgaaggcccaccccttcttcgagagcgtgacctgggagaacctgcaccagcagaccccccccaagctgaccgcctacctgcccgccatgagcgaggacgacgaggactgctacggcaactacgacaacctgctgagccagttcggctgcatgcaggtgagcagcagcagcagcagccacagcctgagcgccagcgacaccggcctgccccagagaagcggcagcaacatcgagcagtacatccacgacctggacagcaacagcttcgagctggacctgcagttcagcgaggacgagaagagactgctgctggagaagcaggccggcggcaacccctggcaccagttcgtggagaacaacctgatcctgaagatgggccccgtggacaagagaaagggcctgttcgccagaagaagacagctgctgctgaccgagggcccccacctgtactacgtggaccccgtgaacaaggtgctgaagggcgagatcccctggagccaggagctgagacccgaggccaagaacttcaagaccttcttcgtgcacacccccaacagaacctactacctgatggaccccagcggcaacgcccacaagtggtgcagaaagatccaggaggtgtggagacagagataccagagccaccccgacgccgccgtgcagtag

SEQ ID NO: 9212 - DNA, 1599 bp, synthetic construct
  misc_feature 1..1599: note = Description of Artificial Sequence: Synthetic coding sequence
  source 1..1599: mol_type = other DNA
atggccagaaccaccagccagctgtacgacgccgtgcccatccagagcagcgtggtgctgtgcagctgccccagccccagcatggtgagaacccagaccgagagcagcaccccccccggcatccccggcggcagcagacagggccccgccatggacggcaccgccgccgagcccagacccggcgccggcagcctgcagcacgcccagccccccccccagcccagaaagaagagacccgaggacttcaagttcggcaagatcctgggcgagggcagcttcagcaccgtggtgctggccagagagctggccaccagcagagagtacgccatcaagatcctggagaagagacacatcatcaaggagaacaaggtgccctacgtgaccagagagagagacgtgatgagcagactggaccaccccttcttcgtgaagctgtacttcaccttccaggacgacgagaagctgtacttcggcctgagctacgccaagaacggcgagctgctgaagtacatcagaaagatcggcagcttcgacgagacctgcaccagattctacaccgccgagatcgtgagcgccctggagtacctgcacggcaagggcatcatccacagagacctgaagcccgagaacatcctgctgaacgaggacatgcacatccagatcaccgacttcggcaccgccaaggtgctgagccccgagagcaagcagggcgtgagcgacctgtgggccctgggctgcatcatctaccagctggtggccggcctgccccccttcagagccggcaacgagtacctgatcttccagaagatcatcaagctggagtacgacttccccgagaagttcttccccaaggccagagacctggtggagaagctgctggtgctggacgccaccaagagactgggctgcgaggagatggagggctacggccccctgaaggcccaccccttcttcgagagcgtgacctgggagaacctgcaccagcagaccccccccaagctgaccgcctacctgcccgccatgagcgaggacgacgaggactgctacggcaactacgacaacctgctgagccagttcggctgcatgcaggtgagcagcagcagcagcagccacagcctgagcgccagcgacaccggcctgccccagagaagcggcagcaacatcgagcagtacatccacgacctggacagcaacagcttcgagctggacctgcagttcagcgaggacgagaagagactgctgctggagaagcaggccggcggcaacccctggcaccagttcgtggagaacaacctgatcctgaagatgggccccgtggacaagagaaagggcctgttcgccagaagaagacagctgctgctgaccgagggcccccacctgtactacgtggaccccgtgaacaaggtgctgaagggcgagatcccctggagccaggagctgagacccgaggccaagaacttcaagaccttcttcgtgcacacccccaacagaacctactacctgatggaccccagcggcaacgcccacaagtggtgcagaaagatccaggaggtgtggagacagagataccagagccaccccgacgccgccgtgcagtag

SEQ ID NO: 9213 - DNA, 1479 bp, synthetic construct
  misc_feature 1..1479: note = Description of Artificial Sequence: Synthetic coding sequence
  source 1..1479: mol_type = other DNA
agagcccaggacgagggcggccactgctggggcagcgccagcggcagaagaaccctgagaagaagaagagccgcccagagatgcggcggcggcgccagagccgacgccggccccatggccagaaccaccagccagctgtacgacgccgtgcccatccagagcagcgtggtgctgtgcagctgccccagccccagcatggtgagaacccagaccgagagcagcaccccccccggcatccccggcggcagcagacagggccccgccatggacggcaccgccgccgagcccagacccggcgccggcagcctgcagcacgcccagccccccccccagcccagaaagaagagacccgaggacttcaagttcggcaagatcctgggcgagggcagcttcagcaccgtggtgctggccagagagctggccaccagcagagagtacgccatcaagatcctggagaagagacacatcatcaaggagaacaaggtgccctacgtgaccagagagagagacgtgatgagcagactggaccaccccttcttcgtgaagctgtacttcaccttccaggacgacgagaagctgtacttcggcctgagctacgccaagaacggcgagctgctgaagtacatcagaaagatcggcagcttcgacgagacctgcaccagattctacaccgccgagatcgtgagcgccctggagtacctgcacggcaagggcatcatccacagagacctgaagcccgagaacatcctgctgaacgaggacatgcacatccagatcaccgacttcggcaccgccaaggtgctgagccccgagagcaagcaggccagagccaacagcttcgtgggcaccgcccagtacgtgagccccgagctgctgaccgagaagagcgcctgcaagagcagcgacctgtgggccctgggctgcatcatctaccagctggtggccggcctgccccccttcagagccggcaacgagtacctgatcttccagaagatcatcaagctggagtacgacttccccgagaagttcttccccaaggccagagacctggtggagaagctgctggtgctggacgccaccaagagactgggctgcgaggagatggagggctacggccccctgaaggcccaccccttcttcgagagcgtgacctgggagaacctgcaccagcagaccccccccaagctgaccgcctacctgcccgccatgagcgaggacgacgaggactgctacggcaactacgacaacctgctgagccagttcggctgcatgcaggtgagcagcagcagcagcagccacagcctgagcgccagcgacaccggcctgccccagagaagcggcagcaacatcgagcagtacatccacgacctggacagcaacagcttcgagctggacctgcagttcagcgaggacgagaagagactgctgctggagaagcaggccggcggcaacccctgcctgaccggcagaatcatctag

SEQ ID NO: 9214 - DNA, 1290 bp, synthetic construct
  misc_feature 1..1290: note = Description of Artificial Sequence: Synthetic coding sequence
  source 1..1290: mol_type = other DNA
atggccagaaccaccagccagctgtacgacgccgtgcccatccagagcagcgtggtgctgtgcagctgccccagccccagcatggtgagaacccagaccgagagcagcaccccccccggcatccccggcggcagcagacagggccccgccatggacggcaccgccgccgagcccagacccggcgccggcagcctgcagcacgcccagccccccccccagcccagaaagaagagacccgaggacttcaagttcggcaagatcctgggcgagggcagcttcagcaccgtggtgctggccagagagctggccaccagcagagagtacgccaccagagccaacagcttcgtgggcaccgcccagtacgtgagccccgagctgctgaccgagaagagcgcctgcaagagcagcgacctgtgggccctgggctgcatcatctaccagctggtggccggcctgccccccttcagagccggcaacgagtacctgatcttccagaagatcatcaagctggagtacgacttccccgagaagttcttccccaaggccagagacctggtggagaagctgctggtgctggacgccaccaagagactgggctgcgaggagatggagggctacggccccctgaaggcccaccccttcttcgagagcgtgacctgggagaacctgcaccagcagaccccccccaagctgaccgcctacctgcccgccatgagcgaggacgacgaggactgctacggcaactacgacaacctgctgagccagttcggctgcatgcaggtgagcagcagcagcagcagccacagcctgagcgccagcgacaccggcctgccccagagaagcggcagcaacatcgagcagtacatccacgacctggacagcaacagcttcgagctggacctgcagttcagcgaggacgagaagagactgctgctggagaagcaggccggcggcaacccctggcaccagttcgtggagaacaacctgatcctgaagatgggccccgtggacaagagaaagggcctgttcgccagaagaagacagctgctgctgaccgagggcccccacctgtactacgtggaccccgtgaacaaggtgctgaagggcgagatcccctggagccaggagctgagacccgaggccaagaacttcaagaccttcttcgtgcacacccccaacagaacctactacctgatggaccccagcggcaacgcccacaagtggtgcagaaagatccaggaggtgtggagacagagataccagagccaccccgacgccgccgtgcagtag

SEQ ID NO: 9215 - DNA, 5121 bp, synthetic construct
  misc_feature 1..5121: note = Description of Artificial Sequence: Synthetic coding sequence
  source 1..5121: mol_type = other DNA
atgggcgtgcccaagttctacagatggatcagcgagagatacccctgcctgagcgaggtggtgaaggagcaccagatccccgagttcgacaacctgtacctggacatgaacggcatcatccaccagtgcagccaccccaacgacgacgacgtgcacttcagaatcagcgacgacaagatcttcaccgacatcttccactacctggaggtgctgttcagaatcatcaagcccagaaaggtgttcttcatggccgtggacggcgtggcccccagagccaagatgaaccagcagagaggcagaagattcagaagcgccaaggaggccgaggacaagatcaagaaggccatcgagaagggcgagaccctgcccaccgaggccagattcgacagcaactgcatcacccccggcaccgagttcatggccagactgcacgagcacctgaagtacttcgtgaacatgaagatcagcaccgacaagagctggcagggcgtgaccatctacttcagcggccacgagacccccggcgagggcgagcacaagatcatggagttcatcagaagcgagaaggccaagcccgaccacgaccccaacaccagacactgcctgtacggcctggacgccgacctgatcatgctgggcctgaccagccacgaggcccacttcagcctgctgagagaggaggtgagattcggcggcaagaagacccagagagtgtgcgcccccgaggagaccaccttccacctgctgcacctgagcctgatgagagagtacatcgactacgagttcagcgtgctgaaggagaagatcaccttcaagtacgacatcgagagaatcatcgacgactggatcctgatgggcttcctggtgggcaacgacttcatcccccacctgccccacctgcacatcaaccacgacgccctgcccctgctgtacggcacctacgtgaccatcctgcccgagctgggcggctacatcaacgagagcggccacctgaacctgcccagattcgagaagtacctggtgaagctgagcgacttcgacagagagcacttcagcgaggtgttcgtggacctgaagtggttcgagagcaaggtgggcaacaagtacctgaacgaggccgccggcgtggccgccgaggaggccagaaactacaaggagaagaagaagctgaagggccaggagaacagcctgtgctggaccgccctggacaagaacgagggcgagatgatcaccagcaaggacaacctggaggacgagaccgaggacgacgacctgttcgagaccgagttcagacagtacaagagaacctactacatgaccaagatgggcgtggacgtggtgagcgacgacttcctggccgaccaggccgcctgctacgtgcaggccatccagtggatcctgcactactactaccacggcgtgcagagctggagctggtactacccctaccactacgcccccttcctgagcgacatccacaacatcagcaccctgaagatccacttcgagctgggcaagcccttcaagcccttcgagcagctgctggccgtgctgcccgccgccagcaagaacctgctgcccgcctgctaccagcacctgatgaccaacgaggacagccccatcatcgagtactacccccccgacttcaagaccgacctgaacggcaagcagcaggagtgggaggccgtggtgctgatccccttcatcgacgagaagagactgctggaggccatggagacctgcaaccacagcctgaagaaggaggagagaaagagaaaccagcacagcgagtgcctgatgtgctggtacgacagagacaccgagttcatctaccccagcccctggcccgagaagttccccgccatcgagagatgctgcaccagatacaagatcatcagcctggacgcctggagagtggacatcaacaagaacaagatcaccagaatcgaccagaaggccctgtacttctgcggcttccccaccctgaagcacatcagacacaagttcttcctgaagaagagcggcgtgcaggtgttccagcagagcagcagaggcgagaacatgatgctggagatcctggtggacgccgagagcgacgagctgaccgtggagaacgtggccagcagcgtgctgggcaagagcgtgttcgtgaactggccccacctggaggaggccagagtggtggccgtgagcgacggcgagaccaagttctacctggaggagccccccggcacccagaagctgtacagcggcagaaccgccccccccagcaaggtggtgcacctgggcgacaaggagcagagcaactgggccaaggaggtgcagggcatcagcgagcactacctgagaagaaagggcatcatcatcaacgagaccagcgccgtggtgtacgcccagctgctgaccggcagaaagtaccagatcaaccagaacggcgaggtgagactggagaagcagtggagcaagcaggtggtgcccttcgtgtaccagaccatcgtgaaggacatcagagccttcgacagcagattcagcaacatcaagaccctggacgacctgttccccctgagaagcatggtgttcatgctgggcaccccctactacggctgcaccggcgaggtgcaggacagcggcgacgtgatcaccgagggcagaatcagagtgatcttcagcatcccctgcgagcccaacctggacgccctgatccagaaccagcacaagtacagcatcaagtacaaccccggctacgtgctggccagcagactgggcgtgagcggctacctggtgagcagattcaccggcagcatcttcatcggcagaggcagcagaagaaacccccacggcgaccacaaggccaacgtgggcctgaacctgaagttcaacaagaagaacgaggaggtgcccggctacaccaagaaggtgggcagcgagtggatgtacagcagcgccgccgagcagctgctggccgagtacctggagagagcccccgagctgttcagctacatcgccaagaacagccaggaggacgtgttctacgaggacgacatctggcccggcgagaacgagaacggcgccgagaaggtgcaggagatcatcacctggctgaagggccaccccgtgagcaccctgagcagaagcagctgcgacctgcagatcctggacgccgccatcgtggagaagatcgaggaggaggtggagaagtgcaagcagagaaagaacaacaagaaggtgagagtgaccgtgaagccccacctgctgtacagacccctggagcagcagcacggcgtgatccccgacagagacgccgagttctgcctgttcgacagagtggtgaacgtgagagagaacttcagcgtgcccgtgggcctgagaggcaccatcatcggcatcaagggcgccaacagagaggccgacgtgctgttcgaggtgctgttcgacgaggagttccccggcggcctgaccatcagatgcagccccggcagaggctacagactgcccaccagcgccctggtgaacctgagccacggcagcagaagcgagaccggcaaccagaagctgaccgccatcgtgaagccccagcccgccgtgcaccagcacagcagcagcagcagcgtgagcagcggccacctgggcgccctgaaccacagcccccagagcctgttcgtgcccacccaggtgcccaccaaggacgacgacgagttctgcaacatctggcagagcctgcagggcagcggcaagatgcagtacttccagcccaccatccaggagaagggcgccgtgctgccccaggagatcagccaggtgaaccagcaccacaagagcggcttcaacgacaacagcgtgaagtaccagcagagaaagcacgacccccacagaaagttcaaggaggagtgcaagagccccaaggccgagtgctggagccagaagatgagcaacaagcagcccaacagcggcatcgagaacttcctggccagcctgaacatcagcaaggagaacgaggtgcagagcagccaccacggcgagccccccagcgaggagcacctgagcccccagagcttcgccatgggcaccagaatgctgaaggagatcctgaagatcgacggcagcaacaccgtggaccacaagaacgagatcaagcagatcgccaacgagatccccgtgagcagcaacagaagagacgagtacggcctgcccagccagcccaagcagaacaagaagctggccagctacatgaacaagccccacagcgccaacgagtaccacaacgtgcagagcatggacaacatgtgctggcccgcccccagccagatcccccccgtgagcacccccgtgaccgagctgagcagaatctgcagcctggtgggcatgccccagcccgacttcagcttcctgagaatgccccagaccatgaccgtgtgccaggtgaagctgagcaacggcctgctggtgcacggcccccagtgccacagcgagaacgaggccaaggagaaggccgccctgttcgccctgcagcagctgggcagcctgggcatgaacttccccctgcccagccaggtgttcgccaactaccccagcgccgtgccccccggcaccatcccccccgccttccccccccccaccggctgggaccactacggcagcaactacgccctgggcgccgccaacatcatgcccagcagcagccacctgttcggcagcatgccctggggccccagcgtgcccgtgcccggcaagcccttccaccacaccctgtacagcggcaccatgcccatggccggcggcatccccggcggcgtgcacaaccagttcatccccctgcaggtgaccaagaagagagtggccaacaagaagaacttcgagaacaaggaggcccagagcagccaggccacccccgtgcagaccagccagcccgacagcagcaacatcgtgaaggtgagccccagagagagcagcagcgccagcctgaagagcagccccatcgcccagcccgccagcagcttccaggtggagaccgccagccagggccacagcatcagccaccacaagagcacccccatcagcagcagcagaagaaagagcagaaagctggccgtgaacttcggcgtgagcaagcccagcgagtag

SEQ ID NO: 9216 - DNA, 5085 bp, synthetic construct
  misc_feature 1..5085: note = Description of Artificial Sequence: Synthetic coding sequence
  source 1..5085: mol_type = other DNA
atgggcgtgcccaagttctacagatggatcagcgagagatacccctgcctgagcgaggtggtgaaggagcaccagatccccgagttcgacaacctgtacctggacatgaacggcatcatccaccagtgcagccaccccaacgacgacgacgtgcacttcagaatcagcgacgacaagatcttcaccgacatcttccactacctggaggtgctgttcagaatcatcaagcccagaaaggtgttcttcatggccgtggacggcgtggcccccagagccaagatgaaccagcagagaggcagaagattcagaagcgccaaggaggccgaggacaagatcaagaaggccatcgagaagggcgagaccctgcccaccgaggccagattcgacagcaactgcatcacccccggcaccgagttcatggccagactgcacgagcacctgaagtacttcgtgaacatgaagatcagcaccgacaagagctggcagggcgtgaccatctacttcagcggccacgagacccccggcgagggcgagcacaagatcatggagttcatcagaagcgagaaggccaagcccgaccacgaccccaacaccagacactgcctgtacggcctggacgccgacctgatcatgctgggcctgaccagccacgaggcccacttcagcctgctgagagaggaggtgagattcggcggcaagaagacccagagagtgtgcgcccccgaggagaccaccttccacctgctgcacctgagcctgatgagagagtacatcgactacgagttcagcgtgctgaaggagaagatcaccttcaagtacgacatcgagagaatcatcgacgactggatcctgatgggcttcctggtgggcaacgacttcatcccccacctgccccacctgcacatcaaccacgacgccctgcccctgctgtacggcacctacgtgaccatcctgcccgagctgggcggctacatcaacgagagcggccacctgaacctgcccagattcgagaagtacctggtgaagctgagcgacttcgacagagagcacttcagcgaggtgttcgtggacctgaagtggttcgagagcaaggtgggcaacaagtacctgaacgaggccgccggcgtggccgccgaggaggccagaaactacaaggagaagaagaagctgaagggccaggagaacagcctgtgctggaccgccctggacaagaacgagggcgagatgatcaccagcaaggacaacctggaggacgagaccgaggacgacgacctgttcgagaccgagttcagacagtacaagagaacctactacatgaccaagatgggcgtggacgtggtgagcgacgacttcctggccgaccaggccgcctgctacgtgcaggccatccagtggatcctgcactactactaccacggcgtgcagagctggagctggtactacccctaccactacgcccccttcctgagcgacatccacaacatcagcaccctgaagatccacttcgagctgggcaagcccttcaagcccttcgagcagctgctggccgtgctgcccgccgccagcaagaacctgctgcccgcctgctaccagcacctgatgaccaacgaggacagccccatcatcgagtactacccccccgacttcaagaccgacctgaacggcaagcagcaggagtgggaggccgtggtgctgatccccttcatcgacgagaagagactgctggaggccatggagacctgcaaccacagcctgaagaaggaggagagaaagagaaaccagcacagcgagtgcctgatgtgctggtacgacagagacaccgagttcatctaccccagcccctggcccgagaagttccccgccatcgagagatgctgcaccagatacaagatcatcagcctggacgcctggagagtggacatcaacaagaacaagatcaccagaatcgaccagaaggccctgtacttctgcggcttccccaccctgaagcacatcagacacaagttcttcctgaagaagagcggcgtgcaggtgttccagcagagcagcagaggcgagaacatgatgctggagatcctggtggacgccgagagcgacgagctgaccgtggagaacgtggccagcagcgtgctgggcaagagcgtgttcgtgaactggccccacctggaggaggccagagtggtggccgtgagcgacggcgagaccaagttctacctggaggagccccccggcacccagaagctgtacagcggcagaaccgccccccccagcaaggtggtgcacctgggcgacaaggagcagagcaactgggccaaggaggtgcagggcatcagcgagcactacctgagaagaaagggcatcatcatcaacgagaccagcgccgtggtgtacgcccagctgctgaccggcagaaagtaccagatcaaccagaacggcgaggtgagactggagaagcagtggagcaagcaggtggtgcccttcgtgtaccagaccatcgtgaaggacatcagagccttcgacagcagattcagcaacatcaagaccctggacgacctgttccccctgagaagcatggtgttcatgctgggcaccccctactacggctgcaccggcgaggtgcaggacagcggcgacgtgatcaccgagggcagaatcagagtgatcttcagcatcccctgcgagcccaacctggacgccctgatccagaaccagcacaagtacagcatcaagtacaaccccggctacgtgctggccagcagactgggcgtgagcggctacctggtgagcagattcaccggcagcatcttcatcggcagaggcagcagaagaaacccccacggcgaccacaaggccaacgtgggcctgaacctgaagttcaacaagaagaacgaggaggtgcccggctacaccaagaaggtgggcagcgagtggatgtacagcagcgccgccgagcagctgctggccgagtacctggagagagcccccgagctgttcagctacatcgccaagaacagccaggaggacgtgttctacgaggacgacatctggcccggcgagaacgagaacggcgccgagaaggtgcaggagatcatcacctggctgaagggccaccccgtgagcaccctgagcagaagcagctgcgacctgcagatcctggacgccgccatcgtggagaagatcgaggaggaggtggagaagtgcaagcagagaaagaacaacaagaaggtgagagtgaccgtgaagccccacctgctgtacagacccctggagcagcagcacggcgtgatccccgacagagacgccgagttctgcctgttcgacagagtggtgaacgtgagagagaacttcagcgtgcccgtgggcctgagaggcaccatcatcggcatcaagggcgccaacagagaggccgacgtgctgttcgaggtgctgttcgacgaggagttccccggcggcctgaccatcagatgcagccccggcagaggctacagactgcccaccagcgccctggtgaacctgagccacggcagcagaagcgagaccggcaaccagaagctgaccgccatcgtgaagccccagcccgccgtgcaccagcacagcagcagcagcagcgtgagcagcggccacctgggcgccctgaaccacagcccccagagcctgttcgtgcccacccaggtgcccaccaaggacgacgacgagttctgcaacatctggcagagcctgcagggcagcggcaagatgcagtacttccagcccaccatccaggagaagggcgccgtgctgccccaggagatcagccaggtgaaccagcaccacaagagcggcttcaacgacaacagcgtgaagtaccagcagagaaagcacgacccccacagaaagttcaaggaggagtgcaagagccccaaggccgagtgctggagccagaagatgagcaacaagcagcccaacagcggcatcgagaacttcctggccagcctgaacatcagcaaggagaacgaggtgcagagcagccaccacggcgagccccccagcgaggagcacctgagcccccagagcttcgccatgaagggcaccagaatgctgaaggagatcctgaagatcgacggcagcaacaccgtggaccacaagaacgagatcaagcagatcgccaacgagatccccgtgagcagcaacagaagagacgagtacggcctgcccagccagcccaagcagaacaagaagctggccagctacatgaacaagccccacagcgccaacgagtaccacaacgtgcagagcatggacaacatgtgctggcccgcccccagccagatcccccccgtgagcacccccgtgaccgagctgagcagaatctgcagcctggtgggcatgccccagcccgacttcagcttcctgagaatgccccagaccatgaccgtgtgccaggtgaagctgagcaacggcctgctggtgcacggcccccagtgccacagcgagaacgaggccaaggagaaggccgccctgttcgccctgcagcagctgggcagcctgggcatgaacttccccctgcccagccaggtgttcgccaactaccccagcgccgtgccccccggcaccatcccccccgccttccccccccccaccgccaacatcatgcccagcagcagccacctgttcggcagcatgccctggggccccagcgtgcccgtgcccggcaagcccttccaccacaccctgtacagcggcaccatgcccatggccggcggcatccccggcggcgtgcacaaccagttcatccccctgcaggtgaccaagaagagagtggccaacaagaagaacttcgagaacaaggaggcccagagcagccaggccacccccgtgcagaccagccagcccgacagcagcaacatcgtgaaggtgagccccagagagagcagcagcgccagcctgaagagcagccccatcgcccagcccgccagcagcttccaggtggagaccgccagccagggccacagcatcagccaccacaagagcacccccatcagcagcagcagaagaaagagcagaaagctggccgtgaacttcggcgtgagcaagcccagcgagtag

SEQ ID NO: 9217 - DNA, 1380 bp, synthetic construct
  misc_feature 1..1380: note = Description of Artificial Sequence: Synthetic coding sequence
  source 1..1380: mol_type = other DNA
atgggcgtgcccaagttctacagatggatcagcgagagatacccctgcctgagcgaggtggtgaaggagcaccagatccccgagttcgacaacctgtacctggacatgaacggcatcatccaccagtgcagccaccccaacgacgacgacgtgcacttcagaatcagcgacgacaagatcttcaccgacatcttccactacctggaggtgctgttcagaatcatcaagcccagaaaggtgttcttcatggccgtggacggcgtggcccccagagccaagatgaaccagcagagaggcagaagattcagaagcgccaaggaggccgaggacaagatcaagaaggccatcgagaagggcgagaccctgcccaccgaggccagattcgacagcaactgcatcacccccggcaccgagttcatggccagactgcacgagcacctgaagtacttcgtgaacatgaagatcagcaccgacaagagctggcagggcgtgaccatctacttcagcggccacgagacccccggcgagggcgagcacaagatcatggagttcatcagaagcgagaaggccaagcccgaccacgaccccaacaccagacactgcctgtacggcctggacgccgacctgatcatgctgggcctgaccagccacgaggcccacttcagcctgctgagagaggaggtgagattcggcggcaagaagacccagagagtgtgcgcccccgaggagaccaccttccacctgctgcacctgagcctgatgagagagtacatcgactacgagttcagcgtgctgaaggagaagatcaccttcaagtacgacatcgagagaatcatcgacgactggatcctgatgggcttcctggtgggcaacgacttcatcccccacctgccccacctgcacatcaaccacgacgccctgcccctgctgtacggcacctacgtgaccatcctgcccgagctgggcggctacatcaacgagagcggccacctgaacctgcccagattcgagaagtacctggtgaagctgagcgacttcgacagagagcacttcagcgaggtgttcgtggacctgaagtggttcgagagcaaggtgggcaacaagtacctgaacgaggccgccggcgtggccgccgaggaggccagaaactacaaggagaagaagaagctgaagggccaggagaacagcctgtgctggaccgccctggacaagaacgagggcgagatgatcaccagcaaggacaacctggaggacgagaccgaggacgacgacctgttcgagaccgagttcagacagtacaagagaacctactacatgaccaagatgggcgtggacgtggtgagcgagtacgtgttcgccaacgccttcatcctgaagtag

SEQ ID NO: 9218 - DNA, 750 bp, synthetic construct
  misc_feature 1..750: note = Description of Artificial Sequence: Synthetic coding sequence
  source 1..750: mol_type = other DNA
atgctgggcctgaccagccacgaggcccacttcagcctgctgagagaggaggtgagattcggcggcaagaagacccagagagtgtgcgcccccgaggagaccaccttccacctgctgcacctgagcctgatgagagagtacatcgactacgagttcagcgtgctgaaggagaagatcaccttcaagtacgacatcgagagaatcatcgacgactggatcctgatgggcttcctggtgggcaacgacttcatcccccacctgccccacctgcacatcaaccacgacgccctgcccctgctgtacggcacctacgtgaccatcctgcccgagctgggcggctacatcaacgagagcggccacctgaacctgcccagattcgagaagtacctggtgaagctgagcgacttcgacagagagcacttcagcgaggtgttcgtggacctgaagtggttcgagagcaaggtgggcaacaagtacctgaacgaggccgccggcgtggccgccgaggaggccagaaactacaaggagaagaagaagctgaagggccaggagaacagcctgtgctggaccgccctggacaagaacgagggcgagatgatcaccagcaaggacaacctggaggacgagaccgaggacgacgacctgttcgagaccgagttcagacagtacaagagaacctactacatgaccaagatgggcgtggacgtggtgagcgagtacgtgttcgccaacgccttcatcctgaagtag

SEQ ID NO: 9219 - DNA, 3483 bp, synthetic construct
  misc_feature 1..3483: note = Description of Artificial Sequence: Synthetic coding sequence
  source 1..3483: mol_type = other DNA
tgaaccaacgaggacagccccatcatcgagtactacccccccgacttcaagaccgacctgaacggcaagcagcaggagtgggaggccgtggtgctgatccccttcatcgacgagagactgctggaggccatggagacctgcaaccacagcctgaagaaggaggagagaaagagaaaccagcacagcgagtgcctgatgtgctggtacgacagagacaccgagttcatctaccccagcccctggcccgagaagttccccgccatcgagagatgctgcaccagatacaagatcatcagcctggacgcctggagagtggacatcaacaagaacaagatcaccagaatcgaccagaaggccctgtacttctgcggcttccccaccctgaagcacatcagacacaagttcttcctgaagaagagcggcgtgcaggtgttccagcagagcagcagaggcgagaacatgatgctggagatcctggtggacgccgagagcgacgagctgaccgtggagaacgtggccagcagcgtgctgggcaagagcgtgttcgtgaactggccccacctggaggaggccagagtggtggccgtgagcgacggcgagaccaagttctacctggaggagccccccggcacccagaagctgtacagcggcagaaccgccccccccagcaaggtggtgcacctgggcgacaaggagcagagcaactgggccaaggaggtgcagggcatcagcgagcactacctgagaagaaagggcatcatcatcaacgagaccagcgccgtggtgtacgcccagctgctgaccggcagaaagtaccagatcaaccagaacggcgaggtgagactggagaagcagtggagcaagcaggtggtgcccttcgtgtaccagaccatcgtgaaggacatcagagccttcgacagcagattcagcaacatcaagaccctggacgacctgttccccctgagaagcatggtgttcatgctgggcaccccctactacggctgcaccggcgaggtgcaggacagcggcgacgtgatcaccgagggcagaatcagagtgatcttcagcatcccctgcgagcccaacctggacgccctgatccagaaccagcacaagtacagcatcaagtacaaccccggctacgtgctggccagcagactgggcgtgagcggctacctggtgagcagattcaccggcagcatcttcatcggcagaggcagcagaagaaacccccacggcgaccacaaggccaacgtgggcctgaacctgaagttcaacaagaagaacgaggaggtgcccggctacaccaagaaggtgggcagcgagtggatgtacagcagcgccgccgagcagctgctggccgagtacctggagagagcccccgagctgttcagctacatcgccaagaacagccaggaggacgtgttctacgaggacgacatctggcccggcgagaacgagaacggcgccgagaaggtgcaggagatcatcacctggctgaagggccaccccgtgagcaccctgagcagaagcagctgcgacctgcagatcctggacgccgccatcgtggagaagatcgaggaggaggtggagaagtgcaagcagagaaagaacaacaagaaggtgagagtgaccgtgaagccccacctgctgtacagacccctggagcagcagcacggcgtgatccccgacagagacgccgagttctgcctgttcgacagagtggtgaacgtgagagagaacttcagcgtgcccgtgggcctgagaggcaccatcatcggcatcaagggcgccaacagagaggccgacgtgctgttcgaggtgctgttcgacgaggagttccccggcggcctgaccatcagatgcagccccggcagaggctacagactgcccaccagcgccctggtgaacctgagccacggcagcagaagcgagaccggcaaccagaagctgaccgccatcgtgaagccccagcccgccgtgcaccagcacagcagcagcagcagcgtgagcagcggccacctgggcgccctgaaccacagcccccagagcctgttcgtgcccacccaggtgcccaccaaggacgacgacgagttctgcaacatctggcagagcctgcagggcagcggcaagatgcagtacttccagcccaccatccaggagaagggcgccgtgctgccccaggagatcagccaggtgaaccagcaccacaagagcggcttcaacgacaacagcgtgaagtaccagcagagaaagcacgacccccacagaaagttcaaggaggagtgcaagagccccaaggccgagtgctggagccagaagatgagcaacaagcagcccaacagcggcatcgagaacttcctggccagcctgaacatcagcaaggagaacgaggtgcagagcagccaccacggcgagccccccagcgaggagcacctgagcccccagagcttcgccatgaagggcaccagaatgctgaaggagatcctgaagatcgacggcagcaacaccgtggaccacaagaacgagatcaagcagatcgccaacgagatccccgtgagcagcaacagaagagacgagtacggcctgcccagccagcccaagcagaacaagaagctggccagctacatgaacaagccccacagcgccaacgagtaccacaacgtgcagagcatggacaacatgtgctggcccgcccccagccagatcccccccgtgagcacccccgtgaccgagctgagcagaatctgcagcctggtgggcatgccccagcccgacttcagcttcctgagaatgccccagaccatgaccgtgtgccaggtgaagctgagcaacggcctgctggtgcacggcccccagtgccacagcgagaacgaggccaaggagaaggccgccctgttcgccctgcagcagctgggcagcctgggcatgaacttccccctgcccagccaggtgttcgccaactaccccagcgccgtgccccccggcaccatcccccccgccttccccccccccaccgccaacatcatgcccagcagcagccacctgttcggcagcatgccctggggccccagcgtgcccgtgcccggcaagcccttccaccacaccctgtacagcggcaccatgcccatggccggcggcatccccggcggcgtgcacaaccagttcatccccctgcaggtgaccaagaagagagtggccaacaagaagaacttcgagaacaaggaggcccagagcagccaggccacccccgtgcagaccagccagcccgacagcagcaacatcgtgaaggtgagccccagagagagcagcagcgccagcctgaagagcagccccatcgcccagcccgccagcagcttccaggtggagaccgccagccagggccacagcatcagccaccacaagagcacccccatcagcagcagcagaagaaagagcagaaagctggccgtgaacttcggcgtgagcaagcccagcgagtag

SEQ ID NO: 9220 - DNA, 1233 bp, synthetic construct
  misc_feature 1..1233: note = Description of Artificial Sequence: Synthetic coding sequence
  source 1..1233: mol_type = other DNA
atgcccgccagagccctgctgcccagaagaatgggccacagaaccctggccagcacccccgccctgtgggccagcatcccctgccccagaagcgagctgagactggacctggtgctgcccagcggccagagcttcagatggagagagcagagccccgcccactggagcggcgtgctggccgaccaggtgtggaccctgacccagaccgaggagcagctgcactgcaccgtgtacagaggcgacaagagccaggccagcagacccacccccgacgagctggaggccgtgagaaagtacttccagctggacgtgaccctggcccagctgtaccaccactggggcagcgtggacagccacttccaggaggtggcccagaagttccagggcgtgagactgctgagacaggaccccatcgagtgcctgttcagcttcatctgcagcagcaacaacaacatcgccagaatcaccggcatggtggagagactgtgccaggccttcggccccagactgatccagctggacgacgtgacctaccacggcttccccagcctgcaggccctggccggccccgaggtggaggcccacctgagaaagctgggcctgggctacagagccagatacgtgagcgccagcgccagagccatcctggaggagcagggcggcctggcctggctgcagcagctgagagagagcagctacgaggaggcccacaaggccctgtgcatcctgcccggcgtgggcaccaaggtggccgactgcatctgcctgatggccctggacaagccccaggccgtgcccgtggacgtgcacatgtggcacatcgcccagagagactacagctggcaccccaccaccagccaggccaagggccccagcccccagaccaacaaggagctgggcaacttcttcagaagcctgtggggcccctacgccggctgggcccaggccaccccccccagctacagatgctgcagcgtgcccacctgcgccaaccccgccatgctgagaagccaccagcagagcgccgagagagtgcccaagggcagaaaggccagatggggcaccctggacaaggagatcccccaggcccccagcccccccttccccaccagcctgagccccagcccccccagcctgatgctgggcagaggcctgcccgtgaccaccagcaaggccagacacccccagatcaagcagagcgtgtgcaccaccagatggggcggcggctactag

SEQ ID NO: 9221 - DNA, 1071 bp, synthetic construct
  misc_feature 1..1071: note = Description of Artificial Sequence: Synthetic coding sequence
  source 1..1071: mol_type = other DNA
atgcccgccagagccctgctgcccagaagaatgggccacagaaccctggccagcacccccgccctgtgggccagcatcccctgccccagaagcgagctgagactggacctggtgctgcccagcggccagagcttcagatggagagagcagagccccgcccactggagcggcgtgctggccgaccaggtgtggaccctgacccagaccgaggagcagctgcactgcaccgtgtacagaggcgacaagagccaggccagcagacccacccccgacgagctggaggccgtgagaaagtacttccagctggacgtgaccctggcccagctgtaccaccactggggcagcgtggacagccacttccaggaggtggcccagaagttccagggcgtgagactgctgagacaggaccccatcgagtgcctgttcagcttcatctgcagcagcaacaacaacatcgccagaatcaccggcatggtggagagactgtgccaggccttcggccccagactgatccagctggacgacgtgacctaccacggcttccccagcctgcaggccctggccggccccgaggtggaggcccacctgagaaagctgggcctgggctacagagccagatacgtgagcgccagcgccagagccatcctggaggagcagggcggcctggcctggctgcagcagctgagagagagcagctacgaggaggcccacaaggccctgtgcatcctgcccggcgtgggcaccaaggtggccgactgcatctgcctgatggccctggacaagccccaggccgtgcccgtggacgtgcacatgtggcacatcgcccagagagactacagctggcaccccaccaccagccaggccaagggccccagcccccagaccaacaaggagctgggcaacttcttcagaagcctgtggggcccctacgccggctgggcccaggccctgtgccaggtgatcaccaccttcatgaccttcctgggcccccacagactggaccagatgccccccgaggagctgcagaccagcagcagcagactgggcggccccccctggcagtgcatctag

SEQ ID NO: 9222 - DNA, 1275 bp, synthetic construct
  misc_feature 1..1275: note = Description of Artificial Sequence: Synthetic coding sequence
  source 1..1275: mol_type = other DNA
atgcccgccagagccctgctgcccagaagaatgggccacagaaccctggccagcacccccgccctgtgggccagcatcccctgccccagaagcgagctgagactggacctggtgctgcccagcggccagagcttcagatggagagagcagagccccgcccactggagcggcgtgctggccgaccaggtgtggaccctgacccagaccgaggagcagctgcactgcaccgtgtacagaggcgacaagagccaggccagcagacccacccccgacgagctggaggccgtgagaaagtacttccagctggacgtgaccctggcccagctgtaccaccactggggcagcgtggacagccacttccaggaggtggcccagaagttccagggcgtgagactgctgagacaggaccccatcgagtgcctgttcagcttcatctgcagcagcaacaacaacatcgccagaatcaccggcatggtggagagactgtgccaggccttcggccccagactgatccagctggacgacgtgacctaccacggcttccccagcctgcaggccctggccggccccgaggtggaggcccacctgagaaagctgggcctgggctacagagccagatacgtgagcgccagcgccagagccatcctggaggagcagggcggcctggcctggctgcagcagctgagagagagcagctacgaggaggcccacaaggccctgtgcatcctgcccggcgtgggcaccaaggtggccgactgcatctgcctgatggccctggacaagccccaggccgtgcccgtggacgtgcacatgtggcacatcgcccagagagactacagctggcaccccaccaccagccaggccaagggccccagcccccagaccaacaaggagctgggcaacttcttcagaagcctgtggggcccctacgccggctgggcccaggccggcctgctgggcaacgccttcgacggccaccagctgctgagacccctgatcttctgccaggaccacctgagagagggcccccccatcggcagaggcgacagccagggcgaggagctggagccccagctgcccagcagcctgagcagcatcccctacggcttctgcgaccactgctggaccaaggacgtggacgacccccccctggtgacccaccccagccccggcagcagagacggccacatgacccaggcctggcccgtgaaggtggtgagccccctggccaccgtgatcggccacgtgatgcaggccagcctgctggccctgtag

SEQ ID NO: 9223 - DNA, 975 bp, synthetic construct
  misc_feature 1..975: note = Description of Artificial Sequence: Synthetic coding sequence
  source 1..975: mol_type = other DNA
atgcccgccagagccctgctgcccagaagaatgggccacagaaccctggccagcacccccgccctgtgggccagcatcccctgccccagaagcgagctgagactggacctggtgctgcccagcggccagagcttcagatggagagagcagagccccgcccactggagcggcgtgctggccgaccaggtgtggaccctgacccagaccgaggagcagctgcactgcaccgtgtacagaggcgacaagagccaggccagcagacccacccccgacgagctggaggccgtgagaaagtacttccagctggacgtgaccctggcccagctgtaccaccactggggcagcgtggacagccacttccaggaggtggcccagaagttccagggcgtgagactgctgagacaggaccccatcgagtgcctgttcagcttcatctgcagcagcaacaacaacatcgccagaatcaccggcatggtggagagactgtgccaggccttcggccccagactgatccagctggacgacgtgacctaccacggcttccccagcctgcaggccctggccggccccgaggtggaggcccacctgagaaagctgggcctgggctacagagccagatacgtgagcgccagcgccagagccatcctggaggagcagggcggcctggcctggctgcagcagctgagagagagcagctacgaggaggcccacaaggccctgtgcatcctgcccggcgtgggcaccaaggtggccgactgcatctgcctgatggccctggacaagccccaggccgtgcccgtggacgtgcacatgtggcacatcgcccagagagactacagctggcaccccaccaccagccaggccaagggccccagcccccagaccaacaaggagctgggcaacttcttcagaagcctgtggggcccctacgccggctgggcccaggccgtgagcgtgcccagatgccccccctag

SEQ ID NO: 9224 - DNA, 594 bp, synthetic construct
  misc_feature 1..594: note = Description of Artificial Sequence: Synthetic coding sequence
  source 1..594: mol_type = other DNA
atggtggagagactgtgccaggccttcggccccagactgatccagctggacgacgtgacctaccacggcttccccagcctgcaggccctggccggccccgaggtggaggcccacctgagaaagctgggcctgggctacagagccagatacgtgagcgccagcgccagagccatcctggaggagcagggcggcctggcctggctgcagcagctgagagagagcagctacgaggaggcccacaaggccctgtgcatcctgcccggcgtgggcaccaaggagaccttcagcggcgcctgcggcgacctgatgctggccggccccaagagatgctgcagcgtgcccacctgcgccaaccccgccatgctgagaagccaccagcagagcgccgagagagtgcccaagggcagaaaggccagatggggcaccctggacaaggagatcccccaggcccccagcccccccttccccaccagcctgagccccagcccccccagcctgatgctgggcagaggcctgcccgtgaccaccagcaaggccagacacccccagatcaagcagagcgtgtgcaccaccagatggggcggcggctactag

SEQ ID NO: 9225 - DNA, 1038 bp, synthetic construct
  misc_feature 1..1038: note = Description of Artificial Sequence: Synthetic coding sequence
  source 1..1038: mol_type = other DNA
atgcccgccagagccctgctgcccagaagaatgggccacagaaccctggccagcacccccgccctgtgggccagcatcccctgccccagaagcgagctgagactggacctggtgctgcccagcggccagagcttcagatggagagagcagagccccgcccactggagcggcgtgctggccgaccaggtgtggaccctgacccagaccgaggagcagctgcactgcaccgtgtacagaggcgacaagagccaggccagcagacccacccccgacgagctggaggccgtgagaaagtacttccagctggacgtgaccctggcccagctgtaccaccactggggcagcgtggacagccacttccaggaggtggcccagaagttccagggcgtgagactgctgagacaggaccccatcgagtgcctgttcagcttcatctgcagcagcaacaacaacatcgccagaatcaccggcatggtggagagactgtgccaggccttcggccccagactgatccagctggacgacgtgacctaccacggcttccccagcctgcaggccctggccggccccgaggtggaggcccacctgagaaagctgggcctgggctacagagccagatacgtgagcgccagcgccagagccatcctggaggagcagggcggcctggcctggctgcagcagctgagagagagcagctacgaggaggcccacaaggccctgtgcatcctgcccggcgtgggcaccaaggtggccgactgcatctgcctgatggccctggacaagccccaggccgtgcccgtggacgtgcacatgtggcacatcgcccagagagactacagctggcaccccaccaccagccaggccaagggccccagcccccagaccaacaaggagctgggcaacttcttcagaagcctgtggggcccctacgccggctgggcccaggccgtgctgttcagcgccgacctgagacagagcagacacgcccaggagccccccgccaagagaagaaagggcagcaagggccccgagggctag

SEQ ID NO: 9226 - DNA, 1074 bp, synthetic construct
  misc_feature 1..1074: note = Description of Artificial Sequence: Synthetic coding sequence
  source 1..1074: mol_type = other DNA
atgcccgccagagccctgctgcccagaagaatgggccacagaaccctggccagcacccccgccctgtgggccagcatcccctgccccagaagcgagctgagactggacctggtgctgcccagcggccagagcttcagatggagagagcagagccccgcccactggagcggcgtgctggccgaccaggtgtggaccctgacccagaccgaggagcagctgcactgcaccgtgtacagaggcgacaagagccaggccagcagacccacccccgacgagctggaggccgtgagaaagtacttccagctggacgtgaccctggcccagctgtaccaccactggggcagcgtggacagccacttccaggaggtggcccagaagttccagggcgtgagactgctgagacaggaccccatcgagtgcctgttcagcttcatctgcagcagcaacaacaacatcgccagaatcaccggcatggtggagagactgtgccaggccttcggccccagactgatccagctggacgacgtgacctaccacggcttccccagcctgcaggccctggccggccccgaggtggaggcccacctgagaaagctgggcctgggctacagagccagatacgtgagcgccagcgccagagccatcctggaggagcagggcggcctggcctggctgcagcagctgagagagagcagctacgaggaggcccacaaggccctgtgcatcctgcccggcgtgggcaccaagggcctgctgggcaacgccttcgacggccaccagctgctgagacccctgatcttctgccaggaccacctgagagagggcccccccatcggcagaggcgacagccagggcgaggagctggagccccagctgcccagcagcctgagcagcatcccctacggcttctgcgaccactgctggaccaaggacgtggacgacccccccctggtgacccaccccagccccggcagcagagacggccacatgacccaggcctggcccgtgaaggtggtgagccccctggccaccgtgatcggccacgtgatgcaggccagcctgctggccctgtag

SEQ ID NO: 9227 - DNA, 588 bp, synthetic construct
  misc_feature 1..588: note = Description of Artificial Sequence: Synthetic coding sequence
  source 1..588: mol_type = other DNA
atgcccgccagagccctgctgcccagaagaatgggccacagaaccctggccagcacccccgccctgtgggccagcatcccctgccccagaagcgagctgagactggacctggtgctgcccagcggccagagcttcagatggagagagcagagccccgcccactggagcggcgtgctggccgaccaggtgtggaccctgacccagaccgaggagcagctgcactgcaccgtgtacagaggcgacaagagccaggccagcagacccacccccgacgagctggaggccgtgagaaagtacttccagctggacgtgaccctggcccagctgtaccaccactggggcagcgtggacagccacttccaggaggtggcccagaagttccagggcgtgagactgctgagacaggaccccatcgagtgcctgttcagcttcatctgcagcagcaacaacaacatcgccagaatcaccggcatggtggagagactgtgccaggccttcggccccagactgatccagctggacgacgtgacctaccacggcttccccagcctgcaggccctggccggccccccctggcagtgcatctag

SEQ ID NO: 9228 - DNA, 969 bp, synthetic construct
  misc_feature 1..969: note = Description of Artificial Sequence: Synthetic coding sequence
  source 1..969: mol_type = other DNA
atgcccgccagagccctgctgcccagaagaatgggccacagaaccctggccagcacccccgccctgtgggccagcatcccctgccccagaagcgagctgagactggacctggtgctgcccagcggccagagcttcagatggagagagcagagccccgcccactggagcggcgtgctggccgaccaggtgtggaccctgacccagaccgaggagcagctgcactgcaccgtgtacagaggcgacaagagccaggccagcagacccacccccgacgagctggaggccgtgagaaagtacttccagctggacgtgaccctggcccagctgtaccaccactggggcagcgtggacagccacttccaggaggtggcccagaagttccagggcgtgagactgctgagacaggaccccatcgagtgcctgttcagcttcatctgcagcagcaacaacaacatcgccagaatcaccggcatggtggagagactgtgccaggccttcggccccagactgatccagctggacgacgtgacctaccacggcttccccagcctgcaggccctggccggccccgaggtggaggcccacctgagaaagctgggcctgggctacagagccagatacgtgagcgccagcgccagagccatcctggaggagcagggcggcctggcctggctgcagcagctgagagagagcagctacgaggaggcccacaaggccctgtgcatcctgcccggcgtgggcaccaaggtggccgactgcatctgcctgatggccctggacaagccccaggccgtgcccgtggacgtgcacatgtggcacatcgcccagagagactacagctggcaccccaccaccagccaggccaagggccccagcccccagaccaacaaggagctgggcaacttcttcagaagcctgtggggcccctacgccggctgggcccaggccgccggcagcgacgccagctag

SEQ ID NO: 9229 - DNA, 6807 bp, synthetic construct
  misc_feature 1..6807: note = Description of Artificial Sequence: Synthetic coding sequence
  source 1..6807: mol_type = other DNA
atgagcggcctgcacctggtgaagcagggcagagacagaaagaagatcgacagccagagagacttcaccgtggccagccccgccgagttcgtgaccagattcggcggcaacaaggtgatcgagaaggtgctgatcgccaacaacggcatcgccgccgtgaagtgcatgagaagcatcagaagatggagctacgagatgttcagaaacgagagagccatcagattcgtggtgatggtgacccccgaggacctgaaggccaacgccgagtacatcaagatggccgaccactacgtgcccgtgcccggcggccccaacaacaacaactacgccaacgtggagctgatcctggacatcgccaagagaatccccgtgcaggccgtgtgggccggctggggccacgccagcgagaaccccaagctgcccgagctgctgctgaagaacggcatcgccttcatgggcccccccagccaggccatgtgggccctgggcgacaagatcgccagcagcatcgtggcccagaccgccggcatccccaccctgccctggagcggcagcggcctgagagtggactggcaggagaacgacttcagcaagagaatcctgaacgtgccccaggagctgtacgagaagggctacgtgaaggacgtggacgacggcctgcaggccgccgaggaggtgggctaccccgtgatgatcaaggccagcgagggcggcggcggcaagggcatcagaaaggtgaacaacgccgacgacttccccaacctgttcagacaggtgcaggccgaggtgcccggcagccccatcttcgtgatgagactggccaagcagagcagacacctggaggtgcagatcctggccgaccagtacggcaacgccatcagcctgttcggcagagactgcagcgtgcagagaagacaccagaagatcatcgaggaggcccccgccaccatcgccacccccgccgtgttcgagcacatggagcagtgcgccgtgaagctggccaagatggtgggctacgtgagcgccggcaccgtggagtacctgtacagccaggacggcagcttctacttcctggagctgaaccccagactgcaggtggagcacccctgcaccgagatggtggccgacgtgaacctgcccgccgcccagctgcagatcgccatgggcatccccctgtacagaatcaaggacatcagaatgatgtacggcgtgagcccctggggcgacagccccatcgacttcgaggacagcgcccacgtgccctgccccagaggccacgtgatcgccgccagaatcaccagcgagaaccccgacgagggcttcaagcccagcagcggcaccgtgcaggagctgaacttcagaagcaacaagaacgtgtggggctacttcagcgtggccgccgccggcggcctgcacgagttcgccgacagccagttcggccactgcttcagctggggcgagaacagagaggaggccatcagcaacatggtggtggccctgaaggagctgagcatcagaggcgacttcagaaccaccgtggagtacctgatcaagctgctggagaccgagagcttccagatgaacagaatcgacaccggctggctggacagactgatcgccgagaaggtgcaggccgagagacccgacaccatgctgggcgtggtgtgcggcgccctgcacgtggccgacgtgagcctgagaaacagcgtgagcaacttcctgcacagcctggagagaggccaggtgctgcccgcccacaccctgctgaacaccgtggacgtggagctgatctacgagggcgtgaagtacgtgctgaaggtgaccagacagagccccaacagctacgtggtgatcatgaacggcagctgcgtggaggtggacgtgcacagactgagcgacggcggcctgctgctgagctacgacggcagcagctacaccacctacatgaaggaggaggtggacagatacagaatcaccatcggcaacaagacctgcgtgttcgagaaggagaacgaccccagcgtgatgagaagccccagcgccggcaagctgatccagtacatcgtggaggacggcggccacgtgttcgccggccagtgctacgccgagatcgaggtgatgaagatggtgatgaccctgaccgccgtggagagcggctgcatccactacgtgaagagacccggcgccgccctggaccccggctgcgtgctggccaagatgcagctggacaaccccagcaaggtgcagcaggccgagctgcacaccggcagcctgcccagaatccagagcaccgccctgagaggcgagaagctgcacagagtgttccactacgtgctggacaacctggtgaacgtgatgaacggctactgcctgcccgaccccttcttcagcagcaaggtgaaggactgggtggagagactgatgaagaccctgagagaccccagcctgcccctgctggagctgcaggacatcatgaccagcgtgagcggcagaatcccccccaacgtggagaagagcatcaagaaggagatggcccagtacgccagcaacatcaccagcgtgctgtgccagttccccagccagcagatcgccaacatcctggacagccacgccgccaccctgaacagaaagagcgagagagaggtgttcttcatgaacacccagagcatcgtgcagctggtgcagagatacagaagcggcatcagaggccacatgaaggccgtggtgatggacctgctgagacagtacctgagagtggagacccagttccagaacggccactacgacaagtgcgtgttcgccctgagagaggagaacaagagcgacatgaacaccgtgctgaactacatcttcagccacgcccaggtgaccaagaagaacctgctggtgaccatgctgatcgaccagctgtgcggcagagaccccaccctgaccgacgagctgctgaacatcctgaccgagctgacccagctgagcaagaccaccaacgccaaggtggccctgagagccagacaggtgctgatcgccagccacctgcccagctacgagctgagacacaaccaggtggagagcatcttcctgagcgccatcgacatgtacggccaccagttctgcatcgagaacctgcagaagctgatcctgagcgagaccagcatcttcgacgtgctgcccaacttcttctaccacagcaaccaggtggtgagaatggccgccctggaggtgtacgtgagaagagcctacatcgcctacgagctgaacagcgtgcagcacagacagctgaaggacaacacctgcgtggtggagttccagttcatgctgcccaccagccaccccaacagaggcaacatccccaccctgaacagaatgagcttcagcagcaacctgaaccactacggcatgacccacgtggccagcgtgagcgacgtgctgctggacaacagcttcacccccccctgccagagaatgggcggcatggtgagcttcagaaccttcgaggacttcgtgagaatcttcgacgaggtgatgggctgcttcagcgacagccccccccagagccccaccttccccgaggccggccacaccagcctgtacgacgaggacaaggtgcccagagacgagcccatccacatcctgaacgtggccatcaagaccgactgcgacatcgaggacgacagactggccgccatgttcagagagttcacccagcagaacaaggccaccctggtggaccacggcatcagaagactgaccttcctggtggcccagaaggacttcagaaagcaggtgaactacgaggtggacagaagattccacagagagttccccaagttcttcaccttcagagccagagacaagttcgaggaggacagaatctacagacacctggagcccgccctggccttccagctggagctgaacagaatgagaaacttcgacctgaccgccatcccctgcgccaaccacaagatgcacctgtacctgggcgccgccaaggtggaggtgggcaccgaggtgaccgactacagattcttcgtgagagccatcatcagacacagcgacctggtgaccaaggaggccagcttcgagtacctgcagaacgagggcgagagactgctgctggaggccatggacgagctggaggtggccttcaacaacaccaacgtgagaaccgactgcaaccacatcttcctgaacttcgtgcccaccgtgatcatggaccccagcaagatcgaggagagcgtgagaagcatggtgatgagatacggcagcagactgtggaagctgagagtgctgcaggccgagctgaagatcaacatcagactgacccccaccggcaaggccatccccatcagactgttcctgaccaacgagagcggctactacctggacatcagcctgtacaaggaggtgaccgacagcagaaccgcccagatcatgttccaggcctacggcgacaagcagggccccctgcacggcatgctgatcaacaccccctacgtgaccaaggacctgctgcagagcaagagattccaggcccagagcctgggcaccacctacatctacgacatccccgagatgttcagacagagcctgatcaagctgtgggagagcatgagcacccaggccttcctgcccagcccccccctgcccagcgacatgctgacctacaccgagctggtgctggacgaccagggccagctggtgcacatgaacagactgcccggcggcaacgagatcggcatggtggcctggaagatgaccttcaagagccccgagtaccccgagggcagagacatcatcgtgatcggcaacgacatcacctacagaatcggcagcttcggcccccaggaggacctgctgttcctgagagccagcgagctggccagagccgagggcatccccagaatctacgtgagcgccaacagcggcgccagaatcggcctggccgaggagatcagacacatgttccacgtggcctgggtggaccccgaggacccctacaagggctacagatacctgtacctgaccccccaggactacaagagagtgagcgccctgaacagcgtgcactgcgagcacgtggaggacgagggcgagagcagatacaagatcaccgacatcatcggcaaggaggagggcatcggccccgagaacctgagaggcagcggcatgatcgccggcgagagcagcctggcctacaacgagatcatcaccatcagcctggtgacctgcagagccatcggcatcggcgcctacctggtgagactgggccagagaaccatccaggtggagaacagccacctgatcctgaccggcgccggcgccctgaacaaggtgctgggcagagaggtgtacaccagcaacaaccagctgggcggcatccagatcatgcacaacaacggcgtgacccactgcaccgtgtgcgacgacttcgagggcgtgttcaccgtgctgcactggctgagctacatgcccaagagcgtgcacagcagcgtgcccctgctgaacagcaaggaccccatcgacagaatcatcgagttcgtgcccaccaagaccccctacgaccccagatggatgctggccggcagaccccaccccacccagaagggccagtggctgagcggcttcttcgactacggcagcttcagcgagatcatgcagccctgggcccagaccgtggtggtgggcagagccagactgggcggcatccccgtgggcgtggtggccgtggagaccagaaccgtggagctgagcatccccgccgaccccgccaacctggacagcgaggccaagatcatccagcaggccggccaggtgtggttccccgacagcgccttcaagacctaccaggccatcaaggacttcaacagagagggcctgcccctgatggtgttcgccaactggagaggcttcagcggcggcatgaaggacatgtacgaccaggtgctgaagttcggcgcctacatcgtggacggcctgagagagtgctgccagcccgtgctggtgtacatccccccccaggccgagctgagaggcggcagctgggtggtgatcgacagcagcatcaaccccagacacatggagatgtacgccgacagagagagcagaggcagcgtgctggagcccgagggcaccgtggagatcaagttcagaagaaaggacctggtgaagaccatgagaagagtggaccccgtgtacatccacctggccgagagactgggcacccccgagctgagcaccgccgagagaaaggagctggagaacaagctgaaggagagagaggagttcctgatccccatctaccaccaggtggccgtgcagttcgccgacctgcacgacacccccggcagaatgcaggagaagggcgtgatcagcgacatcctggactggaagaccagcagaaccttcttctactggagactgagaagactgctgctggaggacctggtgaagaagaagatccacaacgccaaccccgagctgaccgacggccagatccaggccatgctgagaagatggttcgtggaggtggagggcaccgtgaaggcctacgtgtgggacaacaacaaggacctggccgagtggctggagaagcagctgaccgaggaggacggcgtgcacagcgtgatcgaggagaacatcaagtgcatcagcagagactacgtgctgaagcagatcagaagcctggtgcaggccaaccccgaggtggccatggacagcatcatccacatgacccagcacatcagccccacccagagagccgaggtgatcagaatcctgagcaccatggacagccccagcacctag

SEQ ID NO: 9230 - DNA, 7152 bp, synthetic construct
  misc_feature 1..7152: note = Description of Artificial Sequence: Synthetic coding sequence
  source 1..7152: mol_type = other DNA
atgtggtggagcaccctgatgagcatcctgagagccagaagcttctggaagtggatcagcacccagaccgtgagaatcatcagagccgtgagagcccacttcggcggcatcatggacgagcccagccccctggcccagcccctggagctgaaccagcacagcagattcatcatcggcagcgtgagcgaggacaacagcgaggacgagatcagcaacctggtgaagctggacctgctggaggagaaggagggcagcctgagccccgccagcgtgggcagcgacaccctgagcgacctgggcatcagcagcctgcaggacggcctggccctgcacatcagaagcagcatgagcggcctgcacctggtgaagcagggcagagacagaaagaagatcgacagccagagagacttcaccgtggccagccccgccgagttcgtgaccagattcggcggcaacaaggtgatcgagaaggtgctgatcgccaacaacggcatcgccgccgtgaagtgcatgagaagcatcagaagatggagctacgagatgttcagaaacgagagagccatcagattcgtggtgatggtgacccccgaggacctgaaggccaacgccgagtacatcaagatggccgaccactacgtgcccgtgcccggcggccccaacaacaacaactacgccaacgtggagctgatcctggacatcgccaagagaatccccgtgcaggccgtgtgggccggctggggccacgccagcgagaaccccaagctgcccgagctgctgctgaagaacggcatcgccttcatgggcccccccagccaggccatgtgggccctgggcgacaagatcgccagcagcatcgtggcccagaccgccggcatccccaccctgccctggagcggcagcggcctgagagtggactggcaggagaacgacttcagcaagagaatcctgaacgtgccccaggagctgtacgagaagggctacgtgaaggacgtggacgacggcctgcaggccgccgaggaggtgggctaccccgtgatgatcaaggccagcgagggcggcggcggcaagggcatcagaaaggtgaacaacgccgacgacttccccaacctgttcagacaggtgcaggccgaggtgcccggcagccccatcttcgtgatgagactggccaagcagagcagacacctggaggtgcagatcctggccgaccagtacggcaacgccatcagcctgttcggcagagactgcagcgtgcagagaagacaccagaagatcatcgaggaggcccccgccaccatcgccacccccgccgtgttcgagcacatggagcagtgcgccgtgaagctggccaagatggtgggctacgtgagcgccggcaccgtggagtacctgtacagccaggacggcagcttctacttcctggagctgaaccccagactgcaggtggagcacccctgcaccgagatggtggccgacgtgaacctgcccgccgcccagctgcagatcgccatgggcatccccctgtacagaatcaaggacatcagaatgatgtacggcgtgagcccctggggcgacagccccatcgacttcgaggacagcgcccacgtgccctgccccagaggccacgtgatcgccgccagaatcaccagcgagaaccccgacgagggcttcaagcccagcagcggcaccgtgcaggagctgaacttcagaagcaacaagaacgtgtggggctacttcagcgtggccgccgccggcggcctgcacgagttcgccgacagccagttcggccactgcttcagctggggcgagaacagagaggaggccatcagcaacatggtggtggccctgaaggagctgagcatcagaggcgacttcagaaccaccgtggagtacctgatcaagctgctggagaccgagagcttccagatgaacagaatcgacaccggctggctggacagactgatcgccgagaaggtgcaggccgagagacccgacaccatgctgggcgtggtgtgcggcgccctgcacgtggccgacgtgagcctgagaaacagcgtgagcaacttcctgcacagcctggagagaggccaggtgctgcccgcccacaccctgctgaacaccgtggacgtggagctgatctacgagggcgtgaagtacgtgctgaaggtgaccagacagagccccaacagctacgtggtgatcatgaacggcagctgcgtggaggtggacgtgcacagactgagcgacggcggcctgctgctgagctacgacggcagcagctacaccacctacatgaaggaggaggtggacagatacagaatcaccatcggcaacaagacctgcgtgttcgagaaggagaacgaccccagcgtgatgagaagccccagcgccggcaagctgatccagtacatcgtggaggacggcggccacgtgttcgccggccagtgctacgccgagatcgaggtgatgaagatggtgatgaccctgaccgccgtggagagcggctgcatccactacgtgaagagacccggcgccgccctggaccccggctgcgtgctggccaagatgcagctggacaaccccagcaaggtgcagcaggccgagctgcacaccggcagcctgcccagaatccagagcaccgccctgagaggcgagaagctgcacagagtgttccactacgtgctggacaacctggtgaacgtgatgaacggctactgcctgcccgaccccttcttcagcagcaaggtgaaggactgggtggagagactgatgaagaccctgagagaccccagcctgcccctgctggagctgcaggacatcatgaccagcgtgagcggcagaatcccccccaacgtggagaagagcatcaagaaggagatggcccagtacgccagcaacatcaccagcgtgctgtgccagttccccagccagcagatcgccaacatcctggacagccacgccgccaccctgaacagaaagagcgagagagaggtgttcttcatgaacacccagagcatcgtgcagctggtgcagagatacagaagcggcatcagaggccacatgaaggccgtggtgatggacctgctgagacagtacctgagagtggagacccagttccagaacggccactacgacaagtgcgtgttcgccctgagagaggagaacaagagcgacatgaacaccgtgctgaactacatcttcagccacgcccaggtgaccaagaagaacctgctggtgaccatgctgatcgaccagctgtgcggcagagaccccaccctgaccgacgagctgctgaacatcctgaccgagctgacccagctgagcaagaccaccaacgccaaggtggccctgagagccagacaggtgctgatcgccagccacctgcccagctacgagctgagacacaaccaggtggagagcatcttcctgagcgccatcgacatgtacggccaccagttctgcatcgagaacctgcagaagctgatcctgagcgagaccagcatcttcgacgtgctgcccaacttcttctaccacagcaaccaggtggtgagaatggccgccctggaggtgtacgtgagaagagcctacatcgcctacgagctgaacagcgtgcagcacagacagctgaaggacaacacctgcgtggtggagttccagttcatgctgcccaccagccaccccaacagaggcaacatccccaccctgaacagaatgagcttcagcagcaacctgaaccactacggcatgacccacgtggccagcgtgagcgacgtgctgctggacaacagcttcacccccccctgccagagaatgggcggcatggtgagcttcagaaccttcgaggacttcgtgagaatcttcgacgaggtgatgggctgcttcagcgacagccccccccagagccccaccttccccgaggccggccacaccagcctgtacgacgaggacaaggtgcccagagacgagcccatccacatcctgaacgtggccatcaagaccgactgcgacatcgaggacgacagactggccgccatgttcagagagttcacccagcagaacaaggccaccctggtggaccacggcatcagaagactgaccttcctggtggcccagaaggacttcagaaagcaggtgaactacgaggtggacagaagattccacagagagttccccaagttcttcaccttcagagccagagacaagttcgaggaggacagaatctacagacacctggagcccgccctggccttccagctggagctgaacagaatgagaaacttcgacctgaccgccatcccctgcgccaaccacaagatgcacctgtacctgggcgccgccaaggtggaggtgggcaccgaggtgaccgactacagattcttcgtgagagccatcatcagacacagcgacctggtgaccaaggaggccagcttcgagtacctgcagaacgagggcgagagactgctgctggaggccatggacgagctggaggtggccttcaacaacaccaacgtgagaaccgactgcaaccacatcttcctgaacttcgtgcccaccgtgatcatggaccccagcaagatcgaggagagcgtgagaagcatggtgatgagatacggcagcagactgtggaagctgagagtgctgcaggccgagctgaagatcaacatcagactgacccccaccggcaaggccatccccatcagactgttcctgaccaacgagagcggctactacctggacatcagcctgtacaaggaggtgaccgacagcagaaccgcccagatcatgttccaggcctacggcgacaagcagggccccctgcacggcatgctgatcaacaccccctacgtgaccaaggacctgctgcagagcaagagattccaggcccagagcctgggcaccacctacatctacgacatccccgagatgttcagacagagcctgatcaagctgtgggagagcatgagcacccaggccttcctgcccagcccccccctgcccagcgacatgctgacctacaccgagctggtgctggacgaccagggccagctggtgcacatgaacagactgcccggcggcaacgagatcggcatggtggcctggaagatgaccttcaagagccccgagtaccccgagggcagagacatcatcgtgatcggcaacgacatcacctacagaatcggcagcttcggcccccaggaggacctgctgttcctgagagccagcgagctggccagagccgagggcatccccagaatctacgtgagcgccaacagcggcgccagaatcggcctggccgaggagatcagacacatgttccacgtggcctgggtggaccccgaggacccctacaagggctacagatacctgtacctgaccccccaggactacaagagagtgagcgccctgaacagcgtgcactgcgagcacgtggaggacgagggcgagagcagatacaagatcaccgacatcatcggcaaggaggagggcatcggccccgagaacctgagaggcagcggcatgatcgccggcgagagcagcctggcctacaacgagatcatcaccatcagcctggtgacctgcagagccatcggcatcggcgcctacctggtgagactgggccagagaaccatccaggtggagaacagccacctgatcctgaccggcgccggcgccctgaacaaggtgctgggcagagaggtgtacaccagcaacaaccagctgggcggcatccagatcatgcacaacaacggcgtgacccactgcaccgtgtgcgacgacttcgagggcgtgttcaccgtgctgcactggctgagctacatgcccaagagcgtgcacagcagcgtgcccctgctgaacagcaaggaccccatcgacagaatcatcgagttcgtgcccaccaagaccccctacgaccccagatggatgctggccggcagaccccaccccacccagaagggccagtggctgagcggcttcttcgactacggcagcttcagcgagatcatgcagccctgggcccagaccgtggtggtgggcagagccagactgggcggcatccccgtgggcgtggtggccgtggagaccagaaccgtggagctgagcatccccgccgaccccgccaacctggacagcgaggccaagatcatccagcaggccggccaggtgtggttccccgacagcgccttcaagacctaccaggccatcaaggacttcaacagagagggcctgcccctgatggtgttcgccaactggagaggcttcagcggcggcatgaaggacatgtacgaccaggtgctgaagttcggcgcctacatcgtggacggcctgagagagtgctgccagcccgtgctggtgtacatccccccccaggccgagctgagaggcggcagctgggtggtgatcgacagcagcatcaaccccagacacatggagatgtacgccgacagagagagcagaggcagcgtgctggagcccgagggcaccgtggagatcaagttcagaagaaaggacctggtgaagaccatgagaagagtggaccccgtgtacatccacctggccgagagactgggcacccccgagctgagcaccgccgagagaaaggagctggagaacaagctgaaggagagagaggagttcctgatccccatctaccaccaggtggccgtgcagttcgccgacctgcacgacacccccggcagaatgcaggagaagggcgtgatcagcgacatcctggactggaagaccagcagaaccttcttctactggagactgagaagactgctgctggaggacctggtgaagaagaagatccacaacgccaaccccgagctgaccgacggccagatccaggccatgctgagaagatggttcgtggaggtggagggcaccgtgaaggcctacgtgtgggacaacaacaaggacctggccgagtggctggagaagcagctgaccgaggaggacggcgtgcacagcgtgatcgaggagaacatcaagtgcatcagcagagactacgtgctgaagcagatcagaagcctggtgcaggccaaccccgaggtggccatggacagcatcatccacatgacccagcacatcagccccacccagagagccgaggtgatcagaatcctgagcaccatggacagccccagcacctag

SEQ ID NO: 9231 - DNA, 6867 bp, synthetic construct
  misc_feature 1..6867: note = Description of Artificial Sequence: Synthetic coding sequence
  source 1..6867: mol_type = other DNA
atggagggcagccccgaggagaacaaggagatgagatactacatgctgcagagaagcagcatgagcggcctgcacctggtgaagcagggcagagacagaaagaagatcgacagccagagagacttcaccgtggccagccccgccgagttcgtgaccagattcggcggcaacaaggtgatcgagaaggtgctgatcgccaacaacggcatcgccgccgtgaagtgcatgagaagcatcagaagatggagctacgagatgttcagaaacgagagagccatcagattcgtggtgatggtgacccccgaggacctgaaggccaacgccgagtacatcaagatggccgaccactacgtgcccgtgcccggcggccccaacaacaacaactacgccaacgtggagctgatcctggacatcgccaagagaatccccgtgcaggccgtgtgggccggctggggccacgccagcgagaaccccaagctgcccgagctgctgctgaagaacggcatcgccttcatgggcccccccagccaggccatgtgggccctgggcgacaagatcgccagcagcatcgtggcccagaccgccggcatccccaccctgccctggagcggcagcggcctgagagtggactggcaggagaacgacttcagcaagagaatcctgaacgtgccccaggagctgtacgagaagggctacgtgaaggacgtggacgacggcctgcaggccgccgaggaggtgggctaccccgtgatgatcaaggccagcgagggcggcggcggcaagggcatcagaaaggtgaacaacgccgacgacttccccaacctgttcagacaggtgcaggccgaggtgcccggcagccccatcttcgtgatgagactggccaagcagagcagacacctggaggtgcagatcctggccgaccagtacggcaacgccatcagcctgttcggcagagactgcagcgtgcagagaagacaccagaagatcatcgaggaggcccccgccaccatcgccacccccgccgtgttcgagcacatggagcagtgcgccgtgaagctggccaagatggtgggctacgtgagcgccggcaccgtggagtacctgtacagccaggacggcagcttctacttcctggagctgaaccccagactgcaggtggagcacccctgcaccgagatggtggccgacgtgaacctgcccgccgcccagctgcagatcgccatgggcatccccctgtacagaatcaaggacatcagaatgatgtacggcgtgagcccctggggcgacagccccatcgacttcgaggacagcgcccacgtgccctgccccagaggccacgtgatcgccgccagaatcaccagcgagaaccccgacgagggcttcaagcccagcagcggcaccgtgcaggagctgaacttcagaagcaacaagaacgtgtggggctacttcagcgtggccgccgccggcggcctgcacgagttcgccgacagccagttcggccactgcttcagctggggcgagaacagagaggaggccatcagcaacatggtggtggccctgaaggagctgagcatcagaggcgacttcagaaccaccgtggagtacctgatcaagctgctggagaccgagagcttccagatgaacagaatcgacaccggctggctggacagactgatcgccgagaaggtgcaggccgagagacccgacaccatgctgggcgtggtgtgcggcgccctgcacgtggccgacgtgagcctgagaaacagcgtgagcaacttcctgcacagcctggagagaggccaggtgctgcccgcccacaccctgctgaacaccgtggacgtggagctgatctacgagggcgtgaagtacgtgctgaaggtgaccagacagagccccaacagctacgtggtgatcatgaacggcagctgcgtggaggtggacgtgcacagactgagcgacggcggcctgctgctgagctacgacggcagcagctacaccacctacatgaaggaggaggtggacagatacagaatcaccatcggcaacaagacctgcgtgttcgagaaggagaacgaccccagcgtgatgagaagccccagcgccggcaagctgatccagtacatcgtggaggacggcggccacgtgttcgccggccagtgctacgccgagatcgaggtgatgaagatggtgatgaccctgaccgccgtggagagcggctgcatccactacgtgaagagacccggcgccgccctggaccccggctgcgtgctggccaagatgcagctggacaaccccagcaaggtgcagcaggccgagctgcacaccggcagcctgcccagaatccagagcaccgccctgagaggcgagaagctgcacagagtgttccactacgtgctggacaacctggtgaacgtgatgaacggctactgcctgcccgaccccttcttcagcagcaaggtgaaggactgggtggagagactgatgaagaccctgagagaccccagcctgcccctgctggagctgcaggacatcatgaccagcgtgagcggcagaatcccccccaacgtggagaagagcatcaagaaggagatggcccagtacgccagcaacatcaccagcgtgctgtgccagttccccagccagcagatcgccaacatcctggacagccacgccgccaccctgaacagaaagagcgagagagaggtgttcttcatgaacacccagagcatcgtgcagctggtgcagagatacagaagcggcatcagaggccacatgaaggccgtggtgatggacctgctgagacagtacctgagagtggagacccagttccagaacggccactacgacaagtgcgtgttcgccctgagagaggagaacaagagcgacatgaacaccgtgctgaactacatcttcagccacgcccaggtgaccaagaagaacctgctggtgaccatgctgatcgaccagctgtgcggcagagaccccaccctgaccgacgagctgctgaacatcctgaccgagctgacccagctgagcaagaccaccaacgccaaggtggccctgagagccagacaggtgctgatcgccagccacctgcccagctacgagctgagacacaaccaggtggagagcatcttcctgagcgccatcgacatgtacggccaccagttctgcatcgagaacctgcagaagctgatcctgagcgagaccagcatcttcgacgtgctgcccaacttcttctaccacagcaaccaggtggtgagaatggccgccctggaggtgtacgtgagaagagcctacatcgcctacgagctgaacagcgtgcagcacagacagctgaaggacaacacctgcgtggtggagttccagttcatgctgcccaccagccaccccaacagaggcaacatccccaccctgaacagaatgagcttcagcagcaacctgaaccactacggcatgacccacgtggccagcgtgagcgacgtgctgctggacaacagcttcacccccccctgccagagaatgggcggcatggtgagcttcagaaccttcgaggacttcgtgagaatcttcgacgaggtgatgggctgcttcagcgacagccccccccagagccccaccttccccgaggccggccacaccagcctgtacgacgaggacaaggtgcccagagacgagcccatccacatcctgaacgtggccatcaagaccgactgcgacatcgaggacgacagactggccgccatgttcagagagttcacccagcagaacaaggccaccctggtggaccacggcatcagaagactgaccttcctggtggcccagaaggacttcagaaagcaggtgaactacgaggtggacagaagattccacagagagttccccaagttcttcaccttcagagccagagacaagttcgaggaggacagaatctacagacacctggagcccgccctggccttccagctggagctgaacagaatgagaaacttcgacctgaccgccatcccctgcgccaaccacaagatgcacctgtacctgggcgccgccaaggtggaggtgggcaccgaggtgaccgactacagattcttcgtgagagccatcatcagacacagcgacctggtgaccaaggaggccagcttcgagtacctgcagaacgagggcgagagactgctgctggaggccatggacgagctggaggtggccttcaacaacaccaacgtgagaaccgactgcaaccacatcttcctgaacttcgtgcccaccgtgatcatggaccccagcaagatcgaggagagcgtgagaagcatggtgatgagatacggcagcagactgtggaagctgagagtgctgcaggccgagctgaagatcaacatcagactgacccccaccggcaaggccatccccatcagactgttcctgaccaacgagagcggctactacctggacatcagcctgtacaaggaggtgaccgacagcagaaccgcccagatcatgttccaggcctacggcgacaagcagggccccctgcacggcatgctgatcaacaccccctacgtgaccaaggacctgctgcagagcaagagattccaggcccagagcctgggcaccacctacatctacgacatccccgagatgttcagacagagcctgatcaagctgtgggagagcatgagcacccaggccttcctgcccagcccccccctgcccagcgacatgctgacctacaccgagctggtgctggacgaccagggccagctggtgcacatgaacagactgcccggcggcaacgagatcggcatggtggcctggaagatgaccttcaagagccccgagtaccccgagggcagagacatcatcgtgatcggcaacgacatcacctacagaatcggcagcttcggcccccaggaggacctgctgttcctgagagccagcgagctggccagagccgagggcatccccagaatctacgtgagcgccaacagcggcgccagaatcggcctggccgaggagatcagacacatgttccacgtggcctgggtggaccccgaggacccctacaagggctacagatacctgtacctgaccccccaggactacaagagagtgagcgccctgaacagcgtgcactgcgagcacgtggaggacgagggcgagagcagatacaagatcaccgacatcatcggcaaggaggagggcatcggccccgagaacctgagaggcagcggcatgatcgccggcgagagcagcctggcctacaacgagatcatcaccatcagcctggtgacctgcagagccatcggcatcggcgcctacctggtgagactgggccagagaaccatccaggtggagaacagccacctgatcctgaccggcgccggcgccctgaacaaggtgctgggcagagaggtgtacaccagcaacaaccagctgggcggcatccagatcatgcacaacaacggcgtgacccactgcaccgtgtgcgacgacttcgagggcgtgttcaccgtgctgcactggctgagctacatgcccaagagcgtgcacagcagcgtgcccctgctgaacagcaaggaccccatcgacagaatcatcgagttcgtgcccaccaagaccccctacgaccccagatggatgctggccggcagaccccaccccacccagaagggccagtggctgagcggcttcttcgactacggcagcttcagcgagatcatgcagccctgggcccagaccgtggtggtgggcagagccagactgggcggcatccccgtgggcgtggtggccgtggagaccagaaccgtggagctgagcatccccgccgaccccgccaacctggacagcgaggccaagatcatccagcaggccggccaggtgtggttccccgacagcgccttcaagacctaccaggccatcaaggacttcaacagagagggcctgcccctgatggtgttcgccaactggagaggcttcagcggcggcatgaaggacatgtacgaccaggtgctgaagttcggcgcctacatcgtggacggcctgagagagtgctgccagcccgtgctggtgtacatccccccccaggccgagctgagaggcggcagctgggtggtgatcgacagcagcatcaaccccagacacatggagatgtacgccgacagagagagcagaggcagcgtgctggagcccgagggcaccgtggagatcaagttcagaagaaaggacctggtgaagaccatgagaagagtggaccccgtgtacatccacctggccgagagactgggcacccccgagctgagcaccgccgagagaaaggagctggagaacaagctgaaggagagagaggagttcctgatccccatctaccaccaggtggccgtgcagttcgccgacctgcacgacacccccggcagaatgcaggagaagggcgtgatcagcgacatcctggactggaagaccagcagaaccttcttctactggagactgagaagactgctgctggaggacctggtgaagaagaagatccacaacgccaaccccgagctgaccgacggccagatccaggccatgctgagaagatggttcgtggaggtggagggcaccgtgaaggcctacgtgtgggacaacaacaaggacctggccgagtggctggagaagcagctgaccgaggaggacggcgtgcacagcgtgatcgaggagaacatcaagtgcatcagcagagactacgtgctgaagcagatcagaagcctggtgcaggccaaccccgaggtggccatggacagcatcatccacatgacccagcacatcagccccacccagagagccgaggtgatcagaatcctgagcaccatggacagccccagcacctag

SEQ ID NO: 9232 - DNA, 1419 bp, synthetic construct
  misc_feature 1..1419: note = Description of Artificial Sequence: Synthetic coding sequence
  source 1..1419: mol_type = other DNA
atgcacaacaacggcgtgacccactgcaccgtgtgcgacgacttcgagggcgtgttcaccgtgctgcactggctgagctacatgcccaagagcgtgcacagcagcgtgcccctgctgaacagcaaggaccccatcgacagaatcatcgagttcgtgcccaccaagaccccctacgaccccagatggatgctggccggcagaccccaccccacccagaagggccagtggctgagcggcttcttcgactacggcagcttcagcgagatcatgcagccctgggcccagaccgtggtggtgggcagagccagactgggcggcatccccgtgggcgtggtggccgtggagaccagaaccgtggagctgagcatccccgccgaccccgccaacctggacagcgaggccaagatcatccagcaggccggccaggtgtggttccccgacagcgccttcaagacctaccaggccatcaaggacttcaacagagagggcctgcccctgatggtgttcgccaactggagaggcttcagcggcggcatgaaggacatgtacgaccaggtgctgaagttcggcgcctacatcgtggacggcctgagagagtgctgccagcccgtgctggtgtacatccccccccaggccgagctgagaggcggcagctgggtggtgatcgacagcagcatcaaccccagacacatggagatgtacgccgacagagagagcagaggcagcgtgctggagcccgagggcaccgtggagatcaagttcagaagaaaggacctggtgaagaccatgagaagagtggaccccgtgtacatccacctggccgagagactgggcacccccgagctgagcaccgccgagagaaaggagctggagaacaagctgaaggagagagaggagttcctgatccccatctaccaccaggtggccgtgcagttcgccgacctgcacgacacccccggcagaatgcaggagaagggcgtgatcagcgacatcctggactggaagaccagcagaaccttcttctactggagactgagaagactgctgctggaggacctggtgaagaagaagatccacaacgccaaccccgagctgaccgacggccagatccaggccatgctgagaagatggttcgtggaggtggagggcaccgtgaaggcctacgtgtgggacaacaacaaggacctggccgagtggctggagaagcagctgaccgaggaggacggcgtgcacagcgtgatcgaggagaacatcaagtgcatcagcagagactacgtgctgaagcagatcagaagcctggtgcaggccaaccccgaggtggccatggacagcatcatccacatgacccagcacatcagccccacccagagagccgaggtgatcagaatcctgagcaccatggacagccccagcacctag

SEQ ID NO: 9233 - DNA, 129 bp, synthetic construct
  misc_feature 1..129: note = Description of Artificial Sequence: Synthetic coding sequence
  source 1..129: mol_type = other DNA
atgagcggcctgcacctggtgaagcagggcagagacagaaagaagatcgacagccagagagacttcaccgtggccagccccgccgagttcgtgaccagattcggcggcaacaaggtgatcgagaagtag

SEQ ID NO: 9234 - DNA, 7041 bp, synthetic construct
  misc_feature 1..7041: note = Description of Artificial Sequence: Synthetic coding sequence
  source 1..7041: mol_type = other DNA
atggacgagcccagccccctggcccagcccctggagctgaaccagcacagcagattcatcatcggcagcgtgagcgaggacaacagcgaggacgagatcagcaacctggtgaagctggacctgctggaggagaaggagggcagcctgagccccgccagcgtgggcagcgacaccctgagcgacctgggcatcagcagcctgcaggacggcctggccctgcacatcagaagcagcatgagcggcctgcacctggtgaagcagggcagagacagaaagaagatcgacagccagagagacttcaccgtggccagccccgccgagttcgtgaccagattcggcggcaacaaggtgatcgagaaggtgctgatcgccaacaacggcatcgccgccgtgaagtgcatgagaagcatcagaagatggagctacgagatgttcagaaacgagagagccatcagattcgtggtgatggtgacccccgaggacctgaaggccaacgccgagtacatcaagatggccgaccactacgtgcccgtgcccggcggccccaacaacaacaactacgccaacgtggagctgatcctggacatcgccaagagaatccccgtgcaggccgtgtgggccggctggggccacgccagcgagaaccccaagctgcccgagctgctgctgaagaacggcatcgccttcatgggcccccccagccaggccatgtgggccctgggcgacaagatcgccagcagcatcgtggcccagaccgccggcatccccaccctgccctggagcggcagcggcctgagagtggactggcaggagaacgacttcagcaagagaatcctgaacgtgccccaggagctgtacgagaagggctacgtgaaggacgtggacgacggcctgcaggccgccgaggaggtgggctaccccgtgatgatcaaggccagcgagggcggcggcggcaagggcatcagaaaggtgaacaacgccgacgacttccccaacctgttcagacaggtgcaggccgaggtgcccggcagccccatcttcgtgatgagactggccaagcagagcagacacctggaggtgcagatcctggccgaccagtacggcaacgccatcagcctgttcggcagagactgcagcgtgcagagaagacaccagaagatcatcgaggaggcccccgccaccatcgccacccccgccgtgttcgagcacatggagcagtgcgccgtgaagctggccaagatggtgggctacgtgagcgccggcaccgtggagtacctgtacagccaggacggcagcttctacttcctggagctgaaccccagactgcaggtggagcacccctgcaccgagatggtggccgacgtgaacctgcccgccgcccagctgcagatcgccatgggcatccccctgtacagaatcaaggacatcagaatgatgtacggcgtgagcccctggggcgacagccccatcgacttcgaggacagcgcccacgtgccctgccccagaggccacgtgatcgccgccagaatcaccagcgagaaccccgacgagggcttcaagcccagcagcggcaccgtgcaggagctgaacttcagaagcaacaagaacgtgtggggctacttcagcgtggccgccgccggcggcctgcacgagttcgccgacagccagttcggccactgcttcagctggggcgagaacagagaggaggccatcagcaacatggtggtggccctgaaggagctgagcatcagaggcgacttcagaaccaccgtggagtacctgatcaagctgctggagaccgagagcttccagatgaacagaatcgacaccggctggctggacagactgatcgccgagaaggtgcaggccgagagacccgacaccatgctgggcgtggtgtgcggcgccctgcacgtggccgacgtgagcctgagaaacagcgtgagcaacttcctgcacagcctggagagaggccaggtgctgcccgcccacaccctgctgaacaccgtggacgtggagctgatctacgagggcgtgaagtacgtgctgaaggtgaccagacagagccccaacagctacgtggtgatcatgaacggcagctgcgtggaggtggacgtgcacagactgagcgacggcggcctgctgctgagctacgacggcagcagctacaccacctacatgaaggaggaggtggacagatacagaatcaccatcggcaacaagacctgcgtgttcgagaaggagaacgaccccagcgtgatgagaagccccagcgccggcaagctgatccagtacatcgtggaggacggcggccacgtgttcgccggccagtgctacgccgagatcgaggtgatgaagatggtgatgaccctgaccgccgtggagagcggctgcatccactacgtgaagagacccggcgccgccctggaccccggctgcgtgctggccaagatgcagctggacaaccccagcaaggtgcagcaggccgagctgcacaccggcagcctgcccagaatccagagcaccgccctgagaggcgagaagctgcacagagtgttccactacgtgctggacaacctggtgaacgtgatgaacggctactgcctgcccgaccccttcttcagcagcaaggtgaaggactgggtggagagactgatgaagaccctgagagaccccagcctgcccctgctggagctgcaggacatcatgaccagcgtgagcggcagaatcccccccaacgtggagaagagcatcaagaaggagatggcccagtacgccagcaacatcaccagcgtgctgtgccagttccccagccagcagatcgccaacatcctggacagccacgccgccaccctgaacagaaagagcgagagagaggtgttcttcatgaacacccagagcatcgtgcagctggtgcagagatacagaagcggcatcagaggccacatgaaggccgtggtgatggacctgctgagacagtacctgagagtggagacccagttccagaacggccactacgacaagtgcgtgttcgccctgagagaggagaacaagagcgacatgaacaccgtgctgaactacatcttcagccacgcccaggtgaccaagaagaacctgctggtgaccatgctgatcgaccagctgtgcggcagagaccccaccctgaccgacgagctgctgaacatcctgaccgagctgacccagctgagcaagaccaccaacgccaaggtggccctgagagccagacaggtgctgatcgccagccacctgcccagctacgagctgagacacaaccaggtggagagcatcttcctgagcgccatcgacatgtacggccaccagttctgcatcgagaacctgcagaagctgatcctgagcgagaccagcatcttcgacgtgctgcccaacttcttctaccacagcaaccaggtggtgagaatggccgccctggaggtgtacgtgagaagagcctacatcgcctacgagctgaacagcgtgcagcacagacagctgaaggacaacacctgcgtggtggagttccagttcatgctgcccaccagccaccccaacagaggcaacatccccaccctgaacagaatgagcttcagcagcaacctgaaccactacggcatgacccacgtggccagcgtgagcgacgtgctgctggacaacagcttcacccccccctgccagagaatgggcggcatggtgagcttcagaaccttcgaggacttcgtgagaatcttcgacgaggtgatgggctgcttcagcgacagccccccccagagccccaccttccccgaggccggccacaccagcctgtacgacgaggacaaggtgcccagagacgagcccatccacatcctgaacgtggccatcaagaccgactgcgacatcgaggacgacagactggccgccatgttcagagagttcacccagcagaacaaggccaccctggtggaccacggcatcagaagactgaccttcctggtggcccagaaggacttcagaaagcaggtgaactacgaggtggacagaagattccacagagagttccccaagttcttcaccttcagagccagagacaagttcgaggaggacagaatctacagacacctggagcccgccctggccttccagctggagctgaacagaatgagaaacttcgacctgaccgccatcccctgcgccaaccacaagatgcacctgtacctgggcgccgccaaggtggaggtgggcaccgaggtgaccgactacagattcttcgtgagagccatcatcagacacagcgacctggtgaccaaggaggccagcttcgagtacctgcagaacgagggcgagagactgctgctggaggccatggacgagctggaggtggccttcaacaacaccaacgtgagaaccgactgcaaccacatcttcctgaacttcgtgcccaccgtgatcatggaccccagcaagatcgaggagagcgtgagaagcatggtgatgagatacggcagcagactgtggaagctgagagtgctgcaggccgagctgaagatcaacatcagactgacccccaccggcaaggccatccccatcagactgttcctgaccaacgagagcggctactacctggacatcagcctgtacaaggaggtgaccgacagcagaaccgcccagatcatgttccaggcctacggcgacaagcagggccccctgcacggcatgctgatcaacaccccctacgtgaccaaggacctgctgcagagcaagagattccaggcccagagcctgggcaccacctacatctacgacatccccgagatgttcagacagagcctgatcaagctgtgggagagcatgagcacccaggccttcctgcccagcccccccctgcccagcgacatgctgacctacaccgagctggtgctggacgaccagggccagctggtgcacatgaacagactgcccggcggcaacgagatcggcatggtggcctggaagatgaccttcaagagccccgagtaccccgagggcagagacatcatcgtgatcggcaacgacatcacctacagaatcggcagcttcggcccccaggaggacctgctgttcctgagagccagcgagctggccagagccgagggcatccccagaatctacgtgagcgccaacagcggcgccagaatcggcctggccgaggagatcagacacatgttccacgtggcctgggtggaccccgaggacccctacaagggctacagatacctgtacctgaccccccaggactacaagagagtgagcgccctgaacagcgtgcactgcgagcacgtggaggacgagggcgagagcagatacaagatcaccgacatcatcggcaaggaggagggcatcggccccgagaacctgagaggcagcggcatgatcgccggcgagagcagcctggcctacaacgagatcatcaccatcagcctggtgacctgcagagccatcggcatcggcgcctacctggtgagactgggccagagaaccatccaggtggagaacagccacctgatcctgaccggcgccggcgccctgaacaaggtgctgggcagagaggtgtacaccagcaacaaccagctgggcggcatccagatcatgcacaacaacggcgtgacccactgcaccgtgtgcgacgacttcgagggcgtgttcaccgtgctgcactggctgagctacatgcccaagagcgtgcacagcagcgtgcccctgctgaacagcaaggaccccatcgacagaatcatcgagttcgtgcccaccaagaccccctacgaccccagatggatgctggccggcagaccccaccccacccagaagggccagtggctgagcggcttcttcgactacggcagcttcagcgagatcatgcagccctgggcccagaccgtggtggtgggcagagccagactgggcggcatccccgtgggcgtggtggccgtggagaccagaaccgtggagctgagcatccccgccgaccccgccaacctggacagcgaggccaagatcatccagcaggccggccaggtgtggttccccgacagcgccttcaagacctaccaggccatcaaggacttcaacagagagggcctgcccctgatggtgttcgccaactggagaggcttcagcggcggcatgaaggacatgtacgaccaggtgctgaagttcggcgcctacatcgtggacggcctgagagagtgctgccagcccgtgctggtgtacatccccccccaggccgagctgagaggcggcagctgggtggtgatcgacagcagcatcaaccccagacacatggagatgtacgccgacagagagagcagaggcagcgtgctggagcccgagggcaccgtggagatcaagttcagaagaaaggacctggtgaagaccatgagaagagtggaccccgtgtacatccacctggccgagagactgggcacccccgagctgagcaccgccgagagaaaggagctggagaacaagctgaaggagagagaggagttcctgatccccatctaccaccaggtggccgtgcagttcgccgacctgcacgacacccccggcagaatgcaggagaagggcgtgatcagcgacatcctggactggaagaccagcagaaccttcttctactggagactgagaagactgctgctggaggacctggtgaagaagaagatccacaacgccaaccccgagctgaccgacggccagatccaggccatgctgagaagatggttcgtggaggtggagggcaccgtgaaggcctacgtgtgggacaacaacaaggacctggccgagtggctggagaagcagctgaccgaggaggacggcgtgcacagcgtgatcgaggagaacatcaagtgcatcagcagagactacgtgctgaagcagatcagaagcctggtgcaggccaaccccgaggtggccatggacagcatcatccacatgacccagcacatcagccccacccagagagccgaggtgatcagaatcctgagcaccatggacagccccagcacctag

SEQ ID NO: 9235 - DNA, 129 bp, synthetic construct; identical to SEQ ID NO: 9233
  misc_feature 1..129: note = Description of Artificial Sequence: Synthetic coding sequence
  source 1..129: mol_type = other DNA

SEQ ID NO: 9236 - DNA, 234 bp, synthetic construct
  misc_feature 1..234: note = Description of Artificial Sequence: Synthetic coding sequence
  source 1..234: mol_type = other DNA
atggacgagcccagccccctggcccagcccctggagctgaaccagcacagcagattcatcatcggcagcgtgagcgaggacaacagcgaggacgagatcagcaacctggtgaagctggacctgctggaggagaaggagggcagcctgagccccgccagcgtgggcagcgacaccctgagcgacctgggcatcagcagcctgcaggacggcctggccctgcacatcagactgtag

SEQ ID NO: 9237 - DNA, 3138 bp, synthetic construct
  misc_feature 1..3138: note = Description of Artificial Sequence: Synthetic coding sequence
  source 1..3138: mol_type = other DNA
atgggctgcttcagcgacagccccccccagagccccaccttccccgaggccggccacaccagcctgtacgacgaggacaaggtgcccagagacgagcccatccacatcctgaacgtggccatcaagaccgactgcgacatcgaggacgacagactggccgccatgttcagagagttcacccagcagaacaaggccaccctggtggaccacggcatcagaagactgaccttcctggtggcccagaaggacttcagaaagcaggtgaactacgaggtggacagaagattccacagagagttccccaagttcttcaccttcagagccagagacaagttcgaggaggacagaatctacagacacctggagcccgccctggccttccagctggagctgaacagaatgagaaacttcgacctgaccgccatcccctgcgccaaccacaagatgcacctgtacctgggcgccgccaaggtggaggtgggcaccgaggtgaccgactacagattcttcgtgagagccatcatcagacacagcgacctggtgaccaaggaggccagcttcgagtacctgcagaacgagggcgagagactgctgctggaggccatggacgagctggaggtggccttcaacaacaccaacgtgagaaccgactgcaaccacatcttcctgaacttcgtgcccaccgtgatcatggaccccagcaagatcgaggagagcgtgagaagcatggtgatgagatacggcagcagactgtggaagctgagagtgctgcaggccgagctgaagatcaacatcagactgacccccaccggcaaggccatccccatcagactgttcctgaccaacgagagcggctactacctggacatcagcctgtacaaggaggtgaccgacagcagaaccgcccagatcatgttccaggcctacggcgacaagcagggccccctgcacggcatgctgatcaacaccccctacgtgaccaaggacctgctgcagagcaagagattccaggcccagagcctgggcaccacctacatctacgacatccccgagatgttcagacagatcggcatggtggcctggaagatgaccttcaagagccccgagtaccccgagggcagagacatcatcgtgatcggcaacgacatcacctacagaatcggcagcttcggcccccaggaggacctgctgttcctgagagccagcgagctggccagagccgagggcatccccagaatctacgtgagcgccaacagcggcgccagaatcggcctggccgaggagatcagacacatgttccacgtggcctgggtggaccccgaggacccctacaagggctacagatacctgtacctgaccccccaggactacaagagagtgagcgccctgaacagcgtgcactgcgagcacgtggaggacgagggcgagagcagatacaagatcaccgacatcatcggcaaggaggagggcatcggccccgagaacctgagaggcagcggcatgatcgccggcgagagcagcctggcctacaacgagatcatcaccatcagcctggtgacctgcagagccatcggcatcggcgcctacctggtgagactgggccagagaaccatccaggtggagaacagccacctgatcctgaccggcgccggcgccctgaacaaggtgctgggcagagaggtgtacaccagcaacaaccagctgggcggcatccagatcatgcacaacaacggcgtgacccactgcaccgtgtgcgacgacttcgagggcgtgttcaccgtgctgcactggctgagctacatgcccaagagcgtgcacagcagcgtgcccctgctgaacagcaaggaccccatcgacagaatcatcgagttcgtgcccaccaagaccccctacgaccccagatggatgctggccggcagaccccaccccacccagaagggccagtggctgagcggcttcttcgactacggcagcttcagcgagatcatgcagccctgggcccagaccgtggtggtgggcagagccagactgggcggcatccccgtgggcgtggtggccgtggagaccagaaccgtggagctgagcatccccgccgaccccgccaacctggacagcgaggccaagatcatccagcaggccggccaggtgtggttccccgacagcgccttcaagacctaccaggccatcaaggacttcaacagagagggcctgcccctgatggtgttcgccaactggagaggcttcagcggcggcatgaaggacatgtacgaccaggtgctgaagttcggcgcctacatcgtggacggcctgagagagtgctgccagcccgtgctggtgtacatccccccccaggccgagctgagaggcggcagctgggtggtgatcgacagcagcatcaaccccagacacatggagatgtacgccgacagagagagcagaggcagcgtgctggagcccgagggcaccgtggagatcaagttcagaagaaaggacctggtgaagaccatgagaagagtggaccccgtgtacatccacctggccgagagactgggcacccccgagctgagcaccgccgagagaaaggagctggagaacaagctgaaggagagagaggagttcctgatccccatctaccaccaggtggccgtgcagttcgccgacctgcacgacacccccggcagaatgcaggagaagggcgtgatcagcgacatcctggactggaagaccagcagaaccttcttctactggagactgagaagactgctgctggaggacctggtgaagaagaagatccacaacgccaaccccgagctgaccgacggccagatccaggccatgctgagaagatggttcgtggaggtggagggcaccgtgaaggcctacgtgtgggacaacaacaaggacctggccgagtggctggagaagcagctgaccgaggaggacggcgtgcacagcgtgatcgaggagaacatcaagtgcatcagcagagactacgtgctgaagcagatcagaagcctggtgcaggccaaccccgaggtggccatggacagcatcatccacatgacccagcacatcagccccacccagagagccgaggtgatcagaatcctgagcaccatggacagccccagcacctag

SEQ ID NO: 9238 - DNA, 363 bp, synthetic construct
  misc_feature 1..363: note = Description of Artificial Sequence: Synthetic coding sequence
  source 1..363: mol_type = other DNA
atggacgagcccagccccctggcccagcccctggagctgaaccagcacagcagattcatcatcggcagcgtgagcgaggacaacagcgaggacgagatcagcaacctggtgaagctggacctgctggaggagaaggagggcagcctgagccccgccagcgtgggcagcgacaccctgagcgacctgggcatcagcagcctgcaggacggcctggccctgcacatcagaagcagcatgagcggcctgcacctggtgaagcagggcagagacagaaagaagatcgacagccagagagacttcaccgtggccagccccgccgagttcgtgaccagattcggcggcaacaaggtgatcgagaagtag

SEQ ID NO: 9239 - DNA, 7113 bp, synthetic construct
  misc_feature 1..7113: note = Description of Artificial Sequence: Synthetic coding sequence
  source 1..7113: mol_type = other DNA
agcttctggaagtggatcagcacccagaccgtgagaatcatcagagccgtgagagcccacttcggcggcatcatggacgagcccagccccctggcccagcccctggagctgaaccagcacagcagattcatcatcggcagcgtgagcgaggacaacagcgaggacgagatcagcaacctggtgaagctggacctgctggaggagaaggagggcagcctgagccccgccagcgtgggcagcgacaccctgagcgacctgggcatcagcagcctgcaggacggcctggccctgcacatcagaagcagcatgagcggcctgcacctggtgaagcagggcagagacagaaagaagatcgacagccagagagacttcaccgtggccagccccgccgagttcgtgaccagattcggcggcaacaaggtgatcgagaaggtgctgatcgccaacaacggcatcgccgccgtgaagtgcatgagaagcatcagaagatggagctacgagatgttcagaaacgagagagccatcagattcgtggtgatggtgacccccgaggacctgaaggccaacgccgagtacatcaagatggccgaccactacgtgcccgtgcccggcggccccaacaacaacaactacgccaacgtggagctgatcctggacatcgccaagagaatccccgtgcaggccgtgtgggccggctggggccacgccagcgagaaccccaagctgcccgagctgctgctgaagaacggcatcgccttcatgggcccccccagccaggccatgtgggccctgggcgacaagatcgccagcagcatcgtggcccagaccgccggcatccccaccctgccctggagcggcagcggcctgagagtggactggcaggagaacgacttcagcaagagaatcctgaacgtgccccaggagctgtacgagaagggctacgtgaaggacgtggacgacggcctgcaggccgccgaggaggtgggctaccccgtgatgatcaaggccagcgagggcggcggcggcaagggcatcagaaaggtgaacaacgccgacgacttccccaacctgttcagacaggtgcaggccgaggtgcccggcagccccatcttcgtgatgagactggccaagcagagcagacacctggaggtgcagatcctggccgaccagtacggcaacgccatcagcctgttcggcagagactgcagcgtgcagagaagacaccagaagatcatcgaggaggcccccgccaccatcgccacccccgccgtgttcgagcacatggagcagtgcgccgtgaagctggccaagatggtgggctacgtgagcgccggcaccgtggagtacctgtacagccaggacggcagcttctacttcctggagctgaaccccagactgcaggtggagcacccctgcaccgagatggtggccgacgtgaacctgcccgccgcccagctgcagatcgccatgggcatccccctgtacagaatcaaggacatcagaatgatgtacggcgtgagcccctggggcgacagccccatcgacttcgaggacagcgcccacgtgccctgccccagaggccacgtgatcgccgccagaatcaccagcgagaaccccgacgagggcttcaagcccagcagcggcaccgtgcaggagctgaacttcagaagcaacaagaacgtgtggggctacttcagcgtggccgccgccggcggcctgcacgagttcgccgacagccagttcggccactgcttcagctggggcgagaacagagaggaggccatcagcaacatggtggtggccctgaaggagctgagcatcagaggcgacttcagaaccaccgtggagtacctgatcaagctgctggagaccgagagcttccagatgaacagaatcgacaccggctggctggacagactgatcgccgagaaggtgcaggccgagagacccgacaccatgctgggcgtggtgtgcggcgccctgcacgtggccgacgtgagcctgagaaacagcgtgagcaacttcctgcacagcctggagagaggccaggtgctgcccgcccacaccctgctgaacaccgtggacgtggagctgatctacgagggcgtgaagtacgtgctgaaggtgaccagacagagccccaacagctacgtggtgatcatgaacggcagctgcgtggaggtggacgtgcacagactgagcgacggcggcctgctgctgagctacgacggcagcagctacaccacctacatgaaggaggaggtggacagatacagaatcaccatcggcaacaagacctgcgtgttcgagaaggagaacgaccccagcgtgatgagaagccccagcgccggcaagctgatccagtacatcgtggaggacggcggccacgtgttcgccggccagtgctacgccgagatcgaggtgatgaagatggtgatgaccctgaccgccgtggagagcggctgcatccactacgtgaagagacccggcgccgccctggaccccggctgcgtgctggccaagatgcagctggacaaccccagcaaggtgcagcaggccgagctgcacaccggcagcctgcccagaatccagagcaccgccctgagaggcgagaagctgcacagagtgttccactacgtgctggacaacctggtgaacgtgatgaacggctactgcctgcccgaccccttcttcagcagcaaggtgaaggactgggtggagagactgatgaagaccctgagagaccccagcctgcccctgctggagctgcaggacatcatgaccagcgtgagcggcagaatcccccccaacgtggagaagagcatcaagaaggagatggcccagtacgccagcaacatcaccagcgtgctgtgccagttccccagccagcagatcgccaacatcctggacagccacgccgccaccctgaacagaaagagcgagagagaggtgttcttcatgaacacccagagcatcgtgcagctggtgcagagatacagaagcggcatcagaggccacatgaaggccgtggtgatggacctgctgagacagtacctgagagtggagacccagttccagaacggccactacgacaagtgcgtgttcgccctgagagaggagaacaagagcgacatgaacaccgtgctgaactacatcttcagccacgcccaggtgaccaagaagaacctgctggtgaccatgctgatcgaccagctgtgcggcagagaccccaccctgaccgacgagctgctgaacatcctgaccgagctgacccagctgagcaagaccaccaacgccaaggtggccctgagagccagacaggtgctgatcgccagccacctgcccagctacgagctgagacacaaccaggtggagagcatcttcctgagcgccatcgacatgtacggccaccagttctgcatcgagaacctgcagaagctgatcctgagcgagaccagcatcttcgacgtgctgcccaacttcttctaccacagcaaccaggtggtgagaatggccgccctggaggtgtacgtgagaagagcctacatcgcctacgagctgaacagcgtgcagcacagacagctgaaggacaacacctgcgtggtggagttccagttcatgctgcccaccagccaccccaacagaggcaacatccccaccctgaacagaatgagcttcagcagcaacctgaaccactacggcatgacccacgtggccagcgtgagcgacgtgctgctggacaacagcttcacccccccctgccagagaatgggcggcatggtgagcttcagaaccttcgaggacttcgtgagaatcttcgacgaggtgatgggctgcttcagcgacagccccccccagagccccaccttccccgaggccggccacaccagcctgtacgacgaggacaaggtgcccagagacgagcccatccacatcctgaacgtggccatcaagaccgactgcgacatcgaggacgacagactggccgccatgttcagagagttcacccagcagaacaaggccaccctggtggaccacggcatcagaagactgaccttcctggtggcccagaaggacttcagaaagcaggtgaactacgaggtggacagaagattccacagagagttccccaagttcttcaccttcagagccagagacaagttcgaggaggacagaatctacagacacctggagcccgccctggccttccagctggagctgaacagaatgagaaacttcgacctgaccgccatcccctgcgccaaccacaagatgcacctgtacctgggcgccgccaaggtggaggtgggcaccgaggtgaccgactacagattcttcgtgagagccatcatcagacacagcgacctggtgaccaaggaggccagcttcgagtacctgcagaacgagggcgagagactgctgctggaggccatggacgagctggaggtggccttcaacaacaccaacgtgagaaccgactgcaaccacatcttcctgaacttcgtgcccaccgtgatcatggaccccagcaagatcgaggagagcgtgagaagcatggtgatgagatacggcagcagactgtggaagctgagagtgctgcaggccgagctgaagatcaacatcagactgacccccaccggcaaggccatccccatcagactgttcctgaccaacgagagcggctactacctggacatcagcctgtacaaggaggtgaccgacagcagaaccgcccagatcatgttccaggcctacggcgacaagcagggccccctgcacggcatgctgatcaacaccccctacgtgaccaaggacctgctgcagagcaagagattccaggcccagagcctgggcaccacctacatctacgacatccccgagatgttcagacagagcctgatcaagctgtgggagagcatgagcacccaggccttcctgcccagcccccccctgcccagcgacatgctgacctacaccgagctggtgctggacgaccagggccagctggtgcacatgaacagactgcccggcggcaacgagatcggcatggtggcctggaagatgaccttcaagagccccgagtaccccgagggcagagacatcatcgtgatcggcaacgacatcacctacagaatcggcagcttcggcccccaggaggacctgctgttcctgagagccagcgagctggccagagccgagggcatccccagaatctacgtgagcgccaacagcggcgccagaatcggcctggccgaggagatcagacacatgttccacgtggcctgggtggaccccgaggacccctacaagggctacagatacctgtacctgaccccccaggactacaagagagtgagcgccctgaacagcgtgcactgcgagcacgtggaggacgagggcgagagcagatacaagatcaccgacatcatcggcaaggaggagggcatcggccccgagaacctgagaggcagcggcatgatcgccggcgagagcagcctggcctacaacgagatcatcaccatcagcctggtgacctgcagagccatcggcatcggcgcctacctggtgagactgggccagagaaccatccaggtggagaacagccacctgatcctgaccggcgccggcgccctgaacaaggtgctgggcagagaggtgtacaccagcaacaaccagctgggcggcatccagatcatgcacaacaacggcgtgacccactgcaccgtgtgcgacgacttcgagggcgtgttcaccgtgctgcactggctgagctacatgcccaagagcgtgcacagcagcgtgcccctgctgaacagcaaggaccccatcgacagaatcatcgagttcgtgcccaccaagaccccctacgaccccagatggatgctggccggcagaccccaccccacccagaagggccagtggctgagcggcttcttcgactacggcagcttcagcgagatcatgcagccctgggcccagaccgtggtggtgggcagagccagactgggcggcatccccgtgggcgtggtggccgtggagaccagaaccgtggagctgagcatccccgccgaccccgccaacctggacagcgaggccaagatcatccagcaggccggccaggtgtggttccccgacagcgccttcaagacctaccaggccatcaaggacttcaacagagagggcctgcccctgatggtgttcgccaactggagaggcttcagcggcggcatgaaggacatgtacgaccaggtgctgaagttcggcgcctacatcgtggacggcctgagagagtgctgccagcccgtgctggtgtacatccccccccaggccgagctgagaggcggcagctgggtggtgatcgacagcagcatcaaccccagacacatggagatgtacgccgacagagagagcagaggcagcgtgctggagcccgagggcaccgtggagatcaagttcagaagaaaggacctggtgaagaccatgagaagagtggaccccgtgtacatccacctggccgagagactgggcacccccgagctgagcaccgccgagagaaaggagctggagaacaagctgaaggagagagaggagttcctgatccccatctaccaccaggtggccgtgcagttcgccgacctgcacgacacccccggcagaatgcaggagaagggcgtgatcagcgacatcctggactggaagaccagcagaaccttcttctactggagactgagaagactgctgctggaggacctggtgaagaagaagatccacaacgccaaccccgagctgaccgacggccagatccaggccatgctgagaagatggttcgtggaggtggagggcaccgtgaaggcctacgtgtgggacaacaacaaggacctggccgagtggctggagaagcagctgaccgaggaggacggcgtgcacagcgtgatcgaggagaacatcaagtgcatcagcagagactacgtgctgaagcagatcagaagcctggtgcaggccaaccccgaggtggccatggacagcatcatccacatgacccagcacatcagccccacccagagagccgaggtgatcagaatcctgagcaccatggacagccccagcacctag

SEQ ID NO: 9240 - DNA, 777 bp, synthetic construct
  misc_feature 1..777: note = Description of Artificial Sequence: Synthetic coding sequence
  source 1..777: mol_type = other DNA
atgagcggcctgcacctggtgaagcagggcagagacagaaagaagatcgacagccagagagacttcaccgtggccagccccgccgagttcgtgaccagattcggcggcaacaaggtgatcgagaaggtgctgatcgccaacaacggcatcgccgccgtgaagtgcatgagaagcatcagaagatggagctacgagatgttcagaaacgagagagccatcagattcgtggtgatggtgacccccgaggacctgaaggccaacgccgagtacatcaagatggccgaccactacgtgcccgtgcccggcggccccaacaacaacaactacgccaacgtggagctgatcctggacatcgccaagagaatccccgtgcaggccgtgtgggccggctggggccacgccagcgagaaccccaagctgcccgagctgctgctgaagaacggcatcgccttcatgggcccccccagccaggccatgtgggccctgggcgacaagatcgccagcagcatcgtggcccagaccgccggcatccccaccctgccctggagcggcagcggcctgagagtggactggcaggagaacgacttcagcaagagaatcctgaacgtgccccaggagctgtacgagaagggctacgtgaaggacgtggacgacggcctgcaggccgccgaggaggtgggctaccccgtgatgatcaaggccagcgagggcggcggcggcaagggcatcagaaaggtgaacaacgccgacgacttccccaacctgttcagacagtag

SEQ ID NO: 9241 - DNA, 144 bp, synthetic construct
  misc_feature 1..144: note = Description of Artificial Sequence: Synthetic coding sequence
  source 1..144: mol_type = other DNA
atggacgagcccagccccctggcccagcccctggagctgaaccagcacagcagattcatcatcggcagcgtgagcgaggacaacagcgaggacgagatcagcaacctggtgaagctggacctgctggaggagaaggagggctag

SEQ ID NO: 9242 - DNA, 2679 bp, synthetic construct
  misc_feature 1..2679: note = Description of Artificial Sequence: Synthetic coding sequence
  source 1..2679: mol_type = other DNA
atggaccactacgacagccagcagaccaacgactacatgcagcccgaggaggactgggacagagacctgctgctggaccccgcctgggagaagcagcagagaaagaccttcaccgcctggtgcaacagccacctgagaaaggccggcacccagatcgagaacatcgaggaggacttcagagacggcctgaagctgatgctgctgctggaggtgatcagcggcgagagactggccaagcccgagagaggcaagatgagagtgcacaagatcagcaacgtgaacaaggccctggacttcatcgccagcaagggcgtgaagctggtgagcatcggcgccgaggagatcgtggacggcaacgtgaagatgaccctgggcatgatctggaccatcatcctgagattcgccatccaggacatcagcgtggaggagaccagcgccaaggagggcctgctgctgtggtgccagagaaagaccgccccctacaagaacgtgaacatccagaacttccacatcagctggaaggacggcctgggcttctgcgccctgatccacagacacagacccgagctgatcgactacggcaagctgagaaaggacgaccccctgaccaacctgaacaccgccttcgacgtggccgagaagtacctggacatccccaagatgctggacgccgaggacatcgtgggcaccgccagacccgacgagaaggccatcatgacctacgtgagcagcttctaccacgccttcagcggcgcccagaaggccgagaccgccgccaacagaatctgcaaggtgctggccgtgaaccaggagaacgagcagctgatggaggactacgagaagctggccagcgacctgctggagtggatcagaagaaccatcccctggctggagaacagagtgcccgagaacaccatgcacgccatgcagcagaagctggaggacttcagagactacagaagactgcacaagccccccaaggtgcaggagaagtgccagctggagatcaacttcaacaccctgcagaccaagctgagactgagcaacagacccgccttcatgcccagcgagggcagaatggtgagcgacatcaacaacgcctggggctgcctggagcaggtggagaagggctacgaggagtggctgctgaacgagatcagaagactggagagactggaccacctggccgagaagttcagacagaaggccagcatccacgaggcctggaccgacggcaaggaggccatgctgagacagaaggactacgagaccgccaccctgagcgagatcaaggccctgctgaagaagcacgaggccttcgagagcgacctggccgcccaccaggacagagtggagcagatcgccgccatcgcccaggagctgaacgagctggactactacgacagccccagcgtgaacgccagatgccagaagatctgcgaccagtgggacaacctgggcgccctgacccagaagagaagagaggccctggagagaaccgagaagctgctggagaccatcgaccagctgtacctggagtacgccaagagagccgcccccttcaacaactggatggagggcgccatggaggacctgcaggacaccttcatcgtgcacaccatcgaggagatccagggcctgaccaccgcccacgagcagttcaaggccaccctgcccgacgccgacaaggagagactggccatcctgggcatccacaacgaggtgagcaagatcgtgcagacctaccacgtgaacatggccggcaccaacccctacaccaccatcaccccccaggagatcaacggcaagtgggaccacgtgagacagctggtgcccagaagagaccaggccctgaccgaggagcacgccagacagcagcacaacgagagactgagaaagcagttcggcgcccaggccaacgtgatcggcccctggatccagaccaagatggaggagatcggcagaatcagcatcgagatgcacggcaccctggaggaccagctgagccacctgagacagtacgagaagagcatcgtgaactacaagcccaagatcgaccagctggagggcgaccaccagctgatccaggaggccctgatcttcgacaacaagcacaccaactacaccatggagcacatcagagtgggctgggagcagctgctgaccaccatcgccagaaccatcaacgaggtggagaaccagatcctgaccagagacgccaagggcatcagccaggagcagatgaacgagttcagagccagcttcaaccacttcgacagagaccacagcggcaccctgggccccgaggagttcaaggcctgcctgatcagcctgggctacgacatcggcaacgacccccagggcgaggccgagttcgccagaatcatgagcatcgtggaccccaacagactgggcgtggtgaccttccaggccttcatcgacttcatgagcagagagaccgccgacaccgacaccgccgaccaggtgatggccagcttcaagatcctggccggcgacaagaactacatcaccatggacgagctgagaagagagctgccccccgaccaggccgagtactgcatcgccagaatggccccctacaccggccccgacagcgtgcccggcgccctggactacatgagcttcagcaccgccctgtacggcgagagcgacctgtag

SEQ ID NO: 9243 - DNA, 2745 bp, synthetic construct
  misc_feature 1..2745: note = Description of Artificial Sequence: Synthetic coding sequence
  source 1..2745: mol_type = other DNA
atggaccactacgacagccagcagaccaacgactacatgcagcccgaggaggactgggacagagacctgctgctggaccccgcctgggagaagcagcagagaaagaccttcaccgcctggtgcaacagccacctgagaaaggccggcacccagatcgagaacatcgaggaggacttcagagacggcctgaagctgatgctgctgctggaggtgatcagcggcgagagactggccaagcccgagagaggcaagatgagagtgcacaagatcagcaacgtgaacaaggccctggacttcatcgccagcaagggcgtgaagctggtgagcatcggcgccgaggagatcgtggacggcaacgtgaagatgaccctgggcatgatctggaccatcatcctgagattcgccatccaggacatcagcgtggaggagaccagcgccaaggagggcctgctgctgtggtgccagagaaagaccgccccctacaagaacgtgaacatccagaacttccacatcagctggaaggacggcctgggcttctgcgccctgatccacagacacagacccgagctgatcgactacggcaagctgagaaaggacgaccccctgaccaacctgaacaccgccttcgacgtggccgagaagtacctggacatccccaagatgctggacgccgaggacatcgtgggcaccgccagacccgacgagaaggccatcatgacctacgtgagcagcttctaccacgccttcagcggcgcccagaaggccgagaccgccgccaacagaatctgcaaggtgctggccgtgaaccaggagaacgagcagctgatggaggactacgagaagctggccagcgacctgctggagtggatcagaagaaccatcccctggctggagaacagagtgcccgagaacaccatgcacgccatgcagcagaagctggaggacttcagagactacagaagactgcacaagccccccaaggtgcaggagaagtgccagctggagatcaacttcaacaccctgcagaccaagctgagactgagcaacagacccgccttcatgcccagcgagggcagaatggtgagcgacatcaacaacgcctggggctgcctggagcaggtggagaagggctacgaggagtggctgctgaacgagatcagaagactggagagactggaccacctggccgagaagttcagacagaaggccagcatccacgaggcctggaccgacggcaaggaggccatgctgagacagaaggactacgagaccgccaccctgagcgagatcaaggccctgctgaagaagcacgaggccttcgagagcgacctggccgcccaccaggacagagtggagcagatcgccgccatcgcccaggagctgaacgagctggactactacgacagccccagcgtgaacgccagatgccagaagatctgcgaccagtgggacaacctgggcgccctgacccagaagagaagagaggccctggagagaaccgagaagctgctggagaccatcgaccagctgtacctggagtacgccaagagagccgcccccttcaacaactggatggagggcgccatggaggacctgcaggacaccttcatcgtgcacaccatcgaggagatccagggcctgaccaccgcccacgagcagttcaaggccaccctgcccgacgccgacaaggagagactggccatcctgggcatccacaacgaggtgagcaagatcgtgcagacctaccacgtgaacatggccggcaccaacccctacaccaccatcaccccccaggagatcaacggcaagtgggaccacgtgagacagctggtgcccagaagagaccaggccctgaccgaggagcacgccagacagcagcacaacgagagactgagaaagcagttcggcgcccaggccaacgtgatcggcccctggatccagaccaagatggaggagatcggcagaatcagcatcgagatgcacggcaccctggaggaccagctgagccacctgagacagtacgagaagagcatcgtgaactacaagcccaagatcgaccagctggagggcgaccaccagctgatccaggaggccctgatcttcgacaacaagcacaccaactacaccatggagcacatcagagtgggctgggagcagctgctgaccaccatcgccagaaccatcaacgaggtggagaaccagatcctgaccagagacgccaagggcatcagccaggagcagatgaacgagttcagagccagcttcaaccacttcgacagagaccacagcggcaccctgggccccgaggagttcaaggcctgcctgatcagcctgggctacgacatcggcaacgacccccagaagaagaccggcatgatggacaccgacgacttcagagcctgcctgatcagcatgggctacaacatgggcgaggccgagttcgccagaatcatgagcatcgtggaccccaacagactgggcgtggtgaccttccaggccttcatcgacttcatgagcagagagaccgccgacaccgacaccgccgaccaggtgatggccagcttcaagatcctggccggcgacaagaactacatcaccatggacgagctgagaagagagctgccccccgaccaggccgagtactgcatcgccagaatggccccctacaccggccccgacagcgtgcccggcgccctggactacatgagcttcagcaccgccctgtacggcgagagcgacctgtag

SEQ ID NO: 9244 - DNA, 2664 bp, synthetic construct
  misc_feature 1..2664: note = Description of Artificial Sequence: Synthetic coding sequence
  source 1..2664: mol_type = other DNA
atggaccactacgacagccagcagaccaacgactacatgcagcccgaggaggactgggacagagacctgctgctggaccccgcctgggagaagcagcagagaaagaccttcaccgcctggtgcaacagccacctgagaaaggccggcacccagatcgagaacatcgaggaggacttcagagacggcctgaagctgatgctgctgctggaggtgatcagcggcgagagactggccaagcccgagagaggcaagatgagagtgcacaagatcagcaacgtgaacaaggccctggacttcatcgccagcaagggcgtgaagctggtgagcatcggcgccgaggagatcgtggacggcaacgtgaagatgaccctgggcatgatctggaccatcatcctgagattcgccatccaggacatcagcgtggaggagaccagcgccaaggagggcctgctgctgtggtgccagagaaagaccgccccctacaagaacgtgaacatccagaacttccacatcagctggaaggacggcctgggcttctgcgccctgatccacagacacagacccgagctgatcgactacggcaagctgagaaaggacgaccccctgaccaacctgaacaccgccttcgacgtggccgagaagtacctggacatccccaagatgctggacgccgaggacatcgtgggcaccgccagacccgacgagaaggccatcatgacctacgtgagcagcttctaccacgccttcagcggcgcccagaaggccgagaccgccgccaacagaatctgcaaggtgctggccgtgaaccaggagaacgagcagctgatggaggactacgagaagctggccagcgacctgctggagtggatcagaagaaccatcccctggctggagaacagagtgcccgagaacaccatgcacgccatgcagcagaagctggaggacttcagagactacagaagactgcacaagccccccaaggtgcaggagaagtgccagctggagatcaacttcaacaccctgcagaccaagctgagactgagcaacagacccgccttcatgcccagcgagggcagaatggtgagcgacatcaacaacgcctggggctgcctggagcaggtggagaagggctacgaggagtggctgctgaacgagatcagaagactggagagactggaccacctggccgagaagttcagacagaaggccagcatccacgaggcctggaccgacggcaaggaggccatgctgagacagaaggactacgagaccgccaccctgagcgagatcaaggccctgctgaagaagcacgaggccttcgagagcgacctggccgcccaccaggacagagtggagcagatcgccgccatcgcccaggagctgaacgagctggactactacgacagccccagcgtgaacgccagatgccagaagatctgcgaccagtgggacaacctgggcgccctgacccagaagagaagagaggccctggagagaaccgagaagctgctggagaccatcgaccagctgtacctggagtacgccaagagagccgcccccttcaacaactggatggagggcgccatggaggacctgcaggacaccttcatcgtgcacaccatcgaggagatccagggcctgaccaccgcccacgagcagttcaaggccaccctgcccgacgccgacaaggagagactggccatcctgggcatccacaacgaggtgagcaagatcgtgcagacctaccacgtgaacatggccggcaccaacccctacaccaccatcaccccccaggagatcaacggcaagtgggaccacgtgagacagctggtgcccagaagagaccaggccctgaccgaggagcacgccagacagcagcacaacgagagactgagaaagcagttcggcgcccaggccaacgtgatcggcccctggatccagaccaagatggaggagatcggcagaatcagcatcgagatgcacggcaccctggaggaccagctgagccacctgagacagtacgagaagagcatcgtgaactacaagcccaagatcgaccagctggagggcgaccaccagctgatccaggaggccctgatcttcgacaacaagcacaccaactacaccatggagcacatcagagtgggctgggagcagctgctgaccaccatcgccagaaccatcaacgaggtggagaaccagatcctgaccagagacgccaagggcatcagccaggagcagatgaacgagttcagagccagcttcaaccacttcgacagaaagaagaccggcatgatggacaccgacgacttcagagcctgcctgatcagcatgggctacaacatgggcgaggccgagttcgccagaatcatgagcatcgtggaccccaacagactgggcgtggtgaccttccaggccttcatcgacttcatgagcagagagaccgccgacaccgacaccgccgaccaggtgatggccagcttcaagatcctggccggcgacaagaactacatcaccatggacgagctgagaagagagctgccccccgaccaggccgagtactgcatcgccagaatggccccctacaccggccccgacagcgtgcccggcgccctggactacatgagcttcagcaccgccctgtacggcgagagcgacctgtag

SEQ ID NO: 9245 - DNA, 2736 bp, synthetic construct
  misc_feature 1..2736: note = Description of Artificial Sequence: Synthetic coding sequence
  source 1..2736: mol_type = other DNA
atggtggactaccacgccgccaaccagagctaccagtacggccccagcagcgccggcaacggcgccggcggcggcggcagcatgggcgactacatggcccaggaggacgactgggacagagacctgctgctggaccccgcctgggagaagcagcagagaaagaccttcaccgcctggtgcaacagccacctgagaaaggccggcacccagatcgagaacatcgacgaggacttcagagacggcctgaagctgatgctgctgctggaggtgatcagcggcgagagactgcccaagcccgagagaggcaagatgagagtgcacaagatcaacaacgtgaacaaggccctggacttcatcgccagcaagggcgtgaagctggtgagcatcggcgccgaggagatcgtggacggcaacgccaagatgaccctgggcatgatctggaccatcatcctgagattcgccatccaggacatcagcgtggaggagaccagcgccaaggagggcctgctgctgtggtgccagagaaagaccgccccctacaagaacgtgaacgtgcagaacttccacatcagctggaaggacggcctggccttcaacgccctgatccacagacacagacccgagctgatcgagtacgacaagctgagaaaggacgaccccgtgaccaacctgaacaacgccttcgaggtggccgagaagtacctggacatccccaagatgctggacgccgaggacatcgtgaacaccgccagacccgacgagaaggccatcatgacctacgtgagcagcttctaccacgccttcagcggcgcccagaaggccgagaccgccgccaacagaatctgcaaggtgctggccgtgaaccaggagaacgagcacctgatggaggactacgagaagctggccagcgacctgctggagtggatcagaagaaccatcccctggctggaggacagagtgccccagaagaccatccaggagatgcagcagaagctggaggacttcagagactacagaagagtgcacaagccccccaaggtgcaggagaagtgccagctggagatcaacttcaacaccctgcagaccaagctgagactgagcaacagacccgccttcatgcccagcgagggcaagatggtgagcgacatcaacaacggctggcagcacctggagcaggccgagaagggctacgaggagtggctgctgaacgagatcagaagactggagagactggaccacctggccgagaagttcagacagaaggccagcatccacgaggcctggaccgacggcaaggaggccatgctgaagcacagagactacgagaccgccaccctgagcgacatcaaggccctgatcagaaagcacgaggccttcgagagcgacctggccgcccaccaggacagagtggagcagatcgccgccatcgcccaggagctgaacgagctggactactacgacagccacaacgtgaacaccagatgccagaagatctgcgaccagtgggacgccctgggcagcctgacccacagcagaagagaggccctggagaagaccgagaagcagctggaggccatcgaccagctgcacctggagtacgccaagagagccgcccccttcaacaactggatggagagcgccatggaggacctgcaggacatgttcatcgtgcacaccatcgaggagatcgagggcctgatcagcgcccacgaccagttcaagagcaccctgcccgacgccgacagagagagagaggccatcctggccatccacaaggaggcccagagaatcgccgagagcaaccacatcaagctgagcggcagcaacccctacaccaccgtgaccccccagatcatcaacagcaagtgggagaaggtgcagcagctggtgcccaagagagaccacgccctgctggaggagcagagcaagcagcagagcaacgagcacctgagaagacagttcgccagccaggccaacgtggtgggcccctggatccagaccaagatggaggagatcggcagaatcagcatcgagatgaacggcaccctggaggaccagctgagccacctgaagcagtacgagagaagcatcgtggactacaagcccaacctggacctgctggagcagcagcaccagctgatccaggaggccctgatcttcgacaacaagcacaccaactacaccatggagcacatcagagtgggctgggagcagctgctgaccaccatcgccagaaccatcaacgaggtggagaaccagatcctgaccagagacgccaagggcatcagccaggagcagatgcaggagttcagagccagcttcaaccacttcgacaaggaccacggcggcgccctgggccccgaggagttcaaggcctgcctgatcagcctgggctacgacgtggagaacgacagacagggcgaggccgagttcaacagaatcatgagcctggtggaccccaaccacagcggcctggtgaccttccaggccttcatcgacttcatgagcagagagaccaccgacaccgacaccgccgaccaggtgatcgccagcttcaaggtgctggccggcgacaagaacttcatcaccgccgaggagctgagaagagagctgccccccgaccaggccgagtactgcatcgccagaatggccccctaccagggccccgacgccgtgcccggcgccctggactacaagagcttcagcaccgccctgtacggcgagagcgacctgtag

SEQ ID NO: 9246 - DNA, 2079 bp, synthetic construct
  misc_feature 1..2079: note = Description of Artificial Sequence: Synthetic coding sequence
  source 1..2079: mol_type = other DNA
atggtggactaccacgccgccaaccagagctaccagtacggccccagcagcgccggcaacggcgccggcggcggcggcagcatgggcgactacatggcccaggaggacgactgggacagagacctgctgctggaccccgcctgggagaagcagcagagaaaggccgagaccgccgccaacagaatctgcaaggtgctggccgtgaaccaggagaacgagcacctgatggaggactacgagaagctggccagcgacctgctggagtggatcagaagaaccatcccctggctggaggacagagtgccccagaagaccatccaggagatgcagcagaagctggaggacttcagagactacagaagagtgcacaagccccccaaggtgcaggagaagtgccagctggagatcaacttcaacaccctgcagaccaagctgagactgagcaacagacccgccttcatgcccagcgagggcaagatggtgagcgacatcaacaacggctggcagcacctggagcaggccgagaagggctacgaggagtggctgctgaacgagatcagaagactggagagactggaccacctggccgagaagttcagacagaaggccagcatccacgaggcctggaccgacggcaaggaggccatgctgaagcacagagactacgagaccgccaccctgagcgacatcaaggccctgatcagaaagcacgaggccttcgagagcgacctggccgcccaccaggacagagtggagcagatcgccgccatcgcccaggagctgaacgagctggactactacgacagccacaacgtgaacaccagatgccagaagatctgcgaccagtgggacgccctgggcagcctgacccacagcagaagagaggccctggagaagaccgagaagcagctggaggccatcgaccagctgcacctggagtacgccaagagagccgcccccttcaacaactggatggagagcgccatggaggacctgcaggacatgttcatcgtgcacaccatcgaggagatcgagggcctgatcagcgcccacgaccagttcaagagcaccctgcccgacgccgacagagagagagaggccatcctggccatccacaaggaggcccagagaatcgccgagagcaaccacatcaagctgagcggcagcaacccctacaccaccgtgaccccccagatcatcaacagcaagtgggagaaggtgcagcagctggtgcccaagagagaccacgccctgctggaggagcagagcaagcagcagagcaacgagcacctgagaagacagttcgccagccaggccaacgtggtgggcccctggatccagaccaagatggaggagatcggcagaatcagcatcgagatgaacggcaccctggaggaccagctgagccacctgaagcagtacgagagaagcatcgtggactacaagcccaacctggacctgctggagcagcagcaccagctgatccaggaggccctgatcttcgacaacaagcacaccaactacaccatggagcacatcagagtgggctgggagcagctgctgaccaccatcgccagaaccatcaacgaggtggagaaccagatcctgaccagagacgccaagggcatcagccaggagcagatgcaggagttcagagccagcttcaaccacttcgacaaggaccacggcggcgccctgggccccgaggagttcaaggcctgcctgatcagcctgggctacgacgtggagaacgacagacagggcgaggccgagttcaacagaatcatgagcctggtggaccccaaccacagcggcctggtgaccttccaggccttcatcgacttcatgagcagagagaccaccgacaccgacaccgccgaccaggtgatcgccagcttcaaggtgctggccggcgacaagaacttcatcaccgccgaggagctgagaagagagctgccccccgaccaggccgagtactgcatcgccagaatggccccctaccagggccccgacgccgtgcccggcgccctggactacaagagcttcagcaccgccctgtacggcgagagcgacctgtag

SEQ ID NO: 9247 - DNA, 1566 bp, synthetic construct
  misc_feature 1..1566: note = Description of Artificial Sequence: Synthetic coding sequence
  source 1..1566: mol_type = other DNA
atggtggactaccacgccgccaaccagagctaccagtacggccccagcagcgccggcaacggcgccggcggcggcggcagcatgggcgactacatggcccaggaggacgactgggacagagacctgctgctggaccccgcctgggagaagcagcagagaaagaccttcaccgcctggtgcaacagccacctgagaaaggccggcacccagatcgagaacatcgacgaggacttcagagacggcctgaagctgatgctgctgctggaggtgcacgagctggactactacgacagccacaacgtgaacaccagatgccagaagatctgcgaccagtgggacgccctgggcagcctgacccacagcagaagagaggccctggagaagaccgagaagcagctggaggccatcgaccagctgcacctggagtacgccaagagagccgcccccttcaacaactggatggagagcgccatggaggacctgcaggacatgttcatcgtgcacaccatcgaggagatcgagggcctgatcagcgcccacgaccagttcaagagcaccctgcccgacgccgacagagagagagaggccatcctggccatccacaaggaggcccagagaatcgccgagagcaaccacatcaagctgagcggcagcaacccctacaccaccgtgaccccccagatcatcaacagcaagtgggagaaggtgcagcagctggtgcccaagagagaccacgccctgctggaggagcagagcaagcagcagagcaacgagcacctgagaagacagttcgccagccaggccaacgtggtgggcccctggatccagaccaagatggaggagatcggcagaatcagcatcgagatgaacggcaccctggaggaccagctgagccacctgaagcagtacgagagaagcatcgtggactacaagcccaacctggacctgctggagcagcagcaccagctgatccaggaggccctgatcttcgacaacaagcacaccaactacaccatggagcacatcagagtgggctgggagcagctgctgaccaccatcgccagaaccatcaacgaggtggagaaccagatcctgaccagagacgccaagggcatcagccaggagcagatgcaggagttcagagccagcttcaaccacttcgacaaggaccacggcggcgccctgggccccgaggagttcaaggcctgcctgatcagcctgggctacgacgtggagaacgacagacagggcgaggccgagttcaacagaatcatgagcctggtggaccccaaccacagcggcctggtgaccttccaggccttcatcgacttcatgagcagagagaccaccgacaccgacaccgccgaccaggtgatcgccagcttcaaggtgctggccggcgacaagaacttcatcaccgccgaggagctgagaagagagctgccccccgaccaggccgagtactgcatcgccagaatggccccctaccagggccccgacgccgtgcccggcgccctggactacaagagcttcagcaccgccctgtacggcgagagcgacctgtag

SEQ ID NO: 9248 - DNA, 1689 bp, synthetic construct
  misc_feature 1..1689: note = Description of Artificial Sequence: Synthetic coding sequence
  source 1..1689: mol_type = other DNA
atggtggactaccacgccgccaaccagagctaccagtacggccccagcagcgccggcaacggcgccggcggcggcggcagcatgggcgactacatggcccaggaggacgactgggacagagacctgctgctggaccccgcctgggagaagcagcagagaaagaccttcaccgcctggtgcaacagccacctgagaaaggccggcacccagatcgagaacatcgacgaggacttcagagacggcctgaagctgatgctgctgctggaggtgatcagcggcgagagactgcccaagcccgagagaggcaagatgagagtgcacaagatcaacaacgtgaacaaggccctggacttcatcgccagcaagggcgtgaagctggtgagcatcggcgccgaggagatcgtggacggcaacgccaagatgaccctgggcatgatctggaccatcatcctgagattcgccatccaggacatcagcgtggaggagaccagcgccaaggagggcctgctgctgtggtgccagagaaagaccgccccctacaagaacgtgaacgtgcagaacttccacatcagctggaaggacggcctggccttcaacgccctgatccacagacacagacccgagctgatcgagtacgacaagctgagaaaggacgaccccgtgaccaacctgaacaacgccttcgaggtggccgagaagtacctggacatccccaagatgctggacgccgaggacatcgtgaacaccgccagacccgacgagaaggccatcatgacctacgtgagcagcttctaccacgccttcagcggcgcccagaaggccgagaccgccgccaacagaatctgcaaggtgctggccgtgaaccaggagaacgagcacctgatggaggactacgagaagctggccagcgacctgctggagtggatcagaagaaccatcccctggctggaggacagagtgccccagaagaccatccaggagatgcagcagaagctggaggacttcagagactacagaagagtgcacaagccccccaaggtgcaggagaagtgccagctggagatcaacttcaacaccctgcagaccaagctgagactgagcaacagacccgccttcatgcccagcgagggcaagatggtgagcgacatcaacaacggctggcagcacctggagcaggccgagaagggctacgaggagtggctgctgaacgagatcagaagactggagagactggaccacctggccgagaagttcagacagaaggccagcatccacgaggcctggaccgacggcaaggaggccatgctgaagcacagagactacgagaccgccaccctgagcgacatcaaggccctgatcagaaagcacgaggccttcgagagcgacctggccgcccaccaggacagagtggagcagatcgccgccatcgcccaggagctgaacgagctggactactacgacagccacaacgtgaacacccccgacggcctgcaggagggccccggccagccccacagccccatcccccccctgtgcatctacgccaagcacagcctgcagagcagcggcgtgggcggctgggccggcagaggctggggcagactgagccccctgagcctgtgcggcctggccagaagattccccagacccggctggggcgacctgggccccgccctgctggtgtggtag

SEQ ID NO: 9249 - DNA, 1518 bp, synthetic construct
  misc_feature 1..1518: note = Description of Artificial Sequence: Synthetic coding sequence
  source 1..1518: mol_type = other DNA
atgaagttcaagctgcacgtgaacagcgccagacagtacaaggacctgtggaacatgagcgacgacaagcccttcctgtgcaccgcccccggctgcggccagagattcaccaacgaggaccacctggccgtgcacaagcacaagcacgagatgaccctgaagttcggccccgccagaaacgacagcgtgatcgtggccgaccagacccccacccccaccagattcctgaagaactgcgaggaggtgggcctgttcaacgagctggccagccccttcgagaacgagttcaagaaggccagcgaggacgacatcaagaagatgcccctggacctgagccccctggccacccccatcatcagaagcaagatcgaggagcccagcgtggtggagaccacccaccaggacagccccctgccccaccccgagagcaccaccagcgacgagaaggaggtgcccctggcccagaccgcccagcccaccagcgccatcgtgagacccgccagcctgcaggtgcccaacgtgctgctgaccagcagcgacagcagcgtgatcatccagcaggccgtgcccagccccaccagcagcaccgtgatcacccaggcccccagcagcaacagacccatcgtgcccgtgcccggccccttccccctgctgctgcacctgcccaacggccagaccatgcccgtggccatccccgccagcatcaccagcagcaacgtgcacgtgcccgccgccgtgcccctggtgagacccgtgaccatggtgcccagcgtgcccggcatccccggccccagcagcccccagcccgtgcagagcgaggccaagatgagactgaaggccgccctgacccagcagcacccccccgtgaccaacggcgacaccgtgaagggccacggcagcggcctggtgagaacccagagcgaggagagcagaccccagagcctgcagcagcccgccaccagcaccaccgagacccccgccagccccgcccacaccaccccccagacccagagcaccagcggcagaagaagaagagccgccaacgaggaccccgacgagaagagaagaaagttcctggagagaaacagagccgccgccagcagatgcagacagaagagaaaggtgtgggtgcagagcctggagaagaaggccgaggacctgagcagcctgaacggccagctgcagagcgaggtgaccctgctgagaaacgaggtggcccagctgaagcagctgctgctggcccacaaggactgccccgtgaccgccatgcagaagaagagcggctaccacaccgccgacaaggacgacagcagcgaggacatcagcgtgcccagcagcccccacaccgaggccatccagcacagcagcgtgagcaccagcaacggcgtgagcagcaccagcaaggccgaggccgtggccaccagcgtgctgacccagatggccgaccagagcaccgagcccgccctgagccagatcgtgatggcccccagcagccagagccagcccagcggcagctag

SEQ ID NO: 9250 - DNA, 1344 bp, synthetic construct
  misc_feature 1..1344: note = Description of Artificial Sequence: Synthetic coding sequence
  source 1..1344: mol_type = other DNA
atgtactgcgcctggatgtggcccgaccagacccccacccccaccagattcctgaagaactgcgaggaggtgggcctgttcaacgagctggccagccccttcgagaacgagttcaagaaggccagcgaggacgacatcaagaagatgcccctggacctgagccccctggccacccccatcatcagaagcaagatcgaggagcccagcgtggtggagaccacccaccaggacagccccctgccccaccccgagagcaccaccagcgacgagaaggaggtgcccctggcccagaccgcccagcccaccagcgccatcgtgagacccgccagcctgcaggtgcccaacgtgctgctgaccagcagcgacagcagcgtgatcatccagcaggccgtgcccagccccaccagcagcaccgtgatcacccaggcccccagcagcaacagacccatcgtgcccgtgcccggccccttccccctgctgctgcacctgcccaacggccagaccatgcccgtggccatccccgccagcatcaccagcagcaacgtgcacgtgcccgccgccgtgcccctggtgagacccgtgaccatggtgcccagcgtgcccggcatccccggccccagcagcccccagcccgtgcagagcgaggccaagatgagactgaaggccgccctgacccagcagcacccccccgtgaccaacggcgacaccgtgaagggccacggcagcggcctggtgagaacccagagcgaggagagcagaccccagagcctgcagcagcccgccaccagcaccaccgagacccccgccagccccgcccacaccaccccccagacccagagcaccagcggcagaagaagaagagccgccaacgaggaccccgacgagaagagaagaaagttcctggagagaaacagagccgccgccagcagatgcagacagaagagaaaggtgtgggtgcagagcctggagaagaaggccgaggacctgagcagcctgaacggccagctgcagagcgaggtgaccctgctgagaaacgaggtggcccagctgaagcagctgctgctggcccacaaggactgccccgtgaccgccatgcagaagaagagcggctaccacaccgccgacaaggacgacagcagcgaggacatcagcgtgcccagcagcccccacaccgaggccatccagcacagcagcgtgagcaccagcaacggcgtgagcagcaccagcaaggccgaggccgtggccaccagcgtgctgacccagatggccgaccagagcaccgagcccgccctgagccagatcgtgatggcccccagcagccagagccagcccagcggcagctag

SEQ ID NO: 9251 - DNA, 381 bp, synthetic construct
  misc_feature 1..381: note = Description of Artificial Sequence: Synthetic coding sequence
  source 1..381: mol_type = other DNA
atgagcgacgacaagcccttcctgtgcaccgcccccggctgcggccagagcgaggtgaccctgctgagaaacgaggtggcccagctgaagcagctgctgctggcccacaaggactgccccgtgaccgccatgcagaagaagagcggctaccacaccgccgacaaggacgacagcagcgaggacatcagcgtgcccagcagcccccacaccgaggccatccagcacagcagcgtgagcaccagcaacggcgtgagcagcaccagcaaggccgaggccgtggccaccagcgtgctgacccagatggccgaccagagcaccgagcccgccctgagccagatcgtgatggcccccagcagccagagccagcccagcggcagctag

SEQ ID NO: 9252 - DNA, 1518 bp, synthetic construct; identical to SEQ ID NO: 9249
  misc_feature 1..1518: note = Description of Artificial Sequence: Synthetic coding sequence
  source 1..1518: mol_type = other DNA

SEQ ID NO: 9253 - DNA, 1344 bp, synthetic construct; identical to SEQ ID NO: 9250
  misc_feature 1..1344: note = Description of Artificial Sequence: Synthetic coding sequence
  source 1..1344: mol_type = other DNA

SEQ ID NO: 9254 - DNA, 630 bp, synthetic construct
  misc_feature 1..630: note = Description of Artificial Sequence: Synthetic coding sequence
  source 1..630: mol_type = other DNA
atgaagttcaagctgcacgtgaacagcgccagacagtacaaggacctgtggaacatgagcgacgacaagcccttcctgtgcaccgcccccggctgcggccagagattcaccaacgaggaccacctggccgtgcacaagcacaagcacgagatgaccctgaagttcggccccgccagaaacgacagcgtgatcgtggccgaccagacccccacccccaccagattcctgaagaactgcgaggaggtgggcctgttcaacgagctggccagccccttcgagaacgagttcaagaaggccagcgaggacgacatcaagaagatgcccctggacctgagccccctggccacccccatcatcagaagcaagatcgaggagcccagcgtggtggagaccacccaccaggacagccccctgccccaccccgagagcaccaccagcgacgagaaggaggtgcccctggcccagaccgcccagcccaccagcgccatcgtgagacccgccagcctgcaggtgcccaacgtgctgctgaccagcagcgacagcagcgtgatcatccagcaggccgtgcccagccccaccagcagcaccgtgatcacccaggcccccagcagcaacagacccatcgtgtag

SEQ ID NO: 9255 - DNA, 1188 bp, synthetic construct
  misc_feature 1..1188: note = Description of Artificial Sequence: Synthetic coding sequence
  source 1..1188: mol_type = other DNA
atgaagttcaagctgcacgtgaacagcgccagacagtacaaggacctgtggaacatgagcgacgacaagcccttcctgtgcaccgcccccggctgcggccagagattcaccaacgaggaccacctggccgtgcacaagcacaagcacgagatgaccctgaagttcggccccgccagaaacgacagcgtgatcgtggccgaccagacccccacccccaccagattcctgaagaactgcgaggaggtgggcctgttcaacgagctggccagccccttcgagaacgagttcaagaaggccagcgaggacgacatcaagaagatgcccctggacctgagccccctggccacccccatcatcagaagcaagatcgaggagcccagcgtggtggagaccacccaccaggacagccccctgccccaccccgagagcaccaccagcgacgagaaggaggtgcccctggcccagaccgcccagcccaccagcgccatcgtgagacccgccagcctgcaggtgcccaacgtgctgctgaccagcagcgacagcagcgtgatcatccagcaggccgtgcccagccccaccagcagcaccgtgatcacccaggcccccagcagcaacagacccatcgtgcccgtgcccggccccttccccctgctgctgcacctgcccaacggccagaccatgcccgtggccatccccgccagcatcaccagcagcaacgtgcacgtgcccgccgccgtgcccctggtgagacccgtgaccatggtgcccagcgtgcccggcatccccggccccagcagcccccagcccgtgcagagcgaggccaagatgagactgaaggccgccctgacccagcagcacccccccgtgaccaacggcgacaccgtgaagggccacggcagcggcctggtgagaacccagagcgaggagagcagaccccagagcctgcagcagcccgccaccagcaccaccgagacccccgccagccccgcccacaccaccccccagacccagagcaccagcggcagaagaagaagagccgccaacgaggaccccgacgagaagagaagaaagttcctggagagaaacagagccgccgccagcagatgcagacagaagagaaaggtgtgggtgcagagcctggagaagaaggccgaggacctgagcagcctgaacggccagctgcagtag

SEQ ID NO: 9256 - DNA, 714 bp, synthetic construct
  misc_feature 1..714: note = Description of Artificial Sequence: Synthetic coding sequence
  source 1..714: mol_type = other DNA
atgaagttcaagctgcacgtgaacagcgccagacagtacaaggacctgtggaacatgagcgacgacaagcccttcctgtgcaccgcccccggctgcggccagagattcaccaacgaggaccacctggccgtgcacaagcacaagcacgagatgaccctgaagttcggccccgccagaaacgacagcgtgatcgtggccgaccagacccccacccccaccagattcctgaagaactgcgaggaggtgggcctgttcaacgagctggccagccccttcgagaacgagttcaagaaggccagcgaggacgacatcaagaagatgcccctggacctgagccccctggccacccccatcatcagaagcaagatcgaggagcccagcgtggtggagaccacccaccaggacagccccctgccccaccccgagagcaccaccagcgacgagaaggaggtgcccctggcccagaccgcccagcccaccagcgccatcgtgagacccgccagcctgcaggtgcccaacgtgctgctgaccagcagcgacagcagcgtgatcatccagcaggccgtgcccagccccaccagcagcaccgtgatcacccaggcccccagcagcaacagacccatcgtgagcttcgaccagagcccctggtgcctggtgttccaggagagccaggtgctgcccctgcccaaccagtacagccagaagcagaagtag

SEQ ID NO: 9257 - DNA, 1464 bp, synthetic construct
  misc_feature 1..1464: note = Description of Artificial Sequence: Synthetic coding sequence
  source 1..1464: mol_type = other DNA
atgagcgacgacaagcccttcctgtgcaccgcccccggctgcggccagagattcaccaacgaggaccacctggccgtgcacaagcacaagcacgagatgaccctgaagttcggccccgccagaaacgacagcgtgatcgtggccgaccagacccccacccccaccagattcctgaagaactgcgaggaggtgggcctgttcaacgagctggccagccccttcgagaacgagttcaagaaggccagcgaggacgacatcaagaagatgcccctggacctgagccccctggccacccccatcatcagaagcaagatcgaggagcccagcgtggtggagaccacccaccaggacagccccctgccccaccccgagagcaccaccagcgacgagaaggaggtgcccctggcccagaccgcccagcccaccagcgccatcgtgagacccgccagcctgcaggtgcccaacgtgctgctgaccagcagcgacagcagcgtgatcatccagcaggccgtgcccagccccaccagcagcaccgtgatcacccaggcccccagcagcaacagacccatcgtgcccgtgcccggccccttccccctgctgctgcacctgcccaacggccagaccatgcccgtggccatccccgccagcatcaccagcagcaacgtgcacgtgcccgccgccgtgcccctggtgagacccgtgaccatggtgcccagcgtgcccggcatccccggccccagcagcccccagcccgtgcagagcgaggccaagatgagactgaaggccgccctgacccagcagcacccccccgtgaccaacggcgacaccgtgaagggccacggcagcggcctggtgagaacccagagcgaggagagcagaccccagagcctgcagcagcccgccaccagcaccaccgagacccccgccagccccgcccacaccaccccccagacccagagcaccagcggcagaagaagaagagccgccaacgaggaccccgacgagaagagaagaaagttcctggagagaaacagagccgccgccagcagatgcagacagaagagaaaggtgtgggtgcagagcctggagaagaaggccgaggacctgagcagcctgaacggccagctgcagagcgaggtgaccctgctgagaaacgaggtggcccagctgaagcagctgctgctggcccacaaggactgccccgtgaccgccatgcagaagaagagcggctaccacaccgccgacaaggacgacagcagcgaggacatcagcgtgcccagcagcccccacaccgaggccatccagcacagcagcgtgagcaccagcaacggcgtgagcagcaccagcaaggccgaggccgtggccaccagcgtgctgacccagatggccgaccagagcaccgagcccgccctgagccagatcgtgatggcccccagcagccagagccagcccagcggcagctag

SEQ ID NO: 9258 - DNA, 1188 bp, synthetic construct; identical to SEQ ID NO: 9255
  misc_feature 1..1188: note = Description of Artificial Sequence: Synthetic coding sequence
  source 1..1188: mol_type = other DNA

SEQ ID NO: 9259 - DNA, 1188 bp, synthetic construct; identical to SEQ ID NO: 9255
  misc_feature 1..1188: note = Description of Artificial Sequence: Synthetic coding sequence
  source 1..1188: mol_type = other DNA

SEQ ID NO: 9260 - DNA, 660 bp, synthetic construct
  misc_feature 1..660: note = Description of Artificial Sequence: Synthetic coding sequence
  source 1..660: mol_type = other DNA
atgagcgacgacaagcccttcctgtgcaccgcccccggctgcggccagagattcaccaacgaggaccacctggccgtgcacaagcacaagcacgagatgaccctgaagttcggccccgccagaaacgacagcgtgatcgtggccgaccagacccccacccccaccagattcctgaagaactgcgaggaggtgggcctgttcaacgagctggccagccccttcgagaacgagttcaagaaggccagcgaggacgacatcaagaagatgcccctggacctgagccccctggccacccccatcatcagaagcaagatcgaggagcccagcgtggtggagaccacccaccaggacagccccctgccccaccccgagagcaccaccagcgacgagaaggaggtgcccctggcccagaccgcccagcccaccagcgccatcgtgagacccgccagcctgcaggtgcccaacgtgctgctgaccagcagcgacagcagcgtgatcatccagcaggccgtgcccagccccaccagcagcaccgtgatcacccaggcccccagcagcaacagacccatcgtgagcttcgaccagagcccctggtgcctggtgttccaggagagccaggtgctgcccctgcccaaccagtacagccagaagcagaagtag

SEQ ID NO: 9261 - DNA, 1134 bp, synthetic construct
  misc_feature 1..1134: note = Description of Artificial Sequence: Synthetic coding sequence
  source 1..1134: mol_type = other DNA
atgagcgacgacaagcccttcctgtgcaccgcccccggctgcggccagagattcaccaacgaggaccacctggccgtgcacaagcacaagcacgagatgaccctgaagttcggccccgccagaaacgacagcgtgatcgtggccgaccagacccccacccccaccagattcctgaagaactgcgaggaggtgggcctgttcaacgagctggccagccccttcgagaacgagttcaagaaggccagcgaggacgacatcaagaagatgcccctggacctgagccccctggccacccccatcatcagaagcaagatcgaggagcccagcgtggtggagaccacccaccaggacagccccctgccccaccccgagagcaccaccagcgacgagaaggaggtgcccctggcccagaccgcccagcccaccagcgccatcgtgagacccgccagcctgcaggtgcccaacgtgctgctgaccagcagcgacagcagcgtgatcatccagcaggccgtgcccagccccaccagcagcaccgtgatcacccaggcccccagcagcaacagacccatcgtgcccgtgcccggccccttccccctgctgctgcacctgcccaacggccagaccatgcccgtggccatccccgccagcatcaccagcagcaacgtgcacgtgcccgccgccgtgcccctggtgagacccgtgaccatggtgcccagcgtgcccggcatccccggccccagcagcccccagcccgtgcagagcgaggccaagatgagactgaaggccgccctgacccagcagcacccccccgtgaccaacggcgacaccgtgaagggccacggcagcggcctggtgagaacccagagcgaggagagcagaccccagagcctgcagcagcccgccaccagcaccaccgagacccccgccagccccgcccacaccaccccccagacccagagcaccagcggcagaagaagaagagccgccaacgaggaccccgacgagaagagaagaaagttcctggagagaaacagagccgccgccagcagatgcagacagaagagaaaggtgtgggtgcagagcctggagaagaaggccgaggacctgagcagcctgaacggccagctgcagtag

SEQ ID NO: 9262 - DNA, 1449 bp, synthetic construct
  misc_feature 1..1449: note = Description of Artificial Sequence: Synthetic coding sequence
  source 1..1449: mol_type = other DNA
atgaagttcaagctgcacgtgaacagcgccagacagtacaaggacctgtggaacatgagcgacgacaagcccttcctgtgcaccgcccccggctgcggccagagattcaccaacgaggaccacctggccgaccagacccccacccccaccagattcctgaagaactgcgaggaggtgggcctgttcaacgagctggccagccccttcgagaacgagttcaagaaggccagcgaggacgacatcaagaagatgcccctggacctgagccccctggccacccccatcatcagaagcaagatcgaggagcccagcgtggtggagaccacccaccaggacagccccctgccccaccccgagagcaccaccagcgacgagaaggaggtgcccctggcccagaccgcccagcccaccagcgccatcgtgagacccgccagcctgcaggtgcccaacgtgctgctgaccagcagcgacagcagcgtgatcatccagcaggccgtgcccagccccaccagcagcaccgtgatcacccaggcccccagcagcaacagacccatcgtgcccgtgcccggccccttccccctgctgctgcacctgcccaacggccagaccatgcccgtggccatccccgccagcatcaccagcagcaacgtgcacgtgcccgccgccgtgcccctggtgagacccgtgaccatggtgcccagcgtgcccggcatccccggccccagcagcccccagcccgtgcagagcgaggccaagatgagactgaaggccgccctgacccagcagcacccccccgtgaccaacggcgacaccgtgaagggccacggcagcggcctggtgagaacccagagcgaggagagcagaccccagagcctgcagcagcccgccaccagcaccaccgagacccccgccagccccgcccacaccaccccccagacccagagcaccagcggcagaagaagaagagccgccaacgaggaccccgacgagaagagaagaaagttcctggagagaaacagagccgccgccagcagatgcagacagaagagaaaggtgtgggtgcagagcctggagaagaaggccgaggacctgagcagcctgaacggccagctgcagagcgaggtgaccctgctgagaaacgaggtggcccagctgaagcagctgctgctggcccacaaggactgccccgtgaccgccatgcagaagaagagcggctaccacaccgccgacaaggacgacagcagcgaggacatcagcgtgcccagcagcccccacaccgaggccatccagcacagcagcgtgagcaccagcaacggcgtgagcagcaccagcaaggccgaggccgtggccaccagcgtgctgacccagatggccgaccagagcaccgagcccgccctgagccagatcgtgatggcccccagcagccagagccagcccagcggcagctag

SEQ ID NO: 9263 - DNA, 2136 bp, synthetic construct
  misc_feature 1..2136: note = Description of Artificial Sequence: Synthetic coding sequence
  source 1..2136: mol_type = other DNA
atgaagctgaagctgaacgtgctgaccatcatcctgctgcccgtgcacctgctgatcaccatctacagcgccctgatcttcatcccctggtacttcctgaccaacgccaagaagaagaacgccatggccaagagaatcaaggccaagcccaccagcgacaagcccggcagcccctacagaagcgtgacccacttcgacagcctggccgtgatcgacatccccggcgccgacaccctggacaagctgttcgaccacgccgtgagcaagttcggcaagaaggacagcctgggcaccagagagatcctgagcgaggagaacgagatgcagcccaacggcaaggtgttcaagaagctgatcctgggcaactacaagtggatgaactacctggaggtgaacagaagagtgaacaacttcggcagcggcctgaccgccctgggcctgaagcccaagaacaccatcgccatcttctgcgagaccagagccgagtggatgatcgccgcccagacctgcttcaagtacaacttccccctggtgaccctgtacgccaccctgggcaaggaggccgtggtgcacggcctgaacgagagcgaggccagctacctgatcaccagcgtggagctgctggagagcaagctgaagaccgccctgctggacatcagctgcgtgaagcacatcatctacgtggacaacaaggccatcaacaaggccgagtaccccgagggcttcgagatccacagcatgcagagcgtggaggagctgggcagcaaccccgagaacctgggcatcccccccagcagacccacccccagcgacatggccatcgtgatgtacaccagcggcagcaccggcagacccaagggcgtgatgatgcaccacagcaacctgatcgccggcatgaccggccagtgcgagagaatccccggcctgggccccaaggacacctacatcggctacctgcccctggcccacgtgctggagctgaccgccgagatcagctgcttcacctacggctgcagaatcggctacagcagccccctgaccctgagcgaccagagcagcaagatcaagaagggcagcaagggcgactgcaccgtgctgaagcccaccctgatggccgccgtgcccgagatcatggacagaatctacaagaacgtgatgagcaaggtgcaggagatgaactacatccagaagaccctgttcaagatcggctacgactacaagctggagcagatcaagaagggctacgacgcccccctgtgcaacctgctgctgttcaagaaggtgaaggccctgctgggcggcaacgtgagaatgatgctgagcggcggcgcccccctgagcccccagacccacagattcatgaacgtgtgcttctgctgccccatcggccagggctacggcctgaccgagagctgcggcgccggcaccgtgaccgaggtgaccgactacaccaccggcagagtgggcgcccccctgatctgctgcgagatcaagctgaaggactggcaggagggcggctacaccatcaacgacaagcccaaccccagaggcgagatcgtgatcggcggccagaacatcagcatgggctacttcaagaacgaggagaagaccgccgaggactacagcgtggacgagaacggccagagatggttctgcaccggcgacatcggcgagttccaccccgacggctgcctgcagatcatcgacagaaagaaggacctggtgaagctgcaggccggcgagtacgtgagcctgggcaaggtggaggccgccctgaagaactgccccctgatcgacaacatctgcgccttcgccaagagcgaccagagctacgtgatcagcttcgtggtgcccaaccagaagagactgaccctgctggcccagcagaagggcgtggagggcacctgggtggacatctgcaacaaccccgccatggaggccgagatcctgaaggagatcagagaggccgccaacgccatgaagctggagagattcgagatccccatcaaggtgagactgagccccgagccctggacccccgagaccggcctggtgaccgacgccttcaagctgaagagaaaggagctgagaaaccactacctgaaggacatcgagagaatgtacggcggcaagtag

SEQ ID NO: 9264 - DNA, 2013 bp, synthetic construct
  misc_feature 1..2013: note = Description of Artificial Sequence: Synthetic coding sequence
  source 1..2013: mol_type = other DNA
atggccaagagaatcaaggccaagcccaccagcgacaagcccggcagcccctacagaagcgtgacccacttcgacagcctggccgtgatcgacatccccggcgccgacaccctggacaagctgttcgaccacgccgtgagcaagttcggcaagaaggacagcctgggcaccagagagatcctgagcgaggagaacgagatgcagcccaacggcaaggtgttcaagaagctgatcctgggcaactacaagtggatgaactacctggaggtgaacagaagagtgaacaacttcggcagcggcctgaccgccctgggcctgaagcccaagaacaccatcgccatcttctgcgagaccagagccgagtggatgatcgccgcccagacctgcttcaagtacaacttccccctggtgaccctgtacgccaccctgggcaaggaggccgtggtgcacggcctgaacgagagcgaggccagctacctgatcaccagcgtggagctgctggagagcaagctgaagaccgccctgctggacatcagctgcgtgaagcacatcatctacgtggacaacaaggccatcaacaaggccgagtaccccgagggcttcgagatccacagcatgcagagcgtggaggagctgggcagcaaccccgagaacctgggcatcccccccagcagacccacccccagcgacatggccatcgtgatgtacaccagcggcagcaccggcagacccaagggcgtgatgatgcaccacagcaacctgatcgccggcatgaccggccagtgcgagagaatccccggcctgggccccaaggacacctacatcggctacctgcccctggcccacgtgctggagctgaccgccgagatcagctgcttcacctacggctgcagaatcggctacagcagccccctgaccctgagcgaccagagcagcaagatcaagaagggcagcaagggcgactgcaccgtgctgaagcccaccctgatggccgccgtgcccgagatcatggacagaatctacaagaacgtgatgagcaaggtgcaggagatgaactacatccagaagaccctgttcaagatcggctacgactacaagctggagcagatcaagaagggctacgacgcccccctgtgcaacctgctgctgttcaagaaggtgaaggccctgctgggcggcaacgtgagaatgatgctgagcggcggcgcccccctgagcccccagacccacagattcatgaacgtgtgcttctgctgccccatcggccagggctacggcctgaccgagagctgcggcgccggcaccgtgaccgaggtgaccgactacaccaccggcagagtgggcgcccccctgatctgctgcgagatcaagctgaaggactggcaggagggcggctacaccatcaacgacaagcccaaccccagaggcgagatcgtgatcggcggccagaacatcagcatgggctacttcaagaacgaggagaagaccgccgaggactacagcgtggacgagaacggccagagatggttctgcaccggcgacatcggcgagttccaccccgacggctgcctgcagatcatcgacagaaagaaggacctggtgaagctgcaggccggcgagtacgtgagcctgggcaaggtggaggccgccctgaagaactgccccctgatcgacaacatctgcgccttcgccaagagcgaccagagctacgtgatcagcttcgtggtgcccaaccagaagagactgaccctgctggcccagcagaagggcgtggagggcacctgggtggacatctgcaacaaccccgccatggaggccgagatcctgaaggagatcagagaggccgccaacgccatgaagctggagagattcgagatccccatcaaggtgagactgagccccgagccctggacccccgagaccggcctggtgaccgacgccttcaagctgaagagaaaggagctgagaaaccactacctgaaggacatcgagagaatgtacggcggcaagtag

SEQ ID NO: 9265 - DNA, 2136 bp, synthetic construct; identical to SEQ ID NO: 9263
  misc_feature 1..2136: note = Description of Artificial Sequence: Synthetic coding sequence
  source 1..2136: mol_type = other DNA

SEQ ID NO: 9266 - DNA, 165 bp, synthetic construct
  misc_feature 1..165: note = Description of Artificial Sequence: Synthetic coding sequence
  source 1..165: mol_type = other DNA
atgaagctgaagctgaacgtgctgaccatcatcctgctgcccgtgcacctgctgatcaccatctacagcgccctgatcttcatcccctggtacttcctgaccaacgccaagaagaagaacgccatggccaagagaatcaaggccaagcccaccagcgacaagtag

SEQ ID NO: 9267 - DNA, 438 bp, synthetic construct
  misc_feature 1..438: note = Description of Artificial Sequence: Synthetic coding sequence
  source 1..438: mol_type = other DNA
atgaagctgaagctgaacgtgctgaccatcatcctgctgcccgtgcacctgctgatcaccatctacagcgccctgatcttcatcccctggtacttcctgaccaacgccaagaagaagaacgccatggccaagagaatcaaggccaagcccaccagcgacaagcccggcagcccctacagaagcgtgacccacttcgacagcctggccgtgatcgacatccccggcgccgacaccctggacaagctgttcgaccacgccgtgagcaagttcggcaagaaggacagcctgggcaccagagagatcctgagcgaggagaacgagatgcagcccaacggcaaggtgttcaagaagctgatcctgggcaactacaagtggatgaactacctggaggtgaacagaagagtgaacaacttcggcagcggcctgaccgccctgtag

SEQ ID NO: 9268 - DNA, 381 bp, synthetic construct
  misc_feature 1..381: note = Description of Artificial Sequence: Synthetic coding sequence
  source 1..381: mol_type = other DNA
atgaagctgaagctgaacgtgctgaccatcatcctgctgcccgtgcacctgctgatcaccatctacagcgccctgatcttcatcccctggtacttcctgaccaacgccaagaagaagaacgccatggccaagagaatcaaggccaagcccaccagcgacaagcccggcagcccctacagaagcgtgacccacttcgacagcctggccgtgatcgacatccccggcgccgacaccctggacaagctgttcgaccacgccgtgagcaagttcggcaagaaggacagcctgggcaccagagagatcctgagcgaggagaacgagatgcagcccaacggcaaggtgttcaagaagctgatcctgggcaactacaagtggatgtag

SEQ ID NO: 9269 - DNA, 465 bp, synthetic construct
  misc_feature 1..465: note = Description of Artificial Sequence: Synthetic coding sequence
  source 1..465: mol_type = other DNA
atggccaagagaatcaaggccaagcccaccagcgacaagcccggcagcccctacagaagcgtgacccacttcgacagcctggccgtgatcgacatccccggcgccgacaccctggacaagctgttcgaccacgccgtgagcaagttcggcaagaaggacagcctgggcaccagagagatcctgagcgaggagaacgagatgcagcccaacggcaaggtgttcaagaagctgatcctgggcaactacaagtggatgaactacctggaggtgaacagaagagtgaacaacttcggcagcggcctgaccgccctgggcctgaagcccaagaacaccatcgccatcttctgcgagaccagagccgagtggatgatcgccgcccagacctgcttcaagtacaacttccccctggtgaccctgtacgccaccctgggcaaggaggccgtggtgcacggcctgaacgagtag

SEQ ID NO: 9270 - DNA, 387 bp, synthetic construct
  misc_feature 1..387: note = Description of Artificial Sequence: Synthetic coding sequence
  source 1..387: mol_type = other DNA
atgaagctgaagctgaacgtgctgaccatcatcctgctgcccgtgcacctgctgatcaccatctacagcgccctgatcttcatcccctggtacttcctgaccaacgccaagaagaagaacgccatggccaagagaatcaaggccaagcccaccagcgacaagcccggcagcccctacagaagcgtgacccacttcgacagcctggccgtgatcgacatccccggcgccgacaccctggacaagctgttcgaccacgccgtgagcaagttcggcaagaaggacagcctgggcaccagagagatcctgagcgaggagaacgagatgcagcccaacggcaaggtgttcaagaagctgatcctgggcaactacaagtggatgaactactag

SEQ ID NO: 9271 - DNA, 2475 bp, synthetic construct
  misc_feature 1..2475: note = Description of Artificial Sequence: Synthetic coding sequence
  source 1..2475: mol_type = other DNA
atgagacagagcctgctgttcctgaccagcgtggtgcccttcgtgctggcccccagaccccccgacgaccccggcttcggcccccaccagagactggagaagctggacagcctgctgagcgactacgacatcctgagcctgagcaacatccagcagcacagcgtgagaaagagagacctgcagaccagcacccacgtggagaccctgctgaccttcagcgccctgaagagacacttcaagctgtacctgaccagcagcaccgagagattcagccagaacttcaaggtggtggtggtggacggcaagaacgagagcgagtacaccgtgaagtggcaggacttcttcaccggccacgtggtgggcgagcccgacagcagagtgctggcccacatcagagacgacgacgtgatcatcagaatcaacaccgacggcgccgagtacaacatcgagcccctgtggagattcgtgaacgacaccaaggacaagagaatgctggtgtacaagagcgaggacatcaagaacgtgagcagactgcagagccccaaggtgtgcggctacctgaaggtggacaacgaggagctgctgcccaagggcctggtggacagagagccccccgaggagctggtgcacagagtgaagagaagagccgaccccgaccccatgaagaacacctgcaagctgctggtggtggccgaccacagattctacagatacatgggcagaggcgaggagagcaccaccaccaactacctgatcgagctgatcgacagagtggacgacatctacagaaacaccagctgggacaacgccggcttcaagggctacggcatccagatcgagcagatcagaatcctgaagagcccccaggaggtgaagcccggcgagaagcactacaacatggccaagagctaccccaacgaggagaaggacgcctgggacgtgaagatgctgctggagcagttcagcttcgacatcgccgaggaggccagcaaggtgtgcctggcccacctgttcacctaccaggacttcgacatgggcaccctgggcctggcctacgtgggcagccccagagccaacagccacggcggcgtgtgccccaaggcctactacagccccgtgggcaagaagaacatctacctgaacagcggcctgaccagcaccaagaactacggcaagaccatcctgaccaaggaggccgacctggtgaccacccacgagctgggccacaacttcggcgccgagcacgaccccgacggcctggccgagtgcgcccccaacgaggaccagggcggcaagtacgtgatgtaccccatcgccgtgagcggcgaccacgagaacaacaagatgttcagcaactgcagcaagcagagcatctacaagaccatcgagagcaaggcccaggagtgcttccaggagagaagcaacaaggtgtgcggcaacagcagagtggacgagggcgaggagtgcgaccccggcatcatgtacctgaacaacgacacctgctgcaacagcgactgcaccctgaaggagggcgtgcagtgcagcgacagaaacagcccctgctgcaagaactgccagttcgagaccgcccagaagaagtgccaggaggccatcaacgccacctgcaagggcgtgagctactgcaccggcaacagcagcgagtgccccccccccggcaacgccgaggacgacaccgtgtgcctggacctgggcaagtgcaaggacggcaagtgcatccccttctgcgagagagagcagcagctggagagctgcgcctgcaacgagaccgacaacagctgcaaggtgtgctgcagagacctgagcggcagatgcgtgccctacgtggacgccgagcagaagaacctgttcctgagaaagggcaagccctgcaccgtgggcttctgcgacatgaacggcaagtgcgagaagagagtgcaggacgtgatcgagagattctgggacttcatcgaccagctgagcatcaacaccttcggcaagttcctggccgacaacatcgtgggcagcgtgctggtgttcagcctgatcttctggatccccttcagcatcctggtgcactgcgtggacaagaagctggacaagcagtacgagagcctgagcctgttccaccccagcaacgtggagatgctgagcagcatggacagcgccagcgtgagaatcatcaagcccttccccgccccccagacccccggcagactgcagcccgcccccgtgatccccagcgcccccgccgcccccaagctggaccaccagagaatggacaccatccaggaggaccccagcaccgacagccacatggacgaggacggcttcgagaaggaccccttccccaacagcagcaccgccgccaagagcttcgaggacctgaccgaccaccccgtgaccagaagcgagaaggccgccagcttcaagctgcagagacagaacagagtggacagcaaggagaccgagtgctag

SEQ ID NO: 9272 - DNA, 777 bp, synthetic construct
  misc_feature 1..777: note = Description of Artificial Sequence: Synthetic coding sequence
  source 1..777: mol_type = other DNA
atgagacagagcctgctgttcctgaccagcgtggtgcccttcgtgctggcccccagaccccccgacgaccccggcttcggcccccaccagagactggagaagctggacagcctgctgagcgactacgacatcctgagcctgagcaacatccagcagcacagcgtgagaaagagagacctgcagaccagcacccacgtggagaccctgctgaccttcagcgccctgaagagacacttcaagctgtacctgaccagcagcaccgagagattcagccagaacttcaaggtggtggtggtggacggcaagaacgagagcgagtacaccgtgaagtggcaggacttcttcaccggccacgtggtgggcgagcccgacagcagagtgctggcccacatcagagacgacgacgtgatcatcagaatcaacaccgacggcgccgagtacaacatcgagcccctgtggagattcgtgaacgacaccaaggacaagagaatgctggtgtacaagagcgaggacatcaagaacgtgagcagactgcagagccccaaggtgtgcggctacctgaaggtggacaacgaggagctgctgcccaagggcctggtggacagagagccccccgaggagctggtgcacagagtgaagagaagagccgaccccgaccccatgaagaacacctgcaagctgctggtggtggccgaccacagattctacagatacatgggcagaggcgaggagagcaccaccaccaactacctgatccacaccgacagagccaactag

SEQ ID NO: 9273 - DNA, 2499 bp, synthetic construct
  misc_feature 1..2499: note = Description of Artificial Sequence: Synthetic coding sequence
  source 1..2499: mol_type = other DNA
atgaagccccccggcagcagcagcagacagccccccctggccggctgcagcctggccggcgccagctgcggcccccagagaggccccgccggcagcgtgcccgccagcgcccccgccagaacccccccctgcagactgctgctggtgctgctgctgctgccccccctggccgccagcagcagacccagagcctggggcgccgccgcccccagcgccccccactggaacgagaccgccgagaagaacctgggcgtgctggccgacgaggacaacaccctgcagcagaacagcagcagcaacatcagctacagcaacgccatgcagaaggagatcaccctgcccagcagactgatctactacatcaaccaggacagcgagagcccctaccacgtgctggacaccaaggccagacaccagcagaagcacaacaaggccgtgcacctggcccaggccagcttccagatcgaggccttcggcagcaagttcatcctggacctgatcctgaacaacggcctgctgagcagcgactacgtggagatccactacgagaacggcaagccccagtacagcaagggcggcgagcactgctactaccacggcagcatcagaggcgtgaaggacagcaaggtggccctgagcacctgcaacggcctgcacggcatgttcgaggacgacaccttcgtgtacatgatcgagcccctggagctggtgcacgacgagaagagcaccggcagaccccacatcatccagaagaccctggccggccagtacagcaagcagatgaagaacctgaccatggagagaggcgaccagtggcccttcctgagcgagctgcagtggctgaagagaagaaagagagccgtgaaccccagcagaggcatcttcgaggagatgaagtacctggagctgatgatcgtgaacgaccacaagacctacaagaagcacagaagcagccacgcccacaccaacaacttcgccaagagcgtggtgaacctggtggacagcatctacaaggagcagctgaacaccagagtggtgctggtggccgtggagacctggaccgagaaggaccagatcgacatcaccaccaaccccgtgcagatgctgcacgagttcagcaagtacagacagagaatcaagcagcacgccgacgccgtgcacctgatcagcagagtgaccttccactacaagagaagcagcctgagctacttcggcggcgtgtgcagcagaaccagaggcgtgggcgtgaacgagtacggcctgcccatggccgtggcccaggtgctgagccagagcctggcccagaacctgggcatccagtgggagcccagcagcagaaagcccaagtgcgactgcaccgagagctggggcggctgcatcatggaggagaccggcgtgagccacagcagaaagttcagcaagtgcagcatcctggagtacagagacttcctgcagagaggcggcggcgcctgcctgttcaacagacccaccaagctgttcgagcccaccgagtgcggcaacggctacgtggaggccggcgaggagtgcgactgcggcttccacgtggagtgctacggcctgtgctgcaagaagtgcagcctgagcaacggcgcccactgcagcgacggcccctgctgcaacaacaccagctgcctgttccagcccagaggctacgagtgcagagacgccgtgaacgagtgcgacatcaccgagtactgcaccggcgacagcggccagtgcccccccaacctgcacaagcaggacggctacgcctgcaaccagaaccagggcagatgctacaacggcgagtgcaagaccagagacaaccagtgccagtacatctggggcaccaaggccgccggcagcgacaagttctgctacgagaagctgaacaccgagggcaccgagaagggcaactgcggcaaggacggcgacagatggatccagtgcagcaagcacgacgtgttctgcggcttcctgctgtgcaccaacctgaccagagcccccagaatcggccagctgcagggcgagatcatccccaccagcttctaccaccagggcagagtgatcgactgcagcggcgcccacgtggtgctggacgacgacaccgacgtgggctacgtggaggacggcaccccctgcggccccagcatgatgtgcctggacagaaagtgcctgcagatccaggccctgaacatgagcagctgccccctggacagcaagggcaaggtgtgcagcggccacggcgtgtgcagcaacgaggccacctgcatctgcgacttcacctgggccggcaccgactgcagcatcagagaccccgtgagaaacctgcacccccccaaggacgagggccccaagggccccagcgccaccaacctgatcatcggcagcatcgccggcgccatcctggtggccgccatcgtgctgggcggcaccggctggggcttcaagaacgtgaagaagagaagattcgaccccacccagcagggccccatctag

SEQ ID NO: 9274 - DNA, 2499 bp, synthetic construct
  misc_feature 1..2499: note = Description of Artificial Sequence: Synthetic coding sequence
  source 1..2499: mol_type = other DNA
atgaagccccccggcagcagcagcagacagccccccctggccggctgcagcctggccggcgccagctgcggcccccagagaggccccgccggcagcgtgcccgccagcgcccccgccagaacccccccctgcagactgctgctggtgctgctgctgctgccccccctggccgccagcagcagacccagagcctggggcgccgccgcccccagcgccccccactggaacgagaccgccgagaagaacctgggcgtgctggccgacgaggacaacaccctgcagcagaacagcagcagcaacatcagctacagcaacgccatgcagaaggagatcaccctgcccagcagactgatctactacatcaaccaggacagcgagagcccctaccacgtgctggacaccaaggccagacaccagcagaagcacaacaaggccgtgcacctggcccaggccagcttccagatcgaggccttcggcagcaagttcatcctggacctgatcctgaacaacggcctgctgagcagcgactacgtggagatccactacgagaacggcaagccccagtacagcaagggcggcgagcactgctactaccacggcagcatcagaggcgtgaaggacagcaaggtggccctgagcacctgcaacggcctgcacggcatgttcgaggacgacaccttcgtgtacatgatcgagcccctggagctggtgcacgacgagaagagcaccggcagaccccacatcatccagaagaccctggccggccagtacagcaagcagatgaagaacctgaccatggagagaggcgaccagtggcccttcctgagcgagctgcagtggctgaagagaagaaagagagccgtgaaccccagcagaggcatcttcgaggagatgaagtacctggagctgatgatcgtgaacgaccacaagacctacaagaagcacagaagcagccacgcccacaccaacaacttcgccaagagcgtggtgaacctggtggacagcatctacaaggagcagctgaacaccagagtggtgctggtggccgtggagacctggaccgagaaggaccagatcgacatcaccaccaaccccgtgcagatgctgcacgagttcagcaagtacagacagagaatcaagcagcacgccgacgccgtgcacctgatcagcagagtgaccttccactacaagagaagcagcctgagctacttcggcggcgtgtgcagcagaaccagaggcgtgggcgtgaacgagtacggcctgcccatggccgtggcccaggtgctgagccagagcctggcccagaacctgggcatccagtgggagcccagcagcagaaagcccaagtgcgactgcaccgagagctggggcggctgcatcatggaggagaccggcgtgagccacagcagaaagttcagcaagtgcagcatcctggagtacagagacttcctgcagagaggcggcggcgcctgcctgttcaacagacccaccaagctgttcgagcccaccgagtgcggcaacggctacgtggaggccggcgaggagtgcgactgcggcttccacgtggagtgctacggcctgtgctgcaagaagtgcagcctgagcaacggcgcccactgcagcgacggcccctgctgcaacaacaccagctgcctgttccagcccagaggctacgagtgcagagacgccgtgaacgagtgcgacatcaccgagtactgcaccggcgacagcggccagtgcccccccaacctgcacaagcaggacggctacgcctgcaaccagaaccagggcagatgctacaacggcgagtgcaagaccagagacaaccagtgccagtacatctggggcaccaaggccgccggcagcgacaagttctgctacgagaagctgaacaccgagggcaccgagaagggcaactgcggcaaggacggcgacagatggatccagtgcagcaagcacgacgtgttctgcggcttcctgctgtgcaccaacctgaccagagcccccagaatcggccagctgcagggcgagatcatccccaccagcttctaccaccagggcagagtgatcgactgcagcggcgcccacgtggtgctggacgacgacaccgacgtgggctacgtggaggacggcaccccctgcggccccagcatgatgtgcctggacagaaagtgcctgcagatccaggccctgaacatgagcagctgccccctggacagcaagggcaaggtgtgcagcggccacggcgtgtgcagcaacgaggccacctgcatctgcgacttcacctgggccggcaccgactgcagcatcagagaccccgtgagaaacctgcacccccccaaggacgagggccccaaggtgaacatggccaccagcagactgatcggcgccgtggccggcaccatcctggccctgggcgtgatcttcggcggcaccggctggggcatcgagaacgtgaagaagagaagattcgaccccacccagcagggccccatctag

SEQ ID NO: 9275 - DNA, 2499 bp, synthetic construct
  misc_feature 1..2499: note = Description of Artificial Sequence: Synthetic coding sequence
  source 1..2499: mol_type = other DNA
atgaagccccccggcagcagcagcagacagccccccctggccggctgcagcctggccggcgccagctgcggcccccagagaggccccgccggcagcgtgcccgccagcgcccccgccagaacccccccctgcagactgctgctggtgctgctgctgctgccccccctggccgccagcagcagacccagagcctggggcgccgccgcccccagcgccccccactggaacgagaccgccgagaagaacctgggcgtgctggccgacgaggacaacaccctgcagcagaacagcagcagcaacatcagctacagcaacgccatgcagaaggagatcaccctgcccagcagactgatctactacatcaaccaggacagcgagagcccctaccacgtgctggacaccaaggccagacaccagcagaagcacaacaaggccgtgcacctggcccaggccagcttccagatcgaggccttcggcagcaagttcatcctggacctgatcctgaacaacggcctgctgagcagcgactacgtggagatccactacgagaacggcaagccccagtacagcaagggcggcgagcactgctactaccacggcagcatcagaggcgtgaaggacagcaaggtggccctgagcacctgcaacggcctgcacggcatgttcgaggacgacaccttcgtgtacatgatcgagcccctggagctggtgcacgacgagaagagcaccggcagaccccacatcatccagaagaccctggccggccagtacagcaagcagatgaagaacctgaccatggagagaggcgaccagtggcccttcctgagcgagctgcagtggctgaagagaagaaagagagccgtgaaccccagcagaggcatcttcgaggagatgaagtacctggagctgatgatcgtgaacgaccacaagacctacaagaagcacagaagcagccacgcccacaccaacaacttcgccaagagcgtggtgaacctggtggacagcatctacaaggagcagctgaacaccagagtggtgctggtggccgtggagacctggaccgagaaggaccagatcgacatcaccaccaaccccgtgcagatgctgcacgagttcagcaagtacagacagagaatcaagcagcacgccgacgccgtgcacctgatcagcagagtgaccttccactacaagagaagcagcctgagctacttcggcggcgtgtgcagcagaaccagaggcgtgggcgtgaacgagtacggcctgcccatggccgtggcccaggtgctgagccagagcctggcccagaacctgggcatccagtgggagcccagcagcagaaagcccaagtgcgactgcaccgagagctggggcggctgcatcatggaggagaccggcgtgagccacagcagaaagttcagcaagtgcagcatcctggagtacagagacttcctgcagagaggcggcggcgcctgcctgttcaacagacccaccaagctgttcgagcccaccgagtgcggcaacggctacgtggaggccggcgaggagtgcgactgcggcttccacgtggagtgctacggcctgtgctgcaagaagtgcagcctgagcaacggcgcccactgcagcgacggcccctgctgcaacaacaccagctgcctgttccagcccagaggctacgagtgcagagacgccgtgaacgagtgcgacatcaccgagtactgcaccggcgacagcggccagtgcccccccaacctgcacaagcaggacggctacgcctgcaaccagaaccagggcagatgctacaacggcgagtgcaagaccagagacaaccagtgccagtacatctggggcaccaaggccgccggcagcgacaagttctgctacgagaagctgaacaccgagggcaccgagaagggcaactgcggcaaggacggcgacagatggatccagtgcagcaagcacgacgtgttctgcggcttcctgctgtgcaccaacctgaccagagcccccagaatcggccagctgcagggcgagatcatccccaccagcttctaccaccagggcagagtgatcgactgcagcggcgcccacgtggtgctggacgacgacaccgacgtgggctacgtggaggacggcaccccctgcggccccagcatgatgtgcctggacagaaagtgcctgcagatccaggccctgaacatgagcagctgccccctggacagcaagggcaaggtgtgcagcggccacggcgtgtgcagcaacgaggccacctgcatctgcgacttcacctgggccggcaccgactgcagcatcagagaccccgtgagaaacctgcacccccccaaggacgagggccccaaggagatgagcagaagagagggcagcatcctgctgagcaaggcccccagcgagagcgccgccctggacggccacagactggccctgctggacagcggctacgacatcctggccgccgtgctgctggagctgctgagcctgtag

SEQ ID NO: 9276 - DNA, 2100 bp, synthetic construct
  misc_feature 1..2100: note = Description of Artificial Sequence: Synthetic coding sequence
  source 1..2100: mol_type = other DNA
atgcagaaggagatcaccctgcccagcagactgatctactacatcaaccaggacagcgagagcccctaccacgtgctggacaccaaggccagacaccagcagaagcacaacaaggccgtgcacctggcccaggccagcttccagatcgaggccttcggcagcaagttcatcctggacctgatcctgaacaacggcctgctgagcagcgactacgtggagatccactacgagaacggcaagccccagtacagcaagggcggcgagcactgctactaccacggcagcatcagaggcgtgaaggacagcaaggtggccctgagcacctgcaacggcctgcacggcatgttcgaggacgacaccttcgtgtacatgatcgagcccctggagctggtgcacgacgagaagagcaccggcagaccccacatcatccagaagaccctggccggccagtacagcaagcagatgaagaacctgaccatggagagaggcgaccagtggcccttcctgagcgagctgcagtggctgaagagaagaaagagagccgtgaaccccagcagaggcatcttcgaggagatgaagtacctggagctgatgatcgtgaacgaccacaagacctacaagaagcacagaagcagccacgcccacaccaacaacttcgccaagagcgtggtgaacctggtggacagcatctacaaggagcagctgaacaccagagtggtgctggtggccgtggagacctggaccgagaaggaccagatcgacatcaccaccaaccccgtgcagatgctgcacgagttcagcaagtacagacagagaatcaagcagcacgccgacgccgtgcacctgatcagcagagtgaccttccactacaagagaagcagcctgagctacttcggcggcgtgtgcagcagaaccagaggcgtgggcgtgaacgagtacggcctgcccatggccgtggcccaggtgctgagccagagcctggcccagaacctgggcatccagtgggagcccagcagcagaaagcccaagtgcgactgcaccgagagctggggcggctgcatcatggaggagaccggcgtgagccacagcagaaagttcagcaagtgcagcatcctggagtacagagacttcctgcagagaggcggcggcgcctgcctgttcaacagacccaccaagctgttcgagcccaccgagtgcggcaacggctacgtggaggccggcgaggagtgcgactgcggcttccacgtggagtgctacggcctgtgctgcaagaagtgcagcctgagcaacggcgcccactgcagcgacggcccctgctgcaacaacaccagctgcctgttccagcccagaggctacgagtgcagagacgccgtgaacgagtgcgacatcaccgagtactgcaccggcgacagcggccagtgcccccccaacctgcacaagcaggacggctacgcctgcaaccagaaccagggcagatgctacaacggcgagtgcaagaccagagacaaccagtgccagtacatctggggcaccaaggccgccggcagcgacaagttctgctacgagaagctgaacaccgagggcaccgagaagggcaactgcggcaaggacggcgacagatggatccagtgcagcaagcacgacgtgttctgcggcttcctgctgtgcaccaacctgaccagagcccccagaatcggccagctgcagggcgagatcatccccaccagcttctaccaccagggcagagtgatcgactgcagcggcgcccacgtggtgctggacgacgacaccgacgtgggctacgtggaggacggcaccccctgcggccccagcatgatgtgcctggacagaaagtgcctgcagatccaggccctgaacatgagcagctgccccctggacagcaaggacgagggccccaaggcctgcttcctgaagagaaccaagtgcaagagctaccccaagcacagaaagtgccaggaggagaaggtgagaagctacagcgccagaccccacctgaaccagctgagatggatggacaccgccctgcactgctggatcctgggcatgacctacagccagcagtgctactggaactactag

SEQ ID NO: 9277 - DNA, 324 bp, synthetic construct
  misc_feature 1..324: note = Description of Artificial Sequence: Synthetic coding sequence
  source 1..324: mol_type = other DNA
tgacagatccaggccctgaacatgagcagctgccccctggacagcaagggcaaggtgtgcagcggccacggcgtgtgcagcaacgaggccacctgcatctgcgacttcacctgggccggcaccgactgcagcatcagagaccccgtgagaaacctgcacccccccaaggacgagggccccaaggagatgagcagaagagagggcagcatcctgctgagcaaggcccccagcgagagcgccgccctggacggccacagactggccctgctggacagcggctacgacatcctggccgccgtgctgctggagctgctgagcctgtag

SEQ ID NO: 9278 - DNA, 8532 bp, synthetic construct
  misc_feature 1..8532: note = Description of Artificial Sequence: Synthetic coding sequence
  source 1..8532: mol_type = other DNA
atggccgccgccagctacgaccagctgctgaagcaggtggaggccctgaagatggagaacagcaacctgagacaggagctggaggacaacagcaaccacctgaccaagctggagaccgaggccagcaacatgaaggaggtgctgaagcagctgcagggcagcatcgaggacgaggccatggccagcagcggccagatcgacctgctggagagactgaaggagctgaacctggacagcagcaacttccccggcgtgaagctgagaagcaagatgagcctgagaagctacggcagcagagagggcagcgtgagcagcagaagcggcgagtgcagccccgtgcccatgggcagcttccccagaagaggcttcgtgaacggcagcagagagagcaccggctacctggaggagctggagaaggagagaagcctgctgctggccgacctggacaaggaggagaaggagaaggactggtactacgcccagctgcagaacctgaccaagagaatcgacagcctgcccctgaccgagaacttcagcctgcagaccgacatgaccagaagacagctggagtacgaggccagacagatcagagtggccatggaggagcagctgggcacctgccaggacatggagaagagagcccagagaagaatcgccagaatccagcagatcgagaaggacatcctgagaatcagacagctgctgcagagccaggccaccgaggccgagagaagcagccagaacaagcacgagaccggcagccacgacgccgagagacagaacgagggccagggcgtgggcgagatcaacatggccaccagcggcaacggccagggcagcaccaccagaatggaccacgagaccgccagcgtgctgagcagcagcagcacccacagcgcccccagaagactgaccagccacctgggcaccaaggtggagatggtgtacagcctgctgagcatgctgggcacccacgacaaggacgacatgagcagaaccctgctggccatgagcagcagccaggacagctgcatcagcatgagacagagcggctgcctgcccctgctgatccagctgctgcacggcaacgacaaggacagcgtgctgctgggcaacagcagaggcagcaaggaggccagagccagagccagcgccgccctgcacaacatcatccacagccagcccgacgacaagagaggcagaagagagatcagagtgctgcacctgctggagcagatcagagcctactgcgagacctgctgggagtggcaggaggcccacgagcccggcatggaccaggacaagaaccccatgcccgcccccgtggagcaccagatctgccccgccgtgtgcgtgctgatgaagctgagcttcgacgaggagcacagacacgccatgaacgagctgggcggcctgcaggccatcgccgagctgctgcaggtggactgcgagatgtacggcctgaccaacgaccactacagcatcaccctgagaagatacgccggcatggccctgaccaacctgaccttcggcgacgtggccaacaaggccaccctgtgcagcatgaagggctgcatgagagccctggtggcccagctgaagagcgagagcgaggacctgcagcaggtgatcgccagcgtgctgagaaacctgagctggagagccgacgtgaacagcaagaagaccctgagagaggtgggcagcgtgaaggccctgatggagtgcgccctggaggtgaagaaggagagcaccctgaagagcgtgctgagcgccctgtggaacctgagcgcccactgcaccgagaacaaggccgacatctgcgccgtggacggcgccctggccttcctggtgggcaccctgacctacagaagccagaccaacaccctggccatcatcgagagcggcggcggcatcctgagaaacgtgagcagcctgatcgccaccaacgaggaccacagacagatcctgagagagaacaactgcctgcagaccctgctgcagcacctgaagagccacagcctgaccatcgtgagcaacgcctgcggcaccctgtggaacctgagcgccagaaaccccaaggaccaggaggccctgtgggacatgggcgccgtgagcatgctgaagaacctgatccacagcaagcacaagatgatcgccatgggcagcgccgccgccctgagaaacctgatggccaacagacccgccaagtacaaggacgccaacatcatgagccccggcagcagcctgcccagcctgcacgtgagaaagcagaaggccctggaggccgagctggacgcccagcacctgagcgagaccttcgacaacatcgacaacctgagccccaaggccagccacagaagcaagcagagacacaagcagagcctgtacggcgactacgtgttcgacaccaacagacacgacgacaacagaagcgacaacttcaacaccggcaacatgaccgtgctgagcccctacctgaacaccaccgtgctgcccagcagcagcagcagcagaggcagcctggacagcagcagaagcgagaaggacagaagcctggagagagagagaggcatcggcctgggcaactaccaccccgccaccgagaaccccggcaccagcagcaagagaggcctgcagatcagcaccaccgccgcccagatcgccaaggtgatggaggaggtgagcgccatccacaccagccaggaggacagaagcagcggcagcaccaccgagctgcactgcgtgaccgacgagagaaacgccctgagaagaagcagcgccgcccacacccacagcaacacctacaacttcaccaagagcgagaacagcaacagaacctgcagcatgccctacgccaagctggagtacaagagaagcagcaacgacagcctgaacagcgtgagcagcagcgacggctacggcaagagaggccagatgaagcccagcatcgagagctacagcgaggacgacgagagcaagttctgcagctacggccagtaccccgccgacctggcccacaagatccacagcgccaaccacatggacgacaacgacggcgagctggacacccccatcaactacagcctgaagtacagcgacgagcagctgaacagcggcagacagagccccagccagaacgagagatgggccagacccaagcacatcatcgaggacgagatcaagcagagcgagcagagacagagcagaaaccagagcaccacctaccccgtgtacaccgagagcaccgacgacaagcacctgaagttccagccccacttcggccagcaggagtgcgtgagcccctacagaagcagaggcgccaacggcagcgagaccaacagagtgggcagcaaccacggcatcaaccagaacgtgagccagagcctgtgccaggaggacgactacgaggacgacaagcccaccaactacagcgagagatacagcgaggaggagcagcacgaggaggaggagagacccaccaactacagcatcaagtacaacgaggagaagagacacgtggaccagcccatcgactacagcctgaagtacgccaccgacatccccagcagccagaagcagagcttcagcttcagcaagagcagcagcggccagagcagcaagaccgagcacatgagcagcagcagcgagaacaccagcacccccagcagcaacgccaagagacagaaccagctgcaccccagcagcgcccagagcagaagcggccagccccagaaggccgccacctgcaaggtgagcagcatcaaccaggagaccatccagacctactgcgtggaggacacccccatctgcttcagcagatgcagcagcctgagcagcctgagcagcgccgaggacgagatcggctgcaaccagaccacccaggaggccgacagcgccaacaccctgcagatcgccgagatcaaggagaagatcggcaccagaagcgccgaggaccccgtgagcgaggtgcccgccgtgagccagcaccccagaaccaagagcagcagactgcagggcagcagcctgagcagcgagagcgccagacacaaggccgtggagttcagcagcggcgccaagagccccagcaagagcggcgcccagacccccaagagcccccccgagcactacgtgcaggagacccccctgatgttcagcagatgcaccagcgtgagcagcctggacagcttcgagagcagaagcatcgccagcagcgtgcagagcgagccctgcagcggcatggtgagcggcatcatcagccccagcgacctgcccgacagccccggccagaccatgccccccagcagaagcaagaccccccccccccccccccagaccgcccagaccaagagagaggtgcccaagaacaaggcccccaccgccgagaagagagagagcggccccaagcaggccgccgtgaacgccgccgtgcagagagtgcaggtgctgcccgacgccgacaccctgctgcacttcgccaccgagagcacccccgacggcttcagctgcagcagcagcctgagcgccctgagcctggacgagcccttcatccagaaggacgtggagctgagaatcatgccccccgtgcaggagaacgacaacggcaacgagaccgagagcgagcagcccaaggagagcaacgagaaccaggagaaggaggccgagaagaccatcgacagcgagaaggacctgctggacgacagcgacgacgacgacatcgagatcctggaggagtgcatcatcagcgccatgcccaccaagagcagcagaaaggccaagaagcccgcccagaccgccagcaagctgcccccccccgtggccagaaagcccagccagctgcccgtgtacaagctgctgcccagccagaacagactgcagccccagaagcacgtgagcttcacccccggcgacgacatgcccagagtgtactgcgtggagggcacccccatcaacttcagcaccgccaccagcctgagcgacctgaccatcgagagcccccccaacgagctggccgccggcgagggcgtgagaggcggcgcccagagcggcgagttcgagaagagagacaccatccccaccgagggcagaagcaccgacgaggcccagggcggcaagaccagcagcgtgaccatccccgagctggacgacaacaaggccgaggagggcgacatcctggccgagtgcatcaacagcgccatgcccaagggcaagagccacaagcccttcagagtgaagaagatcatggaccaggtgcagcaggccagcgccagcagcagcgcccccaacaagaaccagctggacggcaagaagaagaagcccaccagccccgtgaagcccatcccccagaacaccgagtacagaaccagagtgagaaagaacgccgacagcaagaacaacctgaacgccgagagagtgttcagcgacaacaaggacagcaagaagcagaacctgaagaacaacagcaaggtgttcaacgacaagctgcccaacaacgaggacagagtgagaggcagcttcgccttcgacagcccccaccactacacccccatcgagggcaccccctactgcttcagcagaaacgacagcctgagcagcctggacttcgacgacgacgacgtggacctgagcagagagaaggccgagctgagaaaggccaaggagaacaaggagagcgaggccaaggtgaccagccacaccgagctgaccagcaaccagcagagcgccaacaagacccaggccatcgccaagcagcccatcaacagaggccagcccaagcccatcctgcagaagcagagcaccttcccccagagcagcaaggacatccccgacagaggcgccgccaccgacgagaagctgcagaacttcgccatcgagaacacccccgtgtgcttcagccacaacagcagcctgagcagcctgagcgacatcgaccaggagaacaacaacaaggagaacgagcccatcaaggagaccgagccccccgacagccagggcgagcccagcaagccccaggccagcggctacgcccccaagagcttccacgtggaggacacccccgtgtgcttcagcagaaacagcagcctgagcagcctgagcatcgacagcgaggacgacctgctgcaggagtgcatcagcagcgccatgcccaagaagaagaagcccagcagactgaagggcgacaacgagaagcacagccccagaaacatgggcggcatcctgggcgaggacctgaccctggacctgaaggacatccagagacccgacagcgagcacggcctgagccccgacagcgagaacttcgactggaaggccatccaggagggcgccaacagcatcgtgagcagcctgcaccaggccgccgccgccgcctgcctgagcagacaggccagcagcgacagcgacagcatcctgagcctgaagagcggcatcagcctgggcagccccttccacctgacccccgaccaggaggagaagcccttcaccagcaacaagggccccagaatcctgaagcccggcgagaagagcaccctggagaccaagaagatcgagagcgagagcaagggcatcaagggcggcaagaaggtgtacaagagcctgatcaccggcaaggtgagaagcaacagcgagatcagcggccagatgaagcagcccctgcaggccaacatgcccagcatcagcagaggcagaaccatgatccacatccccggcgtgagaaacagcagcagcagcaccagccccgtgagcaagaagggcccccccctgaagacccccgccagcaagagccccagcgagggccagaccgccaccaccagccccagaggcgccaagcccagcgtgaagagcgagctgagccccgtggccagacagaccagccagatcggcggcagcagcaaggcccccagcagaagcggcagcagagacagcacccccagcagacccgcccagcagcccctgagcagacccatccagagccccggcagaaacagcatcagccccggcagaaacggcatcagcccccccaacaagctgagccagctgcccagaaccagcagccccagcaccgccagcaccaagagcagcggcagcggcaagatgagctacaccagccccggcagacagatgagccagcagaacctgaccaagcagaccggcctgagcaagaacgccagcagcatccccagaagcgagagcgccagcaagggcctgaaccagatgaacaacggcaacggcgccaacaagaaggtggagctgagcagaatgagcagcaccaagagcagcggcagcgagagcgacagaagcgagagacccgtgctggtgagacagagcaccttcatcaaggaggcccccagccccaccctgagaagaaagctggaggagagcgccagcttcgagagcctgagccccagcagcagacccgccagccccaccagaagccaggcccagacccccgtgctgagccccagcctgcccgacatgagcctgagcacccacagcagcgtgcaggccggcggctggagaaagctgccccccaacctgagccccaccatcgagtacaacgacggcagacccgccaagagacacgacatcgccagaagccacagcgagagccccagcagactgcccatcaacagaagcggcacctggaagagagagcacagcaagcacagcagcagcctgcccagagtgagcacctggagaagaaccggcagcagcagcagcatcctgagcgccagcagcgagagcagcgagaaggccaagagcgaggacgagaagcacgtgaacagcatcagcggcaccaagcagagcaaggagaaccaggtgagcgccaagggcacctggagaaagatcaaggagaacgagttcagccccaccaacagcaccagccagaccgtgagcagcggcgccaccaacggcgccgagagcaagaccctgatctaccagatggcccccgccgtgagcaagaccgaggacgtgtgggtgagaatcgaggactgccccatcaacaaccccagaagcggcagaagccccaccggcaacaccccccccgtgatcgacagcgtgagcgagaaggccaaccccaacatcaaggacagcaaggacaaccaggccaagcagaacgtgggcaacggcagcgtgcccatgagaaccgtgggcctggagaacagactgaacagcttcatccaggtggacgcccccgaccagaagggcaccgagatcaagcccggccagaacaaccccgtgcccgtgagcgagaccaacgagagcagcatcgtggagagaacccccttcagcagcagcagcagcagcaagcacagcagccccagcggcaccgtggccgccagagtgacccccttcaactacaaccccagccccagaaagagcagcgccgacagcaccagcgccagacccagccagatccccacccccgtgaacaacaacaccaagaagagagacagcaagaccgacagcaccgagagcagcggcacccagagccccaagagacacagcggcagctacctggtgaccagcgtgtag

SEQ ID NO: 9279 - DNA, 8532 bp, synthetic construct; identical to SEQ ID NO: 9278
  misc_feature 1..8532: note = Description of Artificial Sequence: Synthetic coding sequence
  source 1..8532: mol_type = other DNA

SEQ ID NO: 9280 - DNA, 8532 bp, synthetic construct; identical to SEQ ID NO: 9278
  misc_feature 1..8532: note = Description of Artificial Sequence: Synthetic coding sequence
  source 1..8532: mol_type = other DNA

SEQ ID NO: 9281 - DNA, 864 bp, synthetic construct
  misc_feature 1..864: note = Description of Artificial Sequence: Synthetic coding sequence
  source 1..864: mol_type = other DNA
atggccgccgccagctacgaccagctgctgaagcaggtggaggccctgaagatggagaacagcaacctgagacaggagctggaggacaacagcaaccacctgaccaagctggagaccgaggccagcaacatgaaggaggtgctgaagcagctgcagggcagcatcgaggacgaggccatggccagcagcggccagatcgacctgctggagagactgaaggagctgaacctggacagcagcaacttccccggcgtgaagctgagaagcaagatgagcctgagaagctacggcagcagagagggcagcgtgagcagcagaagcggcgagtgcagccccgtgcccatgggcagcttccccagaagaggcttcgtgaacggcagcagagagagcaccggctacctggaggagctggagaaggagagaagcctgctgctggccgacctggacaaggaggagaaggagaaggactggtactacgcccagctgcagaacctgaccaagagaatcgacagcctgcccctgaccgagaacttcagcctgcagaccgacatgaccagaagacagctggagtacgaggccagacagatcagagtggccatggaggagcagctgggcacctgccaggacatggagaagagagcccagagaagaatcgccagaatccagcagatcgagaaggacatcctgagaatcagacagctgctgcagagccaggccaccgaggccgagagaagcagccagaacaagcacgagaccggcagccacgacgccgagagacagaacgagggccagggcgtgggcgagatcaacatggccaccagcggcaacggccagatcgagaagatgagaatgttcgagtgctag

SEQ ID NO: 9282 - DNA, 357 bp, synthetic construct
  misc_feature 1..357: note = Description of Artificial Sequence: Synthetic coding sequence
  source 1..357: mol_type = other DNA
atggccgccgccagctacgaccagctgctgaagcaggtggaggccctgaagatggagaacagcaacctgagacaggagctggaggacaacagcaaccacctgaccaagctggagaccgaggccagcaacatgaaggaggtgctgaagcagctgcagggcagcatcgaggacgaggccatggccagcagcggccagatcgacctgctggagagactgaaggagctgaacctggacagcagcaacttccccggcgtgaagctgagaagcaagatgagcctgagaagctacggcagcagagagggcagcgtgagcagcagaagcggcgagtgcagccccgtgcccatgggcagcttctag

SEQ ID NO: 9283 - DNA, 3918 bp, synthetic construct
  misc_feature 1..3918: note = Description of Artificial Sequence: Synthetic coding sequence
  source 1..3918: mol_type = other DNA
atggccgccgccagctacgaccagctgctgaagcaggtggaggccctgaagatggagaacagcaacctgagacaggagctggaggacaacagcaaccacctgaccaagctggagaccgaggccagcaacatgaaggaggtgctgaagcagctgcagggcagcatcgaggacgaggccatggccagcagcggccagatcgacctgctggagagactgaaggagctgaacctggacagcagcaacttccccggcgtgaagctgagaagcaagatgagcctgagaagctacggcagcagagagggcagcgtgagcagcagaagcggcgagtgcagccccgtgcccatgggcagcttccccagaagaggcttcgtgaacggcagcagagagagcaccggctacctggaggagctggagaaggagagaagcctgctgctggccgacctggacaaggaggagaaggagaaggactggtactacgcccagctgcagaacctgaccaagagaatcgacagcctgcccctgaccgagaacttcagcctgcagaccgacatgaccagaagacagctggagtacgaggccagacagatcagagtggccatggaggagcagctgggcacctgccaggacatggagaagagagcccagagaagaatcgccagaatccagcagatcgagaaggacatcctgagaatcagacagctgctgcagagccaggccaccgaggccgagagaagcagccagaacaagcacgagaccggcagccacgacgccgagagacagaacgagggccagggcgtgggcgagatcaacatggccaccagcggcaacggccagggcagcaccaccagaatggaccacgagaccgccagcgtgctgagcagcagcagcacccacagcgcccccagaagactgaccagccacctgggcaccaaggtggagatggtgtacagcctgctgagcatgctgggcacccacgacaaggacgacatgagcagaaccctgctggccatgagcagcagccaggacagctgcatcagcatgagacagagcggctgcctgcccctgctgatccagctgctgcacggcaacgacaaggacagcgtgctgctgggcaacagcagaggcagcaaggaggccagagccagagccagcgccgccctgcacaacatcatccacagccagcccgacgacaagagaggcagaagagagatcagagtgctgcacctgctggagcagatcagagcctactgcgagacctgctgggagtggcaggaggcccacgagcccggcatggaccaggacaagaaccccatgcccgcccccgtggagcaccagatctgccccgccgtgtgcgtgctgatgaagctgagcttcgacgaggagcacagacacgccatgaacgagctgggcggcctgcaggccatcgccgagctgctgcaggtggactgcgagatgtacggcctgaccaacgaccactacagcatcaccctgagaagatacgccggcatggccctgaccaacctgaccttcggcgacgtggccaacaaggccaccctgtgcagcatgaagggctgcatgagagccctggtggcccagctgaagagcgagagcgaggacctgcagcaggtgatcgccagcgtgctgagaaacctgagctggagagccgacgtgaacagcaagaagaccctgagagaggtgggcagcgtgaaggccctgatggagtgcgccctggaggtgaagaaggagagcaccctgaagagcgtgctgagcgccctgtggaacctgagcgcccactgcaccgagaacaaggccgacatctgcgccgtggacggcgccctggccttcctggtgggcaccctgacctacagaagccagaccaacaccctggccatcatcgagagcggcggcggcatcctgagaaacgtgagcagcctgatcgccaccaacgaggaccacagacagatcctgagagagaacaactgcctgcagaccctgctgcagcacctgaagagccacagcctgaccatcgtgagcaacgcctgcggcaccctgtggaacctgagcgccagaaaccccaaggaccaggaggccctgtgggacatgggcgccgtgagcatgctgaagaacctgatccacagcaagcacaagatgatcgccatgggcagcgccgccgccctgagaaacctgatggccaacagacccgccaagtacaaggacgccaacatcatgagccccggcagcagcctgcccagcctgcacgtgagaaagcagaaggccctggaggccgagctggacgcccagcacctgagcgagaccttcgacaacatcgacaacctgagccccaaggccagccacagaagcaagcagagacacaagcagagcctgtacggcgactacgtgttcgacaccaacagacacgacgacaacagaagcgacaacttcaacaccggcaacatgaccgtgctgagcccctacctgaacaccaccgtgctgcccagcagcagcagcagcagaggcagcctggacagcagcagaagcgagaaggacagaagcctggagagagagagaggcatcggcctgggcaactaccaccccgccaccgagaaccccggcaccagcagcaagagaggcctgcagatcagcaccaccgccgcccagatcgccaaggtgatggaggaggtgagcgccatccacaccagccaggaggacagaagcagcggcagcaccaccgagctgcactgcgtgaccgacgagagaaacgccctgagaagaagcagcgccgcccacacccacagcaacacctacaacttcaccaagagcgagaacagcaacagaacctgcagcatgccctacgccaagctggagtacaagagaagcagcaacgacagcctgaacagcgtgagcagcagcgacggctacggcaagagaggccagatgaagcccagcatcgagagctacagcgaggacgacgagagcaagttctgcagctacggccagtaccccgccgacctggcccacaagatccacagcgccaaccacatggacgacaacgacggcgagctggacacccccatcaactacagcctgaagtacagcgacgagcagctgaacagcggcagacagagccccagccagaacgagagatgggccagacccaagcacatcatcgaggacgagatcaagcagagcgagcagagacagagcagaaaccagagcaccacctaccccgtgtacaccgagagcaccgacgacaagcacctgaagttccagccccacttcggccagcaggagtgcgtgagcccctacagaagcagaggcgccaacggcagcgagaccaacagagtgggcagcaaccacggcatcaaccagaacgtgagccagagcctgtgccaggaggacgactacgaggacgacaagcccaccaactacagcgagagatacagcgaggaggagcagcacgaggaggaggagagacccaccaactacagcatcaagtacaacgaggagaagagacacgtggaccagcccatcgactacagcctgaagtacgccaccgacatccccagcagccagaagcagagcttcagcttcagcaagagcagcagcggccagagcagcaagaccgagcacatgagcagcagcagcgagaacaccagcacccccagcagcaacgccaagagacagaaccagctgcaccccagcagcgcccagagcagaagcggccagccccagaaggccgccacctgcaaggtgagcagcatcaaccaggagaccatccagacctactgcgtggaggacacccccatctgcttcagcagatgcagcagcctgagcagcctgagcagcgccgaggacgagatcggctgcaaccagaccacccaggaggccgacagcgccaacaccctgcagatcgcctag

SEQ ID NO: 9284 - DNA, 2796 bp, synthetic construct
  misc_feature 1..2796: note = Description of Artificial Sequence: Synthetic coding sequence
  source 1..2796: mol_type = other DNA
atggccgagatcaaggagaagatctgcgactacctgttcaacgtgagcgacagcagcgccctgaacctggccaagaacatcggcctgaccaaggccagagacatcaacgccgtgctgatcgacatggagagacagggcgacgtgtacagacagggcaccaccccccccatctggcacctgaccgacaagaagagagagagaatgcagatcaagagaaacaccaacagcgtgcccgagaccgcccccgccgccatccccgagaccaagagaaacgccgagttcctgacctgcaacatccccaccagcaacgccagcaacaacatggtgaccaccgagaaggtggagaacggccaggagcccgtgatcaagctggagaacagacaggaggccagacccgagcccgccagactgaagccccccgtgcactacaacggccccagcaaggccggctacgtggacttcgagaacggccagtgggccaccgacgacatccccgacgacctgaacagcatcagagccgcccccggcgagttcagagccatcatggagatgcccagcttctacagccacggcctgcccagatgcagcccctacaagaagctgaccgagtgccagctgaagaaccccatcagcggcctgctggagtacgcccagttcgccagccagacctgcgagttcaacatgatcgagcagagcggccccccccacgagcccagattcaagttccaggtggtgatcaacggcagagagttcccccccgccgaggccggcagcaagaaggtggccaagcaggacgccgccatgaaggccatgaccatcctgctggaggaggccaaggccaaggacagcggcaagagcgaggagagcagccactacagcaccgagaaggagagcgagaagaccgccgagagccagacccccacccccagcgccaccagcttcttcagcggcaagagccccgtgaccaccctgctggagtgcatgcacaagctgggcaacagctgcgagttcagactgctgagcaaggagggccccgcccacgagcccaagttccagtactgcgtggccgtgggcgcccagaccttccccagcgtgagcgcccccagcaagaaggtggccaagcagatggccgccgaggaggccatgaaggccctgcacggcgaggccaccaacagcatggccagcgacaaccagcccgagggcatgatcagcgagagcctggacaacctggagagcatgatgcccaacaaggtgagaaagatcggcgagctggtgagatacctgaacaccaaccccgtgggcggcctgctggagtacgccagaagccacggcttcgccgccgagttcaagctggtggaccagagcggccccccccacgagcccaagttcgtgtaccaggccaaggtgggcggcagatggttccccgccgtgtgcgcccacagcaagaagcagggcaagcaggaggccgccgacgccgccctgagagtgctgatcggcgagaacgagaaggccgagagaatgggcttcaccgaggtgacccccgtgaccggcgccagcctgagaagaaccatgctgctgctgagcagaagccccgaggcccagcccaagaccctgcccctgaccggcagcaccttccacgaccagatcgccatgctgagccacagatgcttcaacaccctgaccaacagcttccagcccagcctgctgggcagaaagatcctggccgccatcatcatgaagaaggacagcgaggacatgggcgtggtggtgagcctgggcaccggcaacagatgcgtgaagggcgacagcctgagcctgaagggcgagaccgtgaacgactgccacgccgagatcatcagcagaagaggcttcatcagattcctgtacagcgagctgatgaagtacaacagccagaccgccaaggacagcatcttcgagcccgccaagggcggcgagaagctgcagatcaagaagaccgtgagcttccacctgtacatcagcaccgccccctgcggcgacggcgccctgttcgacaagagctgcagcgacagagccatggagagcaccgagagcagacactaccccgtgttcgagaaccccaagcagggcaagctgagaaccaaggtggagaacggcgagggcaccatccccgtggagagcagcgacatcgtgcccacctgggacggcatcagactgggcgagagactgagaaccatgagctgcagcgacaagatcctgagatggaacgtgctgggcctgcagggcgccctgctgacccacttcctgcagcccatctacctgaagagcgtgaccctgggctacctgttcagccagggccacctgaccagagccatctgctgcagagtgaccagagacggcagcgccttcgaggacggcctgagacaccccttcatcgtgaaccaccccaaggtgggcagagtgagcatctacgacagcaagagacagagcggcaagaccaaggagaccagcgtgaactggtgcctggccgacggctacgacctggagatcctggacggcaccagaggcaccgtggacggccccagaaacgagctgagcagagtgagcaagaagaacatcttcctgctgttcaagaagctgtgcagcttcagatacagaagagacctgctgagactgagctacggcgaggccaagaaggccgccagagactacgagaccgccaagaactacttcaagaagggcctgaaggacatgggctacggcaactggatcagcaagccccaggaggagaagaacttctacctgtgccccgtgtag

SEQ ID NO: 9285 - DNA, 3681 bp, synthetic construct
  misc_feature 1..3681: note = Description of Artificial Sequence: Synthetic coding sequence
  source 1..3681: mol_type = other DNA
atgaaccccagacagggctacagcctgagcggctactacacccaccccttccagggctacgagcacagacagctgagataccagcagcccggccccggcagcagccccagcagcttcctgctgaagcagatcgagttcctgaagggccagctgcccgaggcccccgtgatcggcaagcagacccccagcctgccccccagcctgcccggcctgagacccagattccccgtgctgctggccagcagcaccagaggcagacaggtggacatcagaggcgtgcccagaggcgtgcacctgagaagccagggcctgcagagaggcttccagcaccccagccccagaggcagaagcctgccccagagaggcgtggactgcctgagcagccacttccaggagctgagcatctaccaggaccaggagcagagaatcctgaagttcctggaggagctgggcgagggcaaggccaccaccgcccacgacctgagcggcaagctgggcacccccaagaaggagatcaacagagtgctgtacagcctggccaagaagggcaagctgcagaaggaggccggcaccccccccctgtggaagatcgccgtgagcacccaggcctggaaccagcacagcggcgtggtgagacccgacggccacagccagggcgcccccaacagcgaccccagcctggagcccgaggacagaaacagcaccagcgtgagcgaggacctgctggagcccttcatcgccgtgagcgcccaggcctggaaccagcacagcggcgtggtgagacccgacagccacagccagggcagccccaacagcgaccccggcctggagcccgaggacagcaacagcaccagcgccctggaggaccccctggagttcctggacatggccgagatcaaggagaagatctgcgactacctgttcaacgtgagcgacagcagcgccctgaacctggccaagaacatcggcctgaccaaggccagagacatcaacgccgtgctgatcgacatggagagacagggcgacgtgtacagacagggcaccaccccccccatctggcacctgaccgacaagaagagagagagaatgcagatcaagagaaacaccaacagcgtgcccgagaccgcccccgccgccatccccgagaccaagagaaacgccgagttcctgacctgcaacatccccaccagcaacgccagcaacaacatggtgaccaccgagaaggtggagaacggccaggagcccgtgatcaagctggagaacagacaggaggccagacccgagcccgccagactgaagccccccgtgcactacaacggccccagcaaggccggctacgtggacttcgagaacggccagtgggccaccgacgacatccccgacgacctgaacagcatcagagccgcccccggcgagttcagagccatcatggagatgcccagcttctacagccacggcctgcccagatgcagcccctacaagaagctgaccgagtgccagctgaagaaccccatcagcggcctgctggagtacgcccagttcgccagccagacctgcgagttcaacatgatcgagcagagcggccccccccacgagcccagattcaagttccaggtggtgatcaacggcagagagttcccccccgccgaggccggcagcaagaaggtggccaagcaggacgccgccatgaaggccatgaccatcctgctggaggaggccaaggccaaggacagcggcaagagcgaggagagcagccactacagcaccgagaaggagagcgagaagaccgccgagagccagacccccacccccagcgccaccagcttcttcagcggcaagagccccgtgaccaccctgctggagtgcatgcacaagctgggcaacagctgcgagttcagactgctgagcaaggagggccccgcccacgagcccaagttccagtactgcgtggccgtgggcgcccagaccttccccagcgtgagcgcccccagcaagaaggtggccaagcagatggccgccgaggaggccatgaaggccctgcacggcgaggccaccaacagcatggccagcgacaaccagcccgagggcatgatcagcgagagcctggacaacctggagagcatgatgcccaacaaggtgagaaagatcggcgagctggtgagatacctgaacaccaaccccgtgggcggcctgctggagtacgccagaagccacggcttcgccgccgagttcaagctggtggaccagagcggccccccccacgagcccaagttcgtgtaccaggccaaggtgggcggcagatggttccccgccgtgtgcgcccacagcaagaagcagggcaagcaggaggccgccgacgccgccctgagagtgctgatcggcgagaacgagaaggccgagagaatgggcttcaccgaggtgacccccgtgaccggcgccagcctgagaagaaccatgctgctgctgagcagaagccccgaggcccagcccaagaccctgcccctgaccggcagcaccttccacgaccagatcgccatgctgagccacagatgcttcaacaccctgaccaacagcttccagcccagcctgctgggcagaaagatcctggccgccatcatcatgaagaaggacagcgaggacatgggcgtggtggtgagcctgggcaccggcaacagatgcgtgaagggcgacagcctgagcctgaagggcgagaccgtgaacgactgccacgccgagatcatcagcagaagaggcttcatcagattcctgtacagcgagctgatgaagtacaacagccagaccgccaaggacagcatcttcgagcccgccaagggcggcgagaagctgcagatcaagaagaccgtgagcttccacctgtacatcagcaccgccccctgcggcgacggcgccctgttcgacaagagctgcagcgacagagccatggagagcaccgagagcagacactaccccgtgttcgagaaccccaagcagggcaagctgagaaccaaggtggagaacggcgagggcaccatccccgtggagagcagcgacatcgtgcccacctgggacggcatcagactgggcgagagactgagaaccatgagctgcagcgacaagatcctgagatggaacgtgctgggcctgcagggcgccctgctgacccacttcctgcagcccatctacctgaagagcgtgaccctgggctacctgttcagccagggccacctgaccagagccatctgctgcagagtgaccagagacggcagcgccttcgaggacggcctgagacaccccttcatcgtgaaccaccccaaggtgggcagagtgagcatctacgacagcaagagacagagcggcaagaccaaggagaccagcgtgaactggtgcctggccgacggctacgacctggagatcctggacggcaccagaggcaccgtggacggccccagaaacgagctgagcagagtgagcaagaagaacatcttcctgctgttcaagaagctgtgcagcttcagatacagaagagacctgctgagactgagctacggcgaggccaagaaggccgccagagactacgagaccgccaagaactacttcaagaagggcctgaaggacatgggctacggcaactggatcagcaagccccaggaggagaagaacttctacctgtgccccgtgtag

SEQ ID NO: 9286 - DNA, 3588 bp, synthetic construct
  misc_feature 1..3588: note = Description of Artificial Sequence: Synthetic coding sequence
  source 1..3588: mol_type = other DNA
ggctacagcctgagcggctactacacccaccccttccagggctacgagcacagacagctgagataccagcagcccggccccggcagcagccccagcagcttcctgctgaagcagatcgagttcctgaagggccagctgcccgaggcccccgtgatcggcaagcagacccccagcctgccccccagcctgcccggcctgagacccagattccccgtgctgctggccagcagcaccagaggcagacaggtggacatcagaggcgtgcccagaggcgtgcacctgagaagccagggcctgcagagaggcttccagcaccccagccccagaggcagaagcctgccccagagaggcgtggactgcctgagcagccacttccaggagctgagcatctaccaggaccaggagcagagaatcctgaagttcctggaggagctgggcgagggcaaggccaccaccgcccacgacctgagcggcaagctgggcacccccaagaaggagatcaacagagtgctgtacagcctggccaagaagggcaagctgcagaaggaggccggcaccccccccctgtggaagatcgccgtgagcacccaggcctggaaccagcacagcggcgtggtgagacccgacggccacagccagggcgcccccaacagcgaccccagcctggagcccgaggacagaaacagcaccagcgtgagcgaggacctgctggagcccttcatcgccgtgagcgcccaggcctggaaccagcacagcggcgtggtgagacccgacagccacagccagggcagccccaacagcgaccccggcctggagcccgaggacagcaacagcaccagcgccctggaggaccccctggagttcctggacatggccgagatcaaggagaagatctgcgactacctgttcaacgtgagcgacagcagcgccctgaacctggccaagaacatcggcctgaccaaggccagagacatcaacgccgtgctgatcgacatggagagacagggcgacgtgtacagacagggcaccaccccccccatctggcacctgaccgacaagaagagagagagaatgcagatcaagagaaacaccaacagcgtgcccgagaccgcccccgccgccatccccgagaccaagagaaacgccgagttcctgacctgcaacatccccaccagcaacgccagcaacaacatggtgaccaccgagaaggtggagaacggccaggagcccgtgatcaagctggagaacagacaggaggccagacccgagcccgccagactgaagccccccgtgcactacaacggccccagcaaggccggctacgtggacttcgagaacggccagtgggccaccgacgacatccccgacgacctgaacagcatcagagccgcccccggcgagttcagagccatcatggagatgcccagcttctacagccacggcctgcccagatgcagcccctacaagaagctgaccgagtgccagctgaagaaccccatcagcggcctgctggagtacgcccagttcgccagccagacctgcgagttcaacatgatcgagcagagcggccccccccacgagcccagattcaagttccaggtggtgatcaacggcagagagttcccccccgccgaggccggcagcaagaaggtggccaagcaggacgccgccatgaaggccatgaccatcctgctggaggaggccaaggccaaggacagcggcaagagcgaggagagcagccactacagcaccgagaaggagagcgagaagaccgccgagagccagacccccacccccagcgccaccagcttcttcagcggcaagagccccgtgaccaccctgctggagtgcatgcacaagctgggcaacagctgcgagttcagactgctgagcaaggagggccccgcccacgagcccaagttccagtactgcgtggccgtgggcgcccagaccttccccagcgtgagcgcccccagcaagaaggtggccaagcagatggccgccgaggaggccatgaaggccctgcacggcgaggccaccaacagcatggccagcgacaaccagcccgagggcatgatcagcgagagcctggacaacctggagagcatgatgcccaacaaggtgagaaagatcggcgagctggtgagatacctgaacaccaaccccgtgggcggcctgctggagtacgccagaagccacggcttcgccgccgagttcaagctggtggaccagagcggccccccccacgagcccaagttcgtgtaccaggccaaggtgggcggcagatggttccccgccgtgtgcgcccacagcaagaagcagggcaagcaggaggccgccgacgccgccctgagagtgctgatcggcgagaacgagaaggccgagagaatgggcttcaccgagctgcccctgaccggcagcaccttccacgaccagatcgccatgctgagccacagatgcttcaacaccctgaccaacagcttccagcccagcctgctgggcagaaagatcctggccgccatcatcatgaagaaggacagcgaggacatgggcgtggtggtgagcctgggcaccggcaacagatgcgtgaagggcgacagcctgagcctgaagggcgagaccgtgaacgactgccacgccgagatcatcagcagaagaggcttcatcagattcctgtacagcgagctgatgaagtacaacagccagaccgccaaggacagcatcttcgagcccgccaagggcggcgagaagctgcagatcaagaagaccgtgagcttccacctgtacatcagcaccgccccctgcggcgacggcgccctgttcgacaagagctgcagcgacagagccatggagagcaccgagagcagacactaccccgtgttcgagaaccccaagcagggcaagctgagaaccaaggtggagaacggcgagggcaccatccccgtggagagcagcgacatcgtgcccacctgggacggcatcagactgggcgagagactgagaaccatgagctgcagcgacaagatcctgagatggaacgtgctgggcctgcagggcgccctgctgacccacttcctgcagcccatctacctgaagagcgtgaccctgggctacctgttcagccagggccacctgaccagagccatctgctgcagagtgaccagagacggcagcgccttcgaggacggcctgagacaccccttcatcgtgaaccaccccaaggtgggcagagtgagcatctacgacagcaagagacagagcggcaagaccaaggagaccagcgtgaactggtgcctggccgacggctacgacctggagatcctggacggcaccagaggcaccgtggacggccccagaaacgagctgagcagagtgagcaagaagaacatcttcctgctgttcaagaagctgtgcagcttcagatacagaagagacctgctgagactgagctacggcgaggccaagaaggccgccagagactacgagaccgccaagaactacttcaagaagggcctgaaggacatgggctacggcaactggatcagcaagccccaggaggagaagaacttctacctgtgccccgtgtag

SEQ ID NO: 9287 - DNA, 528 bp, synthetic construct
  misc_feature 1..528: note = Description of Artificial Sequence: Synthetic coding sequence
  source 1..528: mol_type = other DNA
atgggcaaggtgctgagcaagatcttcggcaacaaggagatgagaatcctgatgctgggcctggacgccgccggcaagaccaccatcctgtacaagctgaagctgggccagagcgtgaccaccatccccaccgtgggcttcaacgtggagaccgtgacctacaagaacgtgaagttcaacgtgtgggacgtgggcggccaggacaagatcagacccctgtggagacactactacaccggcacccagggcctgatcttcgtggtggactgcgccgacagagacagaatcgacgaggccagacaggagctgcacagaatcatcaacgacagagagatgagagacgccatcatcctgatcttcgccaacaagcaggacctgcccgacgccatgaagccccacgagatccaggagaagctgggcctgaccagaatcagagacagaaactggtacgtgcagcccagctgcgccaccagcggcgacggcctgtacgagggcctgacctggctgaccagcaactacaagagctag

SEQ ID NO: 9288 - DNA, 1398 bp, synthetic construct
  misc_feature 1..1398: note = Description of Artificial Sequence: Synthetic coding sequence
  source 1..1398: mol_type = other DNA
atgttcagacaggagcagcccctggccgagggcagcttcgcccccatgggcagcctgcagcccgacgccggcaacgccagctggaacggcaccgaggcccccggcggcggcgccagagccaccccctacagcctgcaggtgaccctgaccctggtgtgcctggccggcctgctgatgctgctgaccgtgttcggcaacgtgctggtgatcatcgccgtgttcaccagcagagccctgaaggccccccagaacctgttcctggtgagcctggccagcgccgacatcctggtggccaccctggtgatccccttcagcctggccaacgaggtgatgggctactggtacttcggcaaggcctggtgcgagatctacctggccctggacgtgctgttctgcaccagcagcatcgtgcacctgtgcgccatcagcctggacagatactggagcatcacccaggccatcgagtacaacctgaagagaacccccagaagaatcaaggccatcatcatcaccgtgtgggtgatcagcgccgtgatcagcttcccccccctgatcagcatcgagaagaagggcggcggcggcggcccccagcccgccgagcccagatgcgagatcaacgaccagaagtggtacgtgatcagcagctgcatcggcagcttcttcgccccctgcctgatcatgatcctggtgtacgtgagaatctaccagatcgccaagagaagaaccagagtgccccccagcagaagaggccccgacgccgtggccgccccccccggcggcaccgagagaagacccaacggcctgggccccgagagaagcgccggccccggcggcgccgaggccgagcccctgcccacccagctgaacggcgcccccggcgagcccgcccccgccggccccagagacaccgacgccctggacctggaggagagcagcagcagcgaccacgccgagagaccccccggccccagaagacccgagagaggccccagaggcaagggcaaggccagagccagccaggtgaagcccggcgacagcctgcccagaagaggccccggcgccaccggcatcggcacccccgccgccggccccggcgaggagagagtgggcgccgccaaggccagcagatggagaggcagacagaacagagagaagagattcaccttcgtgctggccgtggtgatcggcgtgttcgtggtgtgctggttccccttcttcttcacctacaccctgaccgccgtgggctgcagcgtgcccagaaccctgttcaagttcttcttctggttcggctactgcaacagcagcctgaaccccgtgatctacaccatcttcaaccacgacttcagaagagccttcaagaagatcctgtgcagaggcgacagaaagagaatcgtgtag

SEQ ID NO: 9289 - DNA, 285 bp, synthetic construct
  misc_feature 1..285: note = Description of Artificial Sequence: Synthetic coding sequence
  source 1..285: mol_type = other DNA
atggcccccctgaagatgctggccctggtgaccctgctgctgggcgccagcctgcagcacatccacgccgccagaggcaccaacgtgggcagagagtgctgcctggagtacttcaagggcgccatccccctgagaaagctgaagacctggtaccagaccagcgaggactgcagcagagacgccatcgtgttcgtgaccgtgcagggcagagccatctgcagcgaccccaacaacaagagagtgaagaacgccgtgaagtacctgcagagcctggagagaagctag

SEQ ID NO: 9290 - DNA, 1635 bp, synthetic construct
  misc_feature 1..1635: note = Description of Artificial Sequence: Synthetic coding sequence
  source 1..1635: mol_type = other DNA
atgcccggcagatgccagagcgacgccgccatgagagtgaacggccccgccagcagagcccccgccggctggaccagcggcagcctgcacaccggccccagagccggcagacccagagcccaggccagaggcgtgagaggcagaggcctgctgctgagacccagacccgccaaggagctgcccctgcccagaaagggcggcgcctgggcccccgccggcaaccccggccccctgcaccccctgggcgtggccgtgggcatggccggcagcggcagactggtgctgagaccctggatcagagagctgatcctgggcagcgagacccccagcagccccagagccggccagctgctggaggtgctgcaggacgccgaggccgccgtggccggccccagccacgcccccgacaccagcgacgtgggcgccaccctgctggtgagcgacggcacccacagcgtgagatgcctggtgaccagagaggccctggacaccagcgactgggaggagaaggagttcggcttcagaggcaccgagggcagactgctgctgctgcaggactgcggcgtgcacgtgcaggtggccgagggcggcgcccccgccgagttctacctgcaggtggacagattcagcctgctgcccaccgagcagcccagactgagagtgcccggctgcaaccaggacctggacgtgcagaagaagctgtacgactgcctggaggagcacctgagcgagagcaccagcagcaacgccggcctgagcctgagccagctgctggacgagatgagagaggaccaggagcaccagggcgccctggtgtgcctggccgagagctgcctgaccctggagggcccctgcaccgccccccccgtgacccactgggccgccagcagatgcaaggccaccggcgaggccgtgtacaccgtgcccagcagcatgctgtgcatcagcgagaacgaccagctgatcctgagcagcctgggcccctgccagagaacccagggccccgagctgcccccccccgaccccgccctgcaggacctgagcctgaccctgatcgccagcccccccagcagccccagcagcagcggcacccccgccctgcccggccacatgagcagcgaggagagcggcaccagcatcagcctgctgcccgccctgagcctggccgcccccgaccccggccagagaagcagcagccagcccagccccgccatctgcagcgcccccgccaccctgacccccagaagcccccacgccagcagaacccccagcagccccctgcagagctgcacccccagcctgagccccagaagccacgtgcccagcccccaccaggccctggtgaccagaccccagaagcccagcctggagttcaaggagttcgtgggcctgccctgcaagaacagaccccccttccccagaaccggcgccaccagaggcgcccaggagccctgcagcgtgtgggagccccccaagagacacagagacggcagcgccttccagtacgagtacgagcccccctgcaccagcctgtgcgccagagtgcaggccgtgagactgcccccccagctgatggcctgggccctgcacttcctgatggacgcccagcccggcagcgagcccacccccatgtag

SEQ ID NO: 9291 - DNA, 558 bp, synthetic construct
  misc_feature 1..558: note = Description of Artificial Sequence: Synthetic coding sequence
  source 1..558: mol_type = other DNA
atgaagctggtgagcgtggccctgatgtacctgggcagcctggccttcctgggcgccgacaccgccagactggacgtggccagcgagttcagaaagaagtggaacaagtgggccctgagcagaggcaagagagagctgagaatgagcagcagctaccccaccggcctggccgacgtgaaggccggccccgcccagaccctgatcagaccccaggacatgaagggcgccagcagaagccccgaggacagcagccccgacgccgccagaatcagagtgaagagatacagacagagcatgaacaacttccagggcctgagaagcttcggctgcagattcggcacctgcaccgtgcagaagctggcccaccagatctaccagttcaccgacaaggacaaggacaacgtggcccccagaagcaagatcagcccccagggctacggcagaagaagaagaagaagcctgcccgaggccggccccggcagaaccctggtgagcagcaagccccaggcccacggcgcccccgccccccccagcggcagcgccccccacttcctgtag

SEQ ID NO: 9292 - DNA, 558 bp, synthetic construct; identical to SEQ ID NO: 9291
  misc_feature 1..558: note = Description of Artificial Sequence: Synthetic coding sequence
  source 1..558: mol_type = other DNA

SEQ ID NO: 9293 - DNA, 558 bp, synthetic construct; identical to SEQ ID NO: 9291
  misc_feature 1..558: note = Description of Artificial Sequence: Synthetic coding sequence
  source 1..558: mol_type = other DNA

SEQ ID NO: 9294 - DNA, 702 bp, synthetic construct
  misc_feature 1..702: note = Description of Artificial Sequence: Synthetic coding sequence
  source 1..702: mol_type = other DNA
atggccgccggcaccgccgtgggcgcctgggtgctggtgctgagcctgtggggcgccgtggtgggcgcccagaacatcaccgccagaatcggcgagcccctggtgctgaagtgcaagggcgcccccaagaagcccccccagagactggagtggaagctgaacaccggcagaaccgaggcctggaaggtgctgagcccccagggcggcggcccctgggacagcgtggccagagtgctgcccaacagcagcctgttcctgcccgccgtgggcatccaggacgagggcatcttcagatgccaggccatgaacagaaacggcaaggagaccaagagcaactacagagtgagagtgtaccagatccccggcaagcccgagatcgtggacagcgccagcgagctgaccgccggcgtgcccaacaaggtggtggaggagagcagaagaagcagaaagagaccctgcgagcaggaggtgggcacctgcgtgagcgagggcagctaccccgccggcaccctgagctggcacctggacggcaagcccctggtgcccaacgagaagggcgtgagcgtgaaggagcagaccagaagacaccccgagaccggcctgttcaccctgcagagcgagctgatggtgacccccgccagaggcggcgaccccagacccaccttcagctgcagcttcagccccggcctgcccagacactag

SEQ ID NO: 9295 - DNA, 1029 bp, synthetic construct
  misc_feature 1..1029: note = Description of Artificial Sequence: Synthetic coding sequence
  source 1..1029: mol_type = other DNA
atggccgccggcaccgccgtgggcgcctgggtgctggtgctgagcctgtggggcgccgtggtgggcgcccagaacatcaccgccagaatcggcgagcccctggtgctgaagtgcaagggcgcccccaagaagcccccccagagactggagtggaagctgggcggcggcccctgggacagcgtggccagagtgctgcccaacagcagcctgttcctgcccgccgtgggcatccaggacgagggcatcttcagatgccaggccatgaacagaaacggcaaggagaccaagagcaactacagagtgagagtgtaccagatccccggcaagcccgagatcgtggacagcgccagcgagctgaccgccggcgtgcccaacaaggtgggcacctgcgtgagcgagggcagctaccccgccggcaccctgagctggcacctggacggcaagcccctggtgcccaacgagaagggcgtgagcgtgaaggagcagaccagaagacaccccgagaccggcctgttcaccctgcagagcgagctgatggtgacccccgccagaggcggcgaccccagacccaccttcagctgcagcttcagccccggcctgcccagacacagagccctgagaaccgcccccatccagcccagagtgtgggagcccgtgcccctggaggaggtgcagctggtggtggagcccgagggcggcgccgtggcccccggcggcaccgtgaccctgacctgcgaggtgcccgcccagcccagcccccagatccactggatgaaggacgtgagcgacctggagagaggcgccggcagaaccagaagaggcggcgccaactgcagactgtgcggcagaatcagagccggcaacagcagccccggccccggcgaccccggcagacccggcgacagcagacccgcccactggggccacctggtggccaaggccgccacccccagaagaggcgaggagggccccagaaagcccggcggcagaggcggcgcctgcagaaccgagagcgtgggcggcacctag

SEQ ID NO: 9296 - DNA, 1044 bp, synthetic construct
  misc_feature 1..1044: note = Description of Artificial Sequence: Synthetic coding sequence
  source 1..1044: mol_type = other DNA
atggccgccggcaccgccgtgggcgcctgggtgctggtgctgagcctgtggggcgccgtggtgggcgcccagaacatcaccgccagaatcggcgagcccctggtgctgaagtgcaagggcgcccccaagaagcccccccagagactggagtggaagctgaacaccggcagaaccgaggcctggaaggtgctgagcccccagggcggcggcccctgggacagcgtggccagagtgctgcccaacagcagcctgttcctgcccgccgtgggcatccaggacgagggcatcttcagatgccaggccatgaacagaaacggcaaggagaccaagagcaactacagagtgagagtgtaccagatccccggcaagcccgagatcgtggacagcgccagcgagctgaccgccggcgtgcccaacaaggtgggcacctgcgtgagcgagggcagctaccccgccggcaccctgagctggcacctggacggcaagcccctggtgcccaacgagaagggcgtgagcgtgaaggagcagaccagaagacaccccgagaccggcctgttcaccctgcagagcgagctgatggtgacccccgccagaggcggcgaccccagacccaccttcagctgcagcttcagccccggcctgcccagacacagagccctgagaaccgcccccatccagcccagagtgtgggagcccgtgcccctggaggaggtgcagctggtggtggagcccgagggcggcgccgtggcccccggcggcaccgtgaccctgacctgcgaggtgcccgcccagcccagcccccagatccactggatgaaggacggcgtgcccctgcccctgccccccagccccgtgctgatcctgcccgagatcggcccccaggaccagggcacctacagctgcgtggccacccacagcagccacggcccccaggagagcagagccgtgagcatcagcatcatcgagcccggcgaggagggccccaccgccggcgagggcttcgacaaggtgagagaggccgaggacagcccccagcacatgtag

SEQ ID NO: 9297 - DNA, 1215 bp, synthetic construct
  misc_feature 1..1215: note = Description of Artificial Sequence: Synthetic coding sequence
  source 1..1215: mol_type = other DNA
atggccgccggcaccgccgtgggcgcctgggtgctggtgctgagcctgtggggcgccgtggtgggcgcccagaacatcaccgccagaatcggcgagcccctggtgctgaagtgcaagggcgcccccaagaagcccccccagagactggagtggaagctgaacaccggcagaaccgaggcctggaaggtgctgagcccccagggcggcggcccctgggacagcgtggccagagtgctgcccaacagcagcctgttcctgcccgccgtgggcatccaggacgagggcatcttcagatgccaggccatgaacagaaacggcaaggagaccaagagcaactacagagtgagagtgtaccagatccccggcaagcccgagatcgtggacagcgccagcgagctgaccgccggcgtgcccaacaaggtgggcacctgcgtgagcgagggcagctaccccgccggcaccctgagctggcacctggacggcaagcccctggtgcccaacgagaagggcgtgagcgtgaaggagcagaccagaagacaccccgagaccggcctgttcaccctgcagagcgagctgatggtgacccccgccagaggcggcgaccccagacccaccttcagctgcagcttcagccccggcctgcccagacacagagccctgagaaccgcccccatccagcccagagtgtgggagcccgtgcccctggaggaggtgcagctggtggtggagcccgagggcggcgccgtggcccccggcggcaccgtgaccctgacctgcgaggtgcccgcccagcccagcccccagatccactggatgaaggacggcgtgcccctgcccctgccccccagccccgtgctgatcctgcccgagatcggcccccaggaccagggcacctacagctgcgtggccacccacagcagccacggcccccaggagagcagagccgtgagcatcagcatcatcgagcccggcgaggagggccccaccgccggcagcgtgggcggcagcggcctgggcaccctggccctggccctgggcatcctgggcggcctgggcaccgccgccctgctgatcggcgtgatcctgtggcagagaagacagagaagaggcgaggagagaaaggcccccgagaaccaggaggaggaggaggagagagccgagctgaaccagagcgaggagcccgaggccggcgagagcagcaccggcggcccctag

SEQ ID NO: 9298 - DNA, 705 bp, synthetic construct
  misc_feature 1..705: note = Description of Artificial Sequence: Synthetic coding sequence
  source 1..705: mol_type = other DNA
atggccgccggcaccgccgtgggcgcctgggtgctggtgctgagcctgtggggcgccgtggtgggcgcccagaacatcaccgccagaatcggcgagcccctggtgctgaagtgcaagggcgcccccaagaagcccccccagagactggagtggaagctgaacaccggcagaaccgaggcctggaaggtgctgagcccccagggcggcggcccctgggacagcgtggccagagtgctgcccaacagcagcctgttcctgcccgccgtgggcatccaggacgagggcatcttcagatgccaggccatgaacagaaacggcaaggagaccaagagcaactacagaagcctgagaaccttcaccatcaccgccagcgactggatcttcccccccagcgagatccccggcaagcccgagatcgtggacagcgccagcgagctgaccgccggcgtgcccaacaaggtgggcacctgcgtgagcgagggcagctaccccgccggcaccctgagctggcacctggacggcaagcccctggtgcccaacgagaagggcgtgagcgtgaaggagcagaccagaagacaccccgagaccggcctgttcaccctgcagagcgagctgatggtgacccccgccagaggcggcgaccccagacccaccttcagctgcagcttcagccccggcctgcccagacacagagccctgagatag

SEQ ID NO: 9299 - DNA, 402 bp, synthetic construct
  misc_feature 1..402: note = Description of Artificial Sequence: Synthetic coding sequence
  source 1..402: mol_type = other DNA
atgaaggacggcgtgcccctgcccctgccccccagccccgtgctgatcctgcccgagatcggcccccaggaccagggcacctacagctgcgtggccacccacagcagccacggcccccaggagagcagagccgtgagcatcagcatcatcgagcccggcgaggagggccccaccgccggcagcgtgggcggcagcggcctgggcaccctggccctggccctgggcatcctgggcggcctgggcaccgccgccctgctgatcggcgtgatcctgtggcagagaagacagagaagaggcgaggagagaaaggcccccgagaaccaggaggaggaggaggagagagccgagctgaaccagagcgaggagcccgaggccggcgagagcagcaccggcggcccctag

SEQ ID NO: 9300 - DNA, 1308 bp, synthetic construct
  misc_feature 1..1308: note = Description of Artificial Sequence: Synthetic coding sequence
  source 1..1308: mol_type = other DNA
atgggcgccggcgagagagtgcaggccccccccagagccgaggccaccgccggcagaggcgccgacagagccagaaccctggagggcagcagaatggccgccggcaccgccgtgggcgcctgggtgctggtgctgagcctgtggggcgccgtggtgggcgcccagaacatcaccgccagaatcggcgagcccctggtgctgaagtgcaagggcgcccccaagaagcccccccagagactggagtggaagctgaacaccggcagaaccgaggcctggaaggtgctgagcccccagggcggcggcccctgggacagcgtggccagagtgctgcccaacagcagcctgttcctgcccgccgtgggcatccaggacgagggcatcttcagatgccaggccatgaacagaaacggcaaggagaccaagagcaactacagagtgagagtgtaccagatccccggcaagcccgagatcgtggacagcgccagcgagctgaccgccggcgtgcccaacaaggtgggcacctgcgtgagcgagggcagctaccccgccggcaccctgagctggcacctggacggcaagcccctggtgcccaacgagaagggcgtgagcgtgaaggagcagaccagaagacaccccgagaccggcctgttcaccctgcagagcgagctgatggtgacccccgccagaggcggcgaccccagacccaccttcagctgcagcttcagccccggcctgcccagacacagagccctgagaaccgcccccatccagcccagagtgtgggagcccgtgcccctggaggaggtgcagctggtggtggagcccgagggcggcgccgtggcccccggcggcaccgtgaccctgacctgcgaggtgcccgcccagcccagcccccagatccactggatgaaggacggcgtgcccctgcccctgccccccagccccgtgctgatcctgcccgagatcggcccccaggaccagggcacctacagctgcgtggccacccacagcagccacggcccccaggagagcagagccgtgagcatcagcatcatcgagcccggcgaggagggccccaccgccggcagcgtgggcggcagcggcctgggcaccctggccctggccctgggcatcctgggcggcctgggcaccgccgccctgctgatcggcgtgatcctgtggcagagaagacagagaagaggcgaggagagaaaggcccccgagaaccaggaggaggaggaggagagagccgagctgaaccagagcgaggagcccgaggccggcgagagcagcaccggcggcccctag

SEQ ID NO: 9301 - DNA, 387 bp, synthetic construct
  misc_feature 1..387: note = Description of Artificial Sequence: Synthetic coding sequence
  source 1..387: mol_type = other DNA
atggccgccggcaccgccgtgggcgcctgggtgctggtgctgagcctgtggggcgccgtggtgggcgcccagaacatcaccgccagaatcggcgagcccctggtgctgaagtgcaagggcgcccccaagaagcccccccagagactggagtggaagctgaacaccggcagaaccgaggcctggaaggtgctgagcccccagggcggcggcccctgggacagcgtggccagagtgctgcccaacagcagcctgttcctgcccgccgtgggcatccaggacgagggcatcttcagatgccaggccatgaacagaaacggcaaggagaccaagagcaactacagagtgagagtgtaccagttcgagaacctgcacaactacagcctgtag

SEQ ID NO: 9302 - DNA, 462 bp, synthetic construct
  misc_feature 1..462: note = Description of Artificial Sequence: Synthetic coding sequence
  source 1..462: mol_type = other DNA
atggccgccggcaccgccgtgggcgcctgggtgctggtgctgagcctgtggggcgccgtggtgggcgcccagaacatcaccgccagaatcggcgagcccctggtgctgaagtgcaagggcgcccccaagaagcccccccagagactggagtggaagctgaacaccggcagaaccgaggcctggaaggtgctgagcccccagggcggcggcccctgggacagcgtggccagagtgctgcccaacagcagcctgttcctgcccgccgtgggcatccaggacgagggcatcctgggcggcctgggcaccgccgccctgctgatcggcgtgatcctgtggcagagaagacagagaagaggcgaggagagaaaggcccccgagaaccaggaggaggaggaggagagagccgagctgaaccagagcgaggagcccgaggccggcgagagcagcaccggcggcccctag

SEQ ID NO: 9303 - DNA, 885 bp, synthetic construct
  misc_feature 1..885: note = Description of Artificial Sequence: Synthetic coding sequence
  source 1..885: mol_type = other DNA
atgaacagaaacggcaaggagaccaagagcaactacagagtgagagtgtaccagatccccggcaagcccgagatcgtggacagcgccagcgagctgaccgccggcgtgcccaacaaggtgggcacctgcgtgagcgagggcagctaccccgccggcaccctgagctggcacctggacggcaagcccctggtgcccaacgagaagggcgtgagcgtgaaggagcagaccagaagacaccccgagaccggcctgttcaccctgcagagcgagctgatggtgacccccgccagaggcggcgaccccagacccaccttcagctgcagcttcagccccggcctgcccagacacagagccctgagaaccgcccccatccagcccagagtgtgggagcccgtgcccctggaggaggtgcagctggtggtggagcccgagggcggcgccgtggcccccggcggcaccgtgaccctgacctgcgaggtgcccgcccagcccagcccccagatccactggatgaaggacggcgtgcccctgcccctgccccccagccccgtgctgatcctgcccgagatcggcccccaggaccagggcacctacagctgcgtggccacccacagcagccacggcccccaggagagcagagccgtgagcatcagcatcatcggcagcgtgggcggcagcggcctgggcaccctggccctggccctgggcatcctgggcggcctgggcaccgccgccctgctgatcggcgtgatcctgtggcagagaagacagagaagaggcgaggagagaaaggcccccgagaaccaggaggaggaggaggagagagccgagctgaaccagagcgaggagcccgaggccggcgagagcagcaccggcggcccctag

SEQ ID NO: 9304 - DNA, 366 bp, synthetic construct
  misc_feature 1..366: note = Description of Artificial Sequence: Synthetic coding sequence
  source 1..366: mol_type = other DNA
atggccgccggcaccgccgtgggcgcctgggtgctggtgctgagcctgtggggcgccgtggtgggcgcccagaacatcaccgccagaatcggcgagcccctggtgctgaagtgcaagggcgcccccaagaagcccccccagagactggagtggaagctgaacaccggcagaaccgaggcctggaaggtgctgagcccccagggcggcggcccctgggacagcgtggccagagtgctgcccaacagcagcctgttcctgcccgccgtgggcatccaggacgagggcatcttcagatgccaggccatgaacagaaacggcaaggagaccaagagcaactggtggtggagccagaaggtggagcagtag

SEQ ID NO: 9305 - DNA, 1092 bp, synthetic construct
  misc_feature 1..1092: note = Description of Artificial Sequence: Synthetic coding sequence
  source 1..1092: mol_type = other DNA
atggccgccggcaccgccgtgggcgcctgggtgctggtgctgagcctgtggggcgccgtggtgggcgcccagaacatcaccgccagaatcggcgagcccctggtgctgaagtgcaagggcgcccccaagaagcccccccagagactggagtggaagctgaacaccggcagaaccgaggcctggaaggtgctgagcccccagggcggcggcccctgggacagcgtggccagagtgctgcccaacagcagcctgttcctgcccgccgtgggcatccaggacgagggcatcttcagatgccaggccatgaacagaaacggcaaggagaccaagagcaactacagagtgagagtgtaccagatccccggcaagcccgagatcgtggacagcgccagcgagctgaccgccggcgtgcccaacaaggtggtggaggagagcagaagaagcagaaagagaccctgcgagcaggaggtgggcacctgcgtgagcgagggcagctaccccgccggcaccctgagctggcacctggacggcaagcccctggtgcccaacgagaagggcgtgagcgtgaaggagcagaccagaagacaccccgagaccggcctgttcaccctgcagagcgagctgatggtgacccccgccagaggcggcgaccccagacccaccttcagctgcagcttcagccccggcctgcccagacacagagccctgagaaccgcccccatccagcccagagtgtgggagcccgtgcccctggaggaggtgcagctggtggtggagcccgagggcggcgccgtggcccccggcggcaccgtgaccctgacctgcgaggtgcccgcccagcccagcccccagatccactggatgaaggacggcgtgcccctgcccctgccccccagccccgtgctgatcctgcccgagatcggcccccaggaccagggcacctacagctgcgtggccacccacagcagccacggcccccaggagagcagagccgtgagcatcagcatcatcgagcccggcgaggagggccccaccgccggcgagggcttcgacaaggtgagagaggccgaggacagcccccagcacatgtag

SEQ ID NO: 9306 - DNA, 3633 bp, synthetic construct
  misc_feature 1..3633: note = Description of Artificial Sequence: Synthetic coding sequence
  source 1..3633: mol_type = other DNA
atggccgcccagagcagcctgtacaacgacgacagaaacctgctgagaatcagagagaaggagagaagaaaccaggaggcccaccaggagaaggaggccttccccgagaagatccccctgttcggcgagccctacaagaccgccaagggcgacgagctgagcagcagaatccagaacatgctgggcaactacgaggaggtgaaggagttcctgagcaccaagagccacacccacagactggacgccagcgagaacagactgggcaagcccaagtaccccctgatccccgacaagggcagcagcatccccagcagcagcttccacaccagcgtgcaccaccagagcatccacacccccgccagcggccccctgagcgtgggcaacatcagccacaaccccaagatggcccagcccagaaccgagcccatgcccagcctgcacgccaagagctgcggcccccccgacagccagcacctgacccaggacagactgggccaggagggcttcggcagcagccaccacaagaagggcgacagaagagccgacggcgaccactgcgccagcgtgaccgacagcgcccccgagagagagctgagccccctgatcagcctgcccagccccgtgccccccctgagccccatccacagcaaccagcagaccctgcccagaacccagggcagcagcaaggtgcacggcagcagcaacaacagcaagggctactgccccgccaagagccccaaggacctggccgtgaaggtgcacgacaaggagaccccccaggacagcctggtggcccccgcccagccccccagccagaccttccccccccccagcctgcccagcaagagcgtggccatgcagcagaagcccaccgcctacgtgagacccatggacggccaggaccaggcccccagcgagagccccgagctgaagcccctgcccgaggactacagacagcagaccttcgagaagaccgacctgaaggtgcccgccaaggccaagctgaccaagctgaagatgcccagccagagcgtggagcagacctacagcaacgaggtgcactgcgtggaggagatcctgaaggagatgacccacagctggcccccccccctgaccgccatccacacccccagcaccgccgagcccagcaagttccccttccccaccaaggacagccagcacgtgagcagcgtgacccagaaccagaagcagtacgacaccagcagcaagacccacagcaacagccagcagggcaccagcagcatgctggaggacgacctgcagctgagcgacagcgaggacagcgacagcgagcagacccccgagaagccccccagcagcagcgccccccccagcgccccccagagcctgcccgagcccgtggccagcgcccacagcagcagcgccgagagcgagagcaccagcgacagcgacagcagcagcgacagcgagagcgagagcagcagcagcgacagcgaggagaacgagcccctggagacccccgcccccgagcccgagccccccaccaccaacaagtggcagctggacaactggctgaccaaggtgagccagcccgccgccccccccgagggccccagaagcaccgagccccccagaagacaccccgagagcaagggcagcagcgacagcgccaccagccaggagcacagcgagagcaaggaccccccccccaagagcagcagcaaggcccccagagccccccccgaggccccccaccccggcaagagaagctgccagaagagccccgcccagcaggagcccccccagagacagaccgtgggcaccaagcagcccaagaagcccgtgaaggccagcgccagagccggcagcagaaccagcctgcagggcgagagagagcccggcctgctgccctacggcagcagagaccagaccagcaaggacaagcccaaggtgaagaccaagggcagacccagagccgccgccagcaacgagcccaagcccgccgtgccccccagcagcgagaagaagaagcacaagagcagcctgcccgcccccagcaaggccctgagcggccccgagcccgccaaggacaacgtggaggacagaacccccgagcacttcgccctggtgcccctgaccgagagccagggccccccccacagcggcagcggcagcagaaccagcggctgcagacaggccgtggtggtgcaggaggacagcagaaaggacagactgcccctgcccctgagagacaccaagctgctgagccccctgagagacaccccccccccccagagcctgatggtgaagatcaccctggacctgctgagcagaatcccccagccccccggcaagggcagcagacagagaaaggccgaggacaagcagccccccgccggcaagaagcacagcagcgagaagagaagcagcgacagcagcagcaagctggccaagaagagaaagggcgaggccgagagagactgcgacaacaagaagatcagactggagaaggagatcaagagccagagcagcagcagcagcagcagccacaaggagagcagcaagaccaagcccagcagacccagcagccagagcagcaagaaggagatgctgccccccccccccgtgagcagcagcagccagaagcccgccaagcccgccctgaagagaagcagaagagaggccgacacctgcggccaggacccccccaagagcgccagcagcaccaagagcaaccacaaggacagcagcatccccaagcagagaagagtggagggcaagggcagcagaagcagcagcgagcacaagggcagcagcggcgacaccgccaaccccttccccgtgcccagcctgcccaacggcaacagcaagcccggcaagccccaggtgaagttcgacaagcagcaggccgacctgcacatgagagaggccaagaagatgaagcagaaggccgagctgatgaccgacagagtgggcaaggccttcaagtacctggaggccgtgctgagcttcatcgagtgcggcatcgccaccgagagcgagagccagagcagcaagagcgcctacagcgtgtacagcgagaccgtggacctgatcaagttcatcatgagcctgaagagcttcagcgacgccaccgcccccacccaggagaagatcttcgccgtgctgtgcatgagatgccagagcatcctgaacatggccatgttcagatgcaagaaggacatcgccatcaagtacagcagaaccctgaacaagcacttcgagagcagcagcaaggtggcccaggcccccagcccctgcatcgccagcaccggcacccccagccccctgagccccatgcccagccccgccagcagcgtgggcagccagagcagcgccggcagcgtgggcagcagcggcgtggccgccaccatcagcacccccgtgaccatccagaacatgaccagcagctacgtgaccatcaccagccacgtgctgaccgccttcgacctgtgggagcaggccgaggccctgaccagaaagaacaaggagttcttcgccagactgagcaccaacgtgtgcaccctggccctgaacagcagcctggtggacctggtgcactacaccagacagggcttccagcagctgcaggagctgaccaagaccccctag

SEQ ID NO: 9307 - DNA, 1266 bp, synthetic construct
  misc_feature 1..1266: note = Description of Artificial Sequence: Synthetic coding sequence
  source 1..1266: mol_type = other DNA
atggccttcaccgagagagtgaacagcagcggcaacagcctgtacaacgacgacagaaacctgctgagaatcagagagaaggagagaagaaaccaggaggcccaccaggagaaggaggccttccccgagaagatccccctgttcggcgagccctacaagaccgccaagggcgacgagctgagcagcagaatccagaacatgctgggcaactacgaggaggtgaaggagttcctgagcaccaagagccacacccacagactggacgccagcgagaacagactgggcaagcccaagtaccccctgatccccgacaagggcagcagcatccccagcagcagcttccacaccagcgtgcaccaccagagcatccacacccccgccagcggccccctgagcgtgggcaacatcagccacaaccccaagatggcccagcccagaaccgagcccatgcccagcctgcacgccaagagctgcggcccccccgacagccagcacctgacccaggacagactgggccaggagggcttcggcagcagccaccacaagaagggcgacagaagagccgacggcgaccactgcgccagcgtgaccgacagcgcccccgagagagagctgagccccctgatcagcctgcccagccccgtgccccccctgagccccatccacagcaaccagcagaccctgcccagaacccagggcagcagcaaggtgcacggcagcagcaacaacagcaagggctactgccccgccaagagccccaaggacctggccgtgaaggtgcacgacaaggagaccccccaggacagcctggtggcccccgcccagccccccagccagaccttccccccccccagcctgcccagcaagagcgtggccatgcagcagaagcccaccgcctacgtgagacccatggacggccaggaccaggcccccagcgagagccccgagctgaagcccctgcccgaggactacagacagcagaccttcgagaagaccgacctgaaggtgcccgccaaggccaagctgaccaagctgaagatgcccagccagagcgtggagcagacctacagcaacgaggtgcactgcgtggaggagatcctgaaggacagccagcacgtgagcagcgtgacccagaaccagaagcagtacgacaccagcagcaagacccacagcaacagccagcagggcaccagcagcatgctggaggacgacctgcagctgagcgacagcgaggacagcgacagcgagcagacccccgccccctag

SEQ ID NO: 9308 - DNA, 3657 bp, synthetic construct
  misc_feature 1..3657: note = Description of Artificial Sequence: Synthetic coding sequence
  source 1..3657: mol_type = other DNA
atggccttcaccgagagagtgaacagcagcggcaacagcctgtacaacgacgacagaaacctgctgagaatcagagagaaggagagaagaaaccaggaggcccaccaggagaaggaggccttccccgagaagatccccctgttcggcgagccctacaagaccgccaagggcgacgagctgagcagcagaatccagaacatgctgggcaactacgaggaggtgaaggagttcctgagcaccaagagccacacccacagactggacgccagcgagaacagactgggcaagcccaagtaccccctgatccccgacaagggcagcagcatccccagcagcagcttccacaccagcgtgcaccaccagagcatccacacccccgccagcggccccctgagcgtgggcaacatcagccacaaccccaagatggcccagcccagaaccgagcccatgcccagcctgcacgccaagagctgcggcccccccgacagccagcacctgacccaggacagactgggccaggagggcttcggcagcagccaccacaagaagggcgacagaagagccgacggcgaccactgcgccagcgtgaccgacagcgcccccgagagagagctgagccccctgatcagcctgcccagccccgtgccccccctgagccccatccacagcaaccagcagaccctgcccagaacccagggcagcagcaaggtgcacggcagcagcaacaacagcaagggctactgccccgccaagagccccaaggacctggccgtgaaggtgcacgacaaggagaccccccaggacagcctggtggcccccgcccagccccccagccagaccttccccccccccagcctgcccagcaagagcgtggccatgcagcagaagcccaccgcctacgtgagacccatggacggccaggaccaggcccccagcgagagccccgagctgaagcccctgcccgaggactacagacagcagaccttcgagaagaccgacctgaaggtgcccgccaaggccaagctgaccaagctgaagatgcccagccagagcgtggagcagacctacagcaacgaggtgcactgcgtggaggagatcctgaaggagatgacccacagctggcccccccccctgaccgccatccacacccccagcaccgccgagcccagcaagttccccttccccaccaaggacagccagcacgtgagcagcgtgacccagaaccagaagcagtacgacaccagcagcaagacccacagcaacagccagcagggcaccagcagcatgctggaggacgacctgcagctgagcgacagcgaggacagcgacagcgagcagacccccgagaagccccccagcagcagcgccccccccagcgccccccagagcctgcccgagcccgtggccagcgcccacagcagcagcgccgagagcgagagcaccagcgacagcgacagcagcagcgacagcgagagcgagagcagcagcagcgacagcgaggagaacgagcccctggagacccccgcccccgagcccgagccccccaccaccaacaagtggcagctggacaactggctgaccaaggtgagccagcccgccgccccccccgagggccccagaagcaccgagccccccagaagacaccccgagagcaagggcagcagcgacagcgccaccagccaggagcacagcgagagcaaggaccccccccccaagagcagcagcaaggcccccagagccccccccgaggccccccaccccggcaagagaagctgccagaagagccccgcccagcaggagcccccccagagacagaccgtgggcaccaagcagcccaagaagcccgtgaaggccagcgccagagccggcagcagaaccagcctgcagggcgagagagagcccggcctgctgccctacggcagcagagaccagaccagcaaggacaagcccaaggtgaagaccaagggcagacccagagccgccgccagcaacgagcccaagcccgccgtgccccccagcagcgagaagaagaagcacaagagcagcctgcccgcccccagcaaggccctgagcggccccgagcccgccaaggacaacgtggaggacagaacccccgagcacttcgccctggtgcccctgaccgagagccagggccccccccacagcggcagcggcagcagaaccagcggctgcagacaggccgtggtggtgcaggaggacagcagaaaggacagactgcccctgcccctgagagacaccaagctgctgagccccctgagagacaccccccccccccagagcctgatggtgaagatcaccctggacctgctgagcagaatcccccagccccccggcaagggcagcagacagagaaaggccgaggacaagcagccccccgccggcaagaagcacagcagcgagaagagaagcagcgacagcagcagcaagctggccaagaagagaaagggcgaggccgagagagactgcgacaacaagaagatcagactggagaaggagatcaagagccagagcagcagcagcagcagcagccacaaggagagcagcaagaccaagcccagcagacccagcagccagagcagcaagaaggagatgctgccccccccccccgtgagcagcagcagccagaagcccgccaagcccgccctgaagagaagcagaagagaggccgacacctgcggccaggacccccccaagagcgccagcagcaccaagagcaaccacaaggacagcagcatccccaagcagagaagagtggagggcaagggcagcagaagcagcagcgagcacaagggcagcagcggcgacaccgccaaccccttccccgtgcccagcctgcccaacggcaacagcaagcccggcaagccccaggtgaagttcgacaagcagcaggccgacctgcacatgagagaggccaagaagatgaagcagaaggccgagctgatgaccgacagagtgggcaaggccttcaagtacctggaggccgtgctgagcttcatcgagtgcggcatcgccaccgagagcgagagccagagcagcaagagcgcctacagcgtgtacagcgagaccgtggacctgatcaagttcatcatgagcctgaagagcttcagcgacgccaccgcccccacccaggagaagatcttcgccgtgctgtgcatgagatgccagagcatcctgaacatggccatgttcagatgcaagaaggacatcgccatcaagtacagcagaaccctgaacaagcacttcgagagcagcagcaaggtggcccaggcccccagcccctgcatcgccagaagcaccggcacccccagccccctgagccccatgcccagccccgccagcagcgtgggcagccagagcagcgccggcagcgtgggcagcagcggcgtggccgccaccatcagcacccccgtgaccatccagaacatgaccagcagctacgtgaccatcaccagccacgtgctgaccgccttcgacctgtgggagcaggccgaggccctgaccagaaagaacaaggagttcttcgccagactgagcaccaacgtgtgcaccctggccctgaacagcagcctggtggacctggtgcactacaccagacagggcttccagcagctgcaggagctgaccaagaccccctag

SEQ ID NO: 9309 - DNA, 1221 bp, synthetic construct
  misc_feature 1..1221: note = Description of Artificial Sequence: Synthetic coding sequence
  source 1..1221: mol_type = other DNA
atggccttcaccgagagagtgaacagcagcggcaacagcctgtacaacgacgacagaaacctgctgagaatcagagagaaggagagaagaaaccaggaggcccaccaggagaaggaggccttccccgagaagatccccctgttcggcgagccctacaagaccgccaagggcgacgagctgagcagcagaatccagaacatgctgggcaactacgaggaggtgaaggagttcctgagcaccaagagccacacccacagactggacgccagcgagaacagactgggcaagcccaagtaccccctgatccccgacaagggcagcagcatccccagcagcagcttccacaccagcgtgcaccaccagagcatccacacccccgccagcggccccctgagcgtgggcaacatcagccacaaccccaagatggcccagcccagaaccgagcccatgcccagcctgcacgccaagagctgcggcccccccgacagccagcacctgacccaggacagactgggccaggagggcttcggcagcagccaccacaagaagggcgacagaagagccgacggcgaccactgcgccagcgtgaccgacagcgcccccgagagagagctgagccccctgatcagcctgcccagccccgtgccccccctgagccccatccacagcaaccagcagaccctgcccagaacccagggcagcagcaaggtgcacggcagcagcaacaacagcaagggctactgccccgccaagagccccaaggacctggccgtgaaggtgcacgacaaggagaccccccaggacagcctggtggcccccgcccagccccccagccagaccttccccccccccagcctgcccagcaagagcgtggccatgcagcagaagcccaccgcctacgtgagacccatggacggccaggaccaggcccccagcgagagccccgagctgaagcccctgcccgaggactacagacagcagaccttcgagaagaccgacctgaaggtgcccgccaaggccaagctgaccaagctgaagatgcccagccagagcgtggagacctacagcaacgaggtgcactgcgtggaggagatcctgaaggagatgacccacagctggcccccccccctgaccgccatccacacccccagcaccgccgagcccagcaagttccccttccccaccaaggacagccagcacgtgagcagcgtgacccagtag

SEQ ID NO: 9310 - DNA, 1473 bp, synthetic construct
  misc_feature 1..1473: note = Description of Artificial Sequence: Synthetic coding sequence
  source 1..1473: mol_type = other DNA
atgcccagccagagcgtggagcagacctacagcaacgaggtgcactgcgtggaggagatcctgaaggagatgacccacagctggcccccccccctgaccgccatccacacccccagcaccgccgagcccagcaagttccccttccccaccaaggacagccagcacgtgagcagcgtgacccagaaccagaagcagtacgacaccagcagcaagacccacagcaacagccagcagggcaccagcagcatgctggaggacgacctgcagctgagcgacagcgaggacagcgacagcgagcagacccccgagaagcccccccacctgcacctgcaggtgctgcacagccccttccagaaccagtggcaccagcacatccccgccgtgcagagccagaaggcccccgtgacccagaccgtgccccagacccagagagccagagccgtgcaggacagcgaggagaacgagcccctggagacccccgcccccgagcccgagccccccaccaccaacaagtggcagctggacaactggctgaccaaggtgagccagcccgccgccccccccgagggccccagaagcaccgagccccccagaagacaccccgagagcaagggcagcagcgacagcgccaccagccaggagcacagcgagagcaaggaccccccccccaagagcagcagcaaggcccccagagccccccccgaggccccccaccccggcaagagaagctgccagaagagccccgcccagcaggagcccccccagagacagaccgtgggcaccaagcagcccaagaagcccgtgaaggccagcgccagagccggcagcagaaccagcctgcagggcgagagagagcccggcctgctgccctacggcagcagagaccagaccagcaaggacaagcccaaggtgaagaccaagggcagacccagagccgccgccagcaacgagcccaagcccgccgtgccccccagcagcgagaagaagaagcacaagagcagcctgcccgcccccagcaaggccctgagcggccccgagcccgccaaggacaacgtggaggacagaacccccgagcacttcgccctggtgcccctgaccgagagccagggccccccccacagcggcagcggcagcagaaccagcggctgcagacaggccgtggtggtgcaggaggacagcagaaaggacagactgcccctgcccctgagagacaccaagctgctgagccccctgagagacaccccccccccccagagcctgatggtgaagatcaccctggacctgctgagcagaatcccccagccccccggcaagggcagcagacagagaaaggccgaggacaagcagccccccgccggcaagaagcacagcagcgagaagagaagcagcgacagcagcagcaagctggccaagaagagaaagggcgaggccgagagagactgcgacaacaagaagatcagactggagaagtag

SEQ ID NO: 9311 - DNA, 2550 bp, synthetic construct
  misc_feature 1..2550: note = Description of Artificial Sequence: Synthetic coding sequence
  source 1..2550: mol_type = other DNA
atgacccacagctggcccccccccctgaccgccatccacacccccagcaccgccgagcccagcaagttccccttccccaccaaggacagccagcacgtgagcagcgtgacccagaaccagaagcagtacgacaccagcagcaagacccacagcaacagccagcagggcaccagcagcatgctggaggacgacctgcagctgagcgacagcgaggacagcgacagcgagcagacccccgagaagccccccagcagcagcgccccccccagcgccccccagagcctgcccgagcccgtggccagcgcccacagcagcagcgccgagagcgagagcaccagcgacagcgacagcagcagcgacagcgagagcgagagcagcagcagcgacagcgaggagaacgagcccctggagacccccgcccccgagcccgagccccccaccaccaacaagtggcagctggacaactggctgaccaaggtgagccagcccgccgccccccccgagggccccagaagcaccgagccccccagaagacaccccgagagcaagggcagcagcgacagcgccaccagccaggagcacagcgagagcaaggaccccccccccaagagcagcagcaaggcccccagagccccccccgaggccccccaccccggcaagagaagctgccagaagagccccgcccagcaggagcccccccagagacagaccgtgggcaccaagcagcccaagaagcccgtgaaggccagcgccagagccggcagcagaaccagcctgcagggcgagagagagcccggcctgctgccctacggcagcagagaccagaccagcaaggacaagcccaaggtgaagaccaagggcagacccagagccgccgccagcaacgagcccaagcccgccgtgccccccagcagcgagaagaagaagcacaagagcagcctgcccgcccccagcaaggccctgagcggccccgagcccgccaaggacaacgtggaggacagaacccccgagcacttcgccctggtgcccctgaccgagagccagggccccccccacagcggcagcggcagcagaaccagcggctgcagacaggccgtggtggtgcaggaggacagcagaaaggacagactgcccctgcccctgagagacaccaagctgctgagccccctgagagacaccccccccccccagagcctgatggtgaagatcaccctggacctgctgagcagaatcccccagccccccggcaagggcagcagacagagaaaggccgaggacaagcagccccccgccggcaagaagcacagcagcgagaagagaagcagcgacagcagcagcaagctggccaagaagagaaagggcgaggccgagagagactgcgacaacaagaagatcagactggagaaggagatcaagagccagagcagcagcagcagcagcagccacaaggagagcagcaagaccaagcccagcagacccagcagccagagcagcaagaaggagatgctgccccccccccccgtgagcagcagcagccagaagcccgccaagcccgccctgaagagaagcagaagagaggccgacacctgcggccaggacccccccaagagcgccagcagcaccaagagcaaccacaaggacagcagcatccccaagcagagaagagtggagggcaagggcagcagaagcagcagcgagcacaagggcagcagcggcgacaccgccaaccccttccccgtgcccagcctgcccaacggcaacagcaagcccggcaagccccaggtgaagttcgacaagcagcaggccgacctgcacatgagagaggccaagaagatgaagcagaaggccgagctgatgaccgacagagtgggcaaggccttcaagtacctggaggccgtgctgagcttcatcgagtgcggcatcgccaccgagagcgagagccagagcagcaagagcgcctacagcgtgtacagcgagaccgtggacctgatcaagttcatcatgagcctgaagagcttcagcgacgccaccgcccccacccaggagaagatcttcgccgtgctgtgcatgagatgccagagcatcctgaacatggccatgttcagatgcaagaaggacatcgccatcaagtacagcagaaccctgaacaagcacttcgagagcagcagcaaggtggcccaggcccccagcccctgcatcgccagaagcaccggcacccccagccccctgagccccatgcccagccccgccagcagcgtgggcagccagagcagcgccggcagcgtgggcagcagcggcgtggccgccaccatcagcacccccgtgaccatccagaacatgaccagcagctacgtgaccatcaccagccacgtgctgaccgccttcgacctgtgggagcaggccgaggccctgaccagaaagaacaaggagttcttcgccagactgagcaccaacgtgtgcaccctggccctgaacagcagcctggtggacctggtgcactacaccagacagggcttccagcagctgcaggagctgaccaagaccccctag

SEQ ID NO: 9312 - DNA, 2376 bp, synthetic construct
  misc_feature 1..2376: note = Description of Artificial Sequence: Synthetic coding sequence
  source 1..2376: mol_type = other DNA
atgcccgacatgcacttcaaggcccccaagatcagcatgcccgacgtggacctgcacctgaagggccccaaggtgaagggcgacgtggacgtgagcgtgcccaagctggagggcgacctgaccggccccagcgtgggcgtggaggtgcccgacgtggagctggagtgccccgacgccaagctgaagggccccaagttcaagatgcccgagatgcacttcaagacccccaagatcagcatgcccgacgtggacctgcacctgaagggccccaaggtgaagggcgacatggacgtgagcgtgcccaaggtggagggcgagatgaaggtgcccgacgtggacatcaagggccccaagatggacatcgacgcccccgacgtggacgtgcacggccccgactggcacctgaagatgcccaagatgaagatgcccaagttcagcatgcccggcttcaaggccgagggccccgaggtggacgtgaacctgcccaaggccgacgtggtggtgagcggccccaaggtggacgtggaggtgcccgacgtgagcctggagggccccgagggcaagctgaagggccccaagctgaagatgcccgagatgcacttcaaggcccccaagatcagcatgcccgacgtggacctgcacctgaagggccccaaggtgaagggcgacgtggacgtgagcctgcccaagctggagggcgacctgaccggccccagcgtggacgtggaggtgcccgacgtggagctggagtgccccgacgccaagctgaagggccccaagttcaagatgcccgagatgcacttcaagacccccaagatcagcatgcccgacgtgaacctgaacctgaagggccccaaggtgaagggcgacatggacgtgagcgtgcccaaggtggagggcgagatgaaggtgcccgacgtggacatcagaggccccaaggtggacatcgacgcccccgacgtggacgtgcacggccccgactggcacctgaagatgcccaagatgaagatgcccaagttcagcatgcccggcttcaagggcgagggccccgaggtggacgtgaacctgcccaaggccgacgtggacgtgagcggccccaaggtggacgtggaggtgcccgacgtgagcctggagggccccgagggcaagctgaagggccccaagttcaagatgcccgagatgcacttcaagacccccaagatcagcatgcccgacgtggacttcaacctgaagggccccaagatcaagggcgacgtggacgtgagcgcccccaagctggagggcgagctgaagggccccgagctggacgtgaagggccccaagctggacgccgacatgcccgaggtggccgtggagggccccaacggcaagtggaagacccccaagttcaagatgcccgacatgcacttcaaggcccccaagatcagcatgcccgacctggacctgcacctgaagagccccaaggccaagggcgaggtggacgtggacgtgcccaagctggagggcgacctgaagggcccccacgtggacgtgagcggccccgacatcgacatcgagggccccgagggcaagctgaagggccccaagttcaagatgcccgacatgcacttcaaggcccccaacatcagcatgcccgacgtggacctgaacctgaagggccccaagatcaagggcgacgtggacgtgagcgtgcccgaggtggagggcaagctggaggtgcccgacatgaacatcagaggccccaaggtggacgtgaacgcccccgacgtgcaggcccccgactggcacctgaagatgcccaagatgaagatgcccaagttcagcatgcccggcttcaaggccgagggccccgaggtggacgtgaacctgcccaaggccgacgtggacatcagcggccccaaggtggacatcgagggccccgacgtgaacatcgagggccccgagggcaagctgaagggccccaagctgaagatgcccgagatgaacatcaaggcccccaagatcagcatgcccgacttcgacctgcacctgaagggccccaaggtgaagggcgacgtggacgtgagcctgcccaaggtggagggcgacctgaagggccccgaggtggacatcaagggccccaaggtggacatcaacgcccccgacgtgggcgtgcagggccccgactggcacctgaagatgcccaaggtgaagatgcccaagttcagcatgcccggcttcaagggcgagggccccgacggcgacgtgaagctgcccaaggccgacatcgacgtgagcggccccaaggtggacatcgagggccccgacgtgaacatcgagggccccgagggcaagctgaagggccccaagttcaagatggcccagagatggtggtag

SEQ ID NO: 9313 - DNA, 450 bp, synthetic construct
  misc_feature 1..450: note = Description of Artificial Sequence: Synthetic coding sequence
  source 1..450: mol_type = other DNA
atggagaaggaggagaccaccagagagctgctgctgcccaactggcagggcagcggcagccacggcctgaccatcgcccagagagacgacggcgtgttcgtgcaggaggtgacccagaacagccccgccgccagaaccggcgtggtgaaggagggcgaccagatcgtgggcgccaccatctacttcgacaacctgcagagcggcgaggtgacccagctgctgaacaccatgggccaccacaccgtgggcctgaagctgcacagaaagggcgacagaagccccgagcccggccagacctggaccagagaggtgttcagcagctgcagcagcgaggtggtgctgaacaccccccagcccagcgccctggagtgcaaggaccagaacaagcagaaggaggccagcagccaggccggcgccgtgagcgtgagcacccccaacgccggcctgtag

SEQ ID NO: 9314 - DNA, 17673 bp, synthetic construct
  misc_feature 1..17673: note = Description of Artificial Sequence: Synthetic coding sequence
  source 1..17673: mol_type = other DNA
atggagaaggaggagaccaccagagagctgctgctgcccaactggcagggcagcggcagccacggcctgaccatcgcccagagagacgacggcgtgttcgtgcaggaggtgacccagaacagccccgccgccagaaccggcgtggtgaaggagggcgaccagatcgtgggcgccaccatctacttcgacaacctgcagagcggcgaggtgacccagctgctgaacaccatgggccaccacaccgtgggcctgaagctgcacagaaagggcgacagaagccccgagcccggccagacctggaccagagaggtgttcagcagctgcagcagcgaggtggtgctgagcggcgacgacgaggagtaccagagaatctacaccaccaagatcaagcccagactgaagagcgaggacggcgtggagggcgacctgggcgagacccagagcagaaccatcaccgtgaccagaagagtgaccgcctacaccgtggacgtgaccggcagagagggcgccaaggacatcgacatcagcagccccgagttcaagatcaagatccccagacacgagctgaccgagatcagcaacgtggacgtggagacccagagcggcaagaccgtgatcagactgcccagcggcagcggcgccgccagccccaccggcagcgccgtggacatcagagccggcgccatcagcgccagcggccccgagctgcagggcgccggccacagcaagctgcaggtgaccatgcccggcatcaaggtgggcggcagcggcgtgaacgtgaacgccaagggcctggacctgggcggcagaggcggcgtgcaggtgcccgccgtggacatcagcagcagcctgggcggcagagccgtggaggtgcagggccccagcctggagagcggcgaccacggcaagatcaagttccccaccatgaaggtgcccaagttcggcgtgagcaccggcagagagggccagacccccaaggccggcctgagagtgagcgcccccgaggtgagcgtgggccacaagggcggcaagcccggcctgaccatccaggccccccagctggaggtgagcgtgcccagcgccaacatcgagggcctggagggcaagctgaagggcccccagatcaccggccccagcctggagggcgacctgggcctgaagggcgccaagccccagggccacatcggcgtggacgccagcgccccccagatcggcggcagcatcaccggccccagcgtggaggtgcaggcccccgacatcgacgtgcagggccccggcagcaagctgaacgtgcccaagatgaaggtgcccaagttcagcgtgagcggcgccaagggcgaggagaccggcatcgacgtgaccctgcccaccggcgaggtgaccgtgcccggcgtgagcggcgacgtgagcctgcccgagatcgccaccggcggcctggagggcaagatgaagggcaccaaggtgaagacccccgagatgatcatccagaagcccaagatcagcatgcaggacgtggacctgagcctgggcagccccaagctgaagggcgacatcaaggtgagcgcccccggcgtgcagggcgacgtgaagggcccccaggtggccctgaagggcagcagagtggacatcgagacccccaacctggagggcaccctgaccggccccagactgggcagccccagcggcaagaccggcacctgcagaatcagcatgagcgaggtggacctgaacgtggccgcccccaaggtgaagggcggcgtggacgtgaccctgcccagagtggagggcaaggtgaaggtgcccgaggtggacgtgagaggccccaaggtggacgtgagcgcccccgacgtggaggcccacggccccgagtggaacctgaagatgcccaagatgaagatgcccaccttcagcacccccggcgccaagggcgagggccccgacgtgcacatgaccctgcccaagggcgacatcagcatcagcggccccaaggtgaacgtggaggcccccgacgtgaacctggagggcctgggcggcaagctgaagggccccgacgtgaagctgcccgacatgagcgtgaagacccccaagatcagcatgcccgacgtggacctgcacgtgaagggcaccaaggtgaagggcgagtacgacgtgaccgtgcccaagctggagggcgagctgaagggccccaaggtggacatcgacgcccccgacgtggacgtgcacggccccgactggcacctgaagatgcccaagatgaagatgcccaagttcagcgtgcccggcttcaaggccgagggccccgaggtggacgtgaacctgcccaaggccgacgtggacatcagcggccccaagatcgacgtgaccgcccccgacgtgagcatcgaggagcccgagggcaagctgaagggccccaagttcaagatgcccgagatgaacatcaaggtgcccaagatcagcatgcccgacgtggacctgcacctgaagggccccaacgtgaagggcgagtacgacgtgaccatgcccaaggtggagagcgagatcaaggtgcccgacgtggagctgaagagcgccaagatggacatcgacgtgcccgacgtggaggtgcagggccccgactggcacctgaagatgcccaagatgaagatgcccaagttcagcatgcccggcttcaaggccgagggccccgaggtggacgtgaacctgcccaaggccgacgtggacatcagcggccccaaggtgggcgtggaggtgcccgacgtgaacatcgagggccccgagggcaagctgaagggccccaagttcaagatgcccgagatgaacatcaaggcccccaagatcagcatgcccgacgtggacctgcacatgaagggccccaaggtgaagggcgagtacgacatgaccgtgcccaagctggagggcgacctgaagggccccaaggtggacgtgagcgcccccgacgtggagatgcagggccccgactggaacctgaagatgcccaagatcaagatgcccaagttcagcatgcccagcctgaagggcgagggccccgagttcgacgtgaacctgagcaaggccaacgtggacatcagcgcccccaaggtggacaccaacgcccccgacctgagcctggagggccccgagggcaagctgaagggccccaagttcaagatgcccgagatgcacttcagagcccccaagatgagcctgcccgacgtggacctggacctgaagggccccaagatgaagggcaacgtggacatcagcgcccccaagatcgagggcgagatgcaggtgcccgacgtggacatcagaggccccaaggtggacatcaaggcccccgacgtggagggccagggcctggactggagcctgaagatccccaagatgaagatgcccaagttcagcatgcccagcctgaagggcgagggccccgaggtggacgtgaacctgcccaaggccgacgtggtggtgagcggccccaaggtggacatcgaggcccccgacgtgagcctggagggccccgagggcaagctgaagggccccaagttcaagatgcccgagatgcacttcaagacccccaagatcagcatgcccgacgtggacctgcacctgaagggccccaaggtgaagggcgacgtggacgtgagcgtgcccaaggtggagggcgagatgaaggtgcccgacgtggagatcaagggccccaagatggacatcgacgcccccgacgtggaggtgcagggccccgactggcacctgaagatgcccaagatgaagatgcccaagttcagcatgcccggcttcaagggcgagggcagagaggtggacgtgaacctgcccaaggccgacatcgacgtgagcggccccaaggtggacgtggaggtgcccgacgtgagcctggagggccccgagggcaagctgaagggccccaagttcaagatgcccgagatgcacttcaaggcccccaagatcagcatgcccgacgtggacctgaacctgaagggccccaagctgaagggcgacgtggacgtgagcctgcccgaggtggagggcgagatgaaggtgcccgacgtggacatcaagggccccaaggtggacatcagcgcccccgacgtggacgtgcacggccccgactggcacctgaagatgcccaaggtgaagatgcccaagttcagcatgcccggcttcaagggcgagggccccgaggtggacgtgaagctgcccaaggccgacgtggacgtgagcggccccaagatggacgccgaggtgcccgacgtgaacatcgagggccccgacgccaagctgaagggccccaagttcaagatgcccgagatgagcatcaagccccagaagatcagcatccccgacgtgggcctgcacctgaagggccccaagatgaagggcgactacgacgtgaccgtgcccaaggtggagggcgagatcaaggcccccgacgtggacatcaagggccccaaggtggacatcaacgcccccgacgtggaggtgcacggccccgactggcacctgaagatgcccaaggtgaagatgcccaagttcagcatgcccggcttcaagggcgagggccccgaggtggacatgaacctgcccaaggccgacctgggcgtgagcggccccaaggtggacatcgacgtgcccgacgtgaacctggaggcccccgagggcaagctgaagggccccaagttcaagatgcccagcatgaacatccagacccacaagatcagcatgcccgacgtgggcctgaacctgaaggcccccaagctgaagaccgacgtggacgtgagcctgcccaaggtggagggcgacctgaagggccccgagatcgacgtgaaggcccccaagatggacgtgaacgtgggcgacatcgacatcgagggccccgagggcaagctgaagggccccaagttcaagatgcccgagatgcacttcaaggcccccaagatcagcatgcccgacgtggacctgcacctgaagggccccaaggtgaagggcgacatggacgtgagcgtgcccaaggtggagggcgagatgaaggtgcccgacgtggacatcaagggccccaaggtggacatcgacgcccccgacgtggaggtgcacgaccccgactggcacctgaagatgcccaagatgaagatgcccaagttcagcatgcccggcttcaaggccgagggccccgaggtggacgtgaacctgcccaaggccgacatcgacgtgagcggccccagcgtggacaccgacgcccccgacctggacatcgagggccccgagggcaagctgaagggcagcaagttcaagatgcccaagctgaacatcaaggcccccaaggtgagcatgcccgacgtggacctgaacctgaagggccccaagctgaagggcgagatcgacgccagcgtgcccgagctggagggcgacctgagaggcccccaggtggacgtgaagggccccttcgtggaggccgaggtgcccgacgtggacctggagtgccccgacgccaagctgaagggccccaagttcaagatgcccgagatgcacttcaaggcccccaagatcagcatgcccgacgtggacctgcacctgaagggccccaaggtgaagggcgacgccgacgtgagcgtgcccaagctggagggcgacctgaccggccccagcgtgggcgtggaggtgcccgacgtggagctggagtgccccgacgccaagctgaagggccccaagttcaagatgcccgacatgcacttcaaggcccccaagatcagcatgcccgacgtggacctgcacctgaagggccccaaggtgaagggcgacgtggacgtgagcgtgcccaagctggagggcgacctgaccggccccagcgtgggcgtggaggtgcccgacgtggagctggagtgccccgacgccaagctgaagggccccaagttcaagatgcccgagatgcacttcaagacccccaagatcagcatgcccgacgtggacctgcacctgaagggccccaaggtgaagggcgacatggacgtgagcgtgcccaaggtggagggcgagatgaaggtgcccgacgtggacatcaagggccccaagatggacatcgacgcccccgacgtggacgtgcacggccccgactggcacctgaagatgcccaagatgaagatgcccaagttcagcatgcccggcttcaaggccgagggccccgaggtggacgtgaacctgcccaaggccgacgtggtggtgagcggccccaaggtggacgtggaggtgcccgacgtgagcctggagggccccgagggcaagctgaagggccccaagctgaagatgcccgagatgcacttcaaggcccccaagatcagcatgcccgacgtggacctgcacctgaagggccccaaggtgaagggcgacgtggacgtgagcctgcccaagctggagggcgacctgaccggccccagcgtggacgtggaggtgcccgacgtggagctggagtgccccgacgccaagctgaagggccccaagttcaagatgcccgagatgcacttcaagacccccaagatcagcatgcccgacgtgaacctgaacctgaagggccccaaggtgaagggcgacatggacgtgagcgtgcccaaggtggagggcgagatgaaggtgcccgacgtggacatcagaggccccaaggtggacatcgacgcccccgacgtggacgtgcacggccccgactggcacctgaagatgcccaagatgaagatgcccaagttcagcatgcccggcttcaagggcgagggccccgaggtggacgtgaacctgcccaaggccgacgtggacgtgagcggccccaaggtggacgtggaggtgcccgacgtgagcctggagggccccgagggcaagctgaagggccccaagttcaagatgcccgagatgcacttcaagacccccaagatcagcatgcccgacgtggacttcaacctgaagggccccaagatcaagggcgacgtggacgtgagcgcccccaagctggagggcgagctgaagggccccgagctggacgtgaagggccccaagctggacgccgacatgcccgaggtggccgtggagggccccaacggcaagtggaagacccccaagttcaagatgcccgacatgcacttcaaggcccccaagatcagcatgcccgacctggacctgcacctgaagagccccaaggccaagggcgaggtggacgtggacgtgcccaagctggagggcgacctgaagggcccccacgtggacgtgagcggccccgacatcgacatcgagggccccgagggcaagctgaagggccccaagttcaagatgcccgacatgcacttcaaggcccccaacatcagcatgcccgacgtggacctgaacctgaagggccccaagatcaagggcgacgtggacgtgagcgtgcccgaggtggagggcaagctggaggtgcccgacatgaacatcagaggccccaaggtggacgtgaacgcccccgacgtgcaggcccccgactggcacctgaagatgcccaagatgaagatgcccaagttcagcatgcccggcttcaaggccgagggccccgaggtggacgtgaacctgcccaaggccgacgtggacatcagcggccccaaggtggacatcgagggccccgacgtgaacatcgagggccccgagggcaagctgaagggccccaagctgaagatgcccgagatgaacatcaaggcccccaagatcagcatgcccgacttcgacctgcacctgaagggccccaaggtgaagggcgacgtggacgtgagcctgcccaaggtggagggcgacctgaagggccccgaggtggacatcaagggccccaaggtggacatcaacgcccccgacgtgggcgtgcagggccccgactggcacctgaagatgcccaaggtgaagatgcccaagttcagcatgcccggcttcaagggcgagggccccgacggcgacgtgaagctgcccaaggccgacatcgacgtgagcggccccaaggtggacatcgagggccccgacgtgaacatcgagggccccgagggcaagctgaagggccccaagttcaagatgcccgagatgaacatcaaggcccccaagatcagcatgcccgacatcgacctgaacctgaagggccccaaggtgaagggcgacgtggacgtgagcctgcccaaggtggagggcgacctgaagggccccgaggtggacatcaagggccccaaggtggacatcgacgcccccgacgtggacgtgcacggccccgactggcacctgaagatgcccaagatcaagatgcccaagatcagcatgcccggcttcaagggcgagggccccgacgtggacgtgaacctgcccaaggccgacatcgacgtgagcggccccaaggtggacgtggagtgccccgacgtgaacatcgagggccccgagggcaagtggaagagccccaagttcaagatgcccgagatgcacttcaagacccccaagatcagcatgcccgacatcgacctgaacctgaccggccccaagatcaagggcgacgtggacgtgaccggccccaaggtggagggcgacctgaagggccccgaggtggacctgaagggccccaaggtggacatcgacgtgcccgacgtgaacgtgcagggccccgactggcacctgaagatgcccaagatgaagatgcccaagttcagcatgcccggcttcaaggccgagggccccgaggtggacgtgaacctgcccaaggccgacgtggacgtgagcggccccaaggtggacgtggagggccccgacgtgaacatcgagggccccgagggcaagctgaagggccccaagttcaagatgcccgagatgaacatcaaggcccccaagatccccatgcccgacttcgacctgcacctgaagggccccaaggtgaagggcgacgtggacatcagcctgcccaaggtggagggcgacctgaagggccccgaggtggacatcagaggcccccaggtggacatcgacgtgcccgacgtgggcgtgcagggccccgactggcacctgaagatgcccaaggtgaagatgcccaagttcagcatgcccggcttcaagggcgagggccccgacgtggacgtgaacctgcccaaggccgacctggacgtgagcggccccaaggtggacatcgacgtgcccgacgtgaacatcgagggccccgagggcaagctgaagggccccaagttcaagatgcccgagatgaacatcaaggcccccaagatcagcatgcccgacatcgacctgaacctgaagggccccaaggtgaagggcgacatggacgtgagcctgcccaaggtggagggcgacatgaaggtgcccgacgtggacatcaagggccccaaggtggacatcaacgcccccgacgtggacgtgcagggccccgactggcacctgaagatgcccaagatcaagatgcccaagatcagcatgcccggcttcaagggcgagggccccgaggtggacgtgaacctgcccaaggccgacctggacgtgagcggccccaaggtggacgtggacgtgcccgacgtgaacatcgagggccccgacgccaagctgaagggccccaagttcaagatgcccgagatgaacatcaaggcccccaagatcagcatgcccgacctggacctgaacctgaagggccccaagatgaagggcgaggtggacgtgagcctggccaacgtggagggcgacctgaagggccccgccctggacatcaagggccccaagatcgacgtggacgcccccgacatcgacatccacggccccgacgccaagctgaagggccccaagctgaagatgcccgacatgcacgtgaacatgcccaagatcagcatgcccgagatcgacctgaacctgaagggcagcaagctgaagggcgacgtggacgtgagcggccccaagctggagggcgacatcaaggcccccagcctggacatcaagggccccgaggtggacgtgagcggccccaagctgaacatcgagggcaagagcaagaagagcagattcaagctgcccaagttcaacttcagcggcagcaaggtgcagacccccgaggtggacgtgaagggcaagaagcccgacatcgacatcaccggccccaaggtggacatcaacgcccccgacgtggaggtgcagggcaaggtgaagggcagcaagttcaagatgcccttcctgagcatcagcagccccaaggtgagcatgcccgacgtggagctgaacctgaagagccccaaggtgaagggcgacctggacatcgccggccccaacctggagggcgacttcaagggccccaaggtggacatcaaggcccccgaggtgaacctgaacgcccccgacgtggacgtgcacggccccgactggaacctgaagatgcccaagatgaagatgcccaagttcagcgtgagcggcctgaaggccgagggccccgacgtggccgtggacctgcccaagggcgacatcaacatcgagggccccagcatgaacatcgagggccccgacctgaacgtggagggccccgagggcggcctgaagggccccaagttcaagatgcccgacatgaacatcaaggcccccaagatcagcatgcccgacatcgacctgaacctgaagggccccaaggtgaagggcgacgtggacatcagcctgcccaagctggagggcgacctgaagggccccgaggtggacatcaagggccccaaggtggacatcaacgcccccgacgtggacgtgcacggccccgactggcacctgaagatgcccaaggtgaagatgcccaagttcagcatgcccggcttcaagggcgagggccccgaggtggacgtgaccctgcccaaggccgacatcgacatcagcggccccaacgtggacgtggacgtgcccgacgtgaacatcgagggccccgacgccaagctgaagggccccaagttcaagatgcccgagatgaacatcaaggcccccaagatcagcatgcccgacttcgacctgaacctgaagggccccaagatgaagggcgacgtggtggtgagcctgcccaaggtggagggcgacctgaagggccccgaggtggacatcaagggccccaaggtggacatcgacacccccgacatcaacatcgagggcagcgagggcaagttcaagggccccaagttcaagatccccgagatgcacctgaaggcccccaagatcagcatgcccgacatcgacctgaacctgaagggccccaaggtgaagggcgacgtggacgtgagcctgcccaagatggagggcgacctgaagggccccgaggtggacatcaagggccccaaggtggacatcaacgcccccgacgtggacgtgcagggccccgactggcacctgaagatgcccaaggtgaagatgcccaagttcagcatgcccggcttcaagggcgagggccccgacgtggacgtgaacctgcccaaggccgacctggacgtgagcggccccaaggtggacatcgacgtgcccgacgtgaacatcgagggccccgagggcaagctgaagggccccaagttcaagatgcccgagatgaacatcaaggcccccaagatcagcatgcccgacatcgacctgaacctgaagggccccaaggtgaagggcgacatggacgtgagcctgcccaaggtggagggcgacatgcaggtgcccgacctggacatcaagggccccaaggtggacatcaacgcccccgacgtggacgtgagaggccccgactggcacctgaagatgcccaagatcaagatgcccaagatcagcatgcccggcttcaagggcgagggccccgaggtggacgtgaacctgcccaaggccgacctggacgtgagcggccccaaggtggacgtggacgtgcccgacgtgaacatcgagggccccgacgccaagctgaagggccccaagttcaagatgcccgagatgaacatcaaggcccccaagatcagcatgcccgacttcgacctgcacctgaagggccccaaggtgaagggcgacgtggacgtgagcctgcccaagatggagggcgacctgaaggcccccgaggtggacatcaagggccccaaggtggacatcgacgcccccgacgtggacgtgcacggccccgactggcacctgaagatgcccaaggtgaagatgcccaagttcagcatgcccggcttcaagggcgagggccccgaggtggacgtgaacctgcccaaggccgacatcgacgtgagcggccccaaggtggacatcgacacccccgacatcgacatccacggccccgagggcaagctgaagggccccaagttcaagatgcccgacctgcacctgaaggcccccaagatcagcatgcccgaggtggacctgaacctgaagggccccaagatgaagggcgacgtggacgtgagcctgcccaaggtggagggcgacctgaagggccccgaggtggacatcaagggccccaaggtggacatcgacgtgcccgacgtggacgtgcagggccccgactggcacctgaagatgcccaaggtgaagatgcccaagttcagcatgcccggcttcaagggcgagggccccgacgtggacgtgaacctgcccaaggccgacctggacgtgagcggccccaaggtggacatcgacgtgcccgacgtgaacatcgagggccccgacgccaagctgaagggccccaagttcaagatgcccgagatgaacatcaaggcccccaagatcagcatgcccgacttcgacctgcacctgaagggccccaaggtgaagggcgacgtggacgtgagcctgcccaaggtggagggcgacctgaagggccccgaggtggacatcaagggccccaaggtggacatcgacgcccccgacgtggacgtgcacggccccgactggcacctgaagatgcccaaggtgaagatgcccaagttcagcatgcccggcttcaagggcgagggccccgacgtggacgtgaccctgcccaaggccgacatcgagatcagcggccccaaggtggacatcgacgcccccgacgtgagcatcgagggccccgacgccaagctgaagggccccaagttcaagatgcccgagatgaacatcaaggcccccaagatcagcatgcccgacatcgacttcaacctgaagggccccaaggtgaagggcgacgtggacgtgagcctgcccaaggtggagggcgacctgaagggccccgagatcgacatcaagggccccagcctggacatcgacacccccgacgtgaacatcgagggccccgagggcaagctgaagggccccaagttcaagatgcccgagatgaacatcaaggcccccaagatcagcatgcccgacttcgacctgcacctgaagggccccaaggtgaagggcgacgtggacgtgagcctgcccaaggtggagagcgacctgaagggccccgaggtggacatcgagggccccgagggcaagctgaagggccccaagttcaagatgcccgacgtgcacttcaagagcccccagatcagcatgagcgacatcgacctgaacctgaagggccccaagatcaagggcgacatggacatcagcgtgcccaagctggagggcgacctgaagggccccaaggtggacgtgaagggccccaaggtgggcatcgacacccccgacatcgacatccacggccccgagggcaagctgaagggccccaagttcaagatgcccgacctgcacctgaaggcccccaagatcagcatgcccgaggtggacctgaacctgaagggccccaaggtgaagggcgacatggacatcagcctgcccaaggtggagggcgacctgaagggccccgaggtggacatcagagaccccaaggtggacatcgacgtgcccgacgtggacgtgcagggccccgactggcacctgaagatgcccaaggtgaagatgcccaagttcagcatgcccggcttcaagggcgagggccccgacgtggacgtgaacctgcccaaggccgacatcgacgtgagcggccccaaggtggacgtggacgtgcccgacgtgaacatcgagggccccgacgccaagctgaagggccccaagttcaagatgcccgagatgagcatcaaggcccccaagatcagcatgcccgacatcgacctgaacctgaagggccccaaggtgaagggcgacgtggacgtgaccctgcccaaggtggagggcgacctgaagggccccgaggccgacatcaagggccccaaggtggacatcaacacccccgacgtggacgtgcacggccccgactggcacctgaagatgcccaaggtgaagatgcccaagttcagcatgcccggcttcaagggcgagggccccgacgtggacgtgagcctgcccaaggccgacatcgacgtgagcggccccaaggtggacgtggacatccccgacgtgaacatcgagggccccgacgccaagctgaagggccccaagttcaagatgcccgagatcaacatcaaggcccccaagatcagcatccccgacgtggacctggacctgaagggccccaaggtgaagggcgacttcgacgtgagcgtgcccaaggtggagggcaccctgaagggccccgaggtggacctgaagggccccagactggacttcgagggccccgacgccaagctgagcggccccagcctgaagatgcccagcctggagatcagcgcccccaaggtgaccgcccccgacgtggacctgcacctgaaggcccccaagatcggcttcagcggccccaagctggagggcggcgaggtggacctgaagggccccaaggtggaggcccccagcctggacgtgcacatggacagccccgacatcaacatcgagggccccgacgtgaagatccccaagttcaagaagcccaagttcggcttcggcgccaagagccccaaggccgacatcaagagccccagcctggacgtgaccgtgcccgaggccgagctgaacctggagacccccgagatcagcgtgggcggcaagggcaagaagagcaagttcaagatgcccaagatccacatgagcggccccaagatcaaggccaagaagcagggcttcgacctgaacgtgcccggcggcgagatcgacgccagcctgaaggcccccgacgtggacgtgaacatcgccggccccgacgccgccctgaaggtggacgtgaagagccccaagaccaagaagaccatgttcggcaagatgtacttccccgacgtggagttcgacatcaagagccccaagttcaaggccgaggcccccctgcccagccccaagctggagggcgagctgcaggcccccgacctggagctgagcctgcccgccatccacgtggagggcctggacatcaaggccaaggcccccaaggtgaagatgcccgacgtggacatcagcgtgcccaagatcgagggcgacctgaagggccccaaggtgcaggccaacctgggcgcccccgacatcaacatcgagggcctggacgccaaggtgaagacccccagcttcggcatcagcgccccccaggtgagcatccccgacgtgaacgtgaacctgaagggccccaagatcaagggcgacgtgcccagcgtgggcctggagggccccgacgtggacctgcagggccccgaggccaagatcaagttccccaagttcagcatgcccaagatcggcatccccggcgtgaagatggagggcggcggcgccgaggtgcacgcccagctgcccagcctggagggcgacctgagaggccccgacgtgaagctggagggccccgacgtgagcctgaagggccccggcgtggacctgcccagcgtgaacctgagcatgcccaaggtgagcggccccgacctggacctgaacctgaagggccccagcctgaagggcgacctggacgccagcgtgcccagcatgaaggtgcacgcccccggcctgaacctgagcggcgtgggcggcaagatgcaggtgggcggcgacggcgtgaaggtgcccggcatcgacgccaccaccaagctgaacgtgggcgcccccgacgtgaccctgagaggccccagcctgcagggcgacctggccgtgagcggcgacatcaagtgccccaaggtgagcgtgggcgcccccgacctgagcctggaggccagcgagggcagcatcaagctgcccaagatgaagctgccccagttcggcatcagcacccccggcagcgacctgcacgtgaacgccaagggcccccaggtgagcggcgagctgaagggccccggcgtggacgtgaacctgaagggccccagaatcagcgcccccaacgtggacttcaacctggagggccccaaggtgaagggcagcctgggcgccaccggcgagatcaagggccccaccgtgggcggcggcctgcccggcatcggcgtgcagggcctggagggcaacctgcagatgcccggcatcaagagcagcggctgcgacgtgaacctgcccggcgtgaacgtgaagctgcccaccggccagatcagcggccccgagatcaagggcggcctgaagggcagcgaggtgggcttccacggcgccgcccccgacatcagcgtgaagggccccgccttcaacatggccagccccgagagcgacttcggcatcaacctgaagggccccaagatcaagggcggcgccgacgtgagcggcggcgtgagcgcccccgacatcagcctgggcgagggccacctgagcgtgaagggcagcggcggcgagtggaagggcccccaggtgagcagcgccctgaacctggacaccagcaagttcgccggcggcctgcacttcagcggccccaaggtggagggcggcgtgaagggcggccagatcggcctgcaggcccccggcctgagcgtgagcggcccccagggccacctggagagcggcagcggcaaggtgaccttccccaagatgaagatccccaagttcaccttcagcggcagagagctggtgggcagagagatgggcgtggacgtgcacttccccaaggccgaggccagcatccaggccggcgccggcgacggcgagtgggaggagagcgaggtgaagctgaagaagagcaagatcaagatgcccaagttcaacttcagcaagcccaagggcaagggcggcgtgaccggcagccccgaggccagcatcagcggcagcaagggcgacctgaagagcagcaaggccagcctgggcagcctggagggcgaggccgaggccgaggccagcagccccaagggcaagttcagcctgttcaagagcaagaagcccagacacagaagcaacagcttcagcgacgagagagagttcagcggccccagcacccccaccggcaccctggagttcgagggcggcgaggtgagcctggagggcggcaaggtgaagggcaagcacggcaagctgaagttcggcaccttcggcggcctgggcagcaagagcaagggccactacgaggtgaccggcagcgacgacgagaccggcaagctgcagggcagcggcgtgagcctggccagcaagaagagcagactgagcagcagcagcagcaacgacagcggcaacaaggtgggcatccagctgcccgaggtggagctgagcgtgagcaccaagaaggagtag

SEQ ID NO: 9315 - DNA, 372 bp, synthetic construct
  misc_feature 1..372: note = Description of Artificial Sequence: Synthetic coding sequence
  source 1..372: mol_type = other DNA
atggagaaggaggagaccaccagagagctgctgctgcccaactggcagggcagcggcagccacggcctgaccatcgcccagagagacgacggcgtgttcgtgcaggaggtgacccagaacagccccgccgccagaaccggcgtggtgaaggagggcgaccagatcgtgggcgccaccatctacttcgacaacctgcagagcggcgaggtgacccagctgctgaacaccatgggccaccacaccgtgggcctgaagctgcacagaaagggcgacagaagccccgagcccggccagacctggaccagagaggtgttcagcagctgcagcagcgaggtggtgctgagcggcgacgacgaggagtaccagagatag

SEQ ID NO: 9316 - DNA, 435 bp, synthetic construct
  misc_feature 1..435: note = Description of Artificial Sequence: Synthetic coding sequence
  source 1..435: mol_type = other DNA
atggagaaggaggagaccaccagagagctgctgctgcccaactggcagggcagcggcagccacggcctgaccatcgcccagagagacgacggcgtgttcgtgcaggaggtgacccagaacagccccgccgccagaaccggcgtggtgaaggagggcgaccagatcgtgggcgccaccatctacttcgacaacctgcagagcggcgaggtgacccagctgctgaacaccatgggccaccacaccgtgggcctgaagctgcacagaaagggcgacagaagccccgagcccggccagacctggaccagagaggtgttcagcagctgcagcagcgaggtggtgctgagcggcgacgacgaggagtaccagagaatctacaccaccaagatcaagcccagactgaagagcgaggacggcgtggagggcgacctgggctag

SEQ ID NO: 9317 - DNA, 261 bp, synthetic construct
  misc_feature 1..261: note = Description of Artificial Sequence: Synthetic coding sequence
  source 1..261: mol_type = other DNA
atggagaaggaggagaccaccagagagctgctgctgcccaactggcagggcagcggcagccacggcctgaccatcgcccagagagacgacggcgtgttcgtgcaggaggtgacccagaacagccccgccgccagaaccggcgtggtgaaggagggcgaccagatcgtgggcgccaccatctacttcgacaacctgcagagcggcgaggtgacccagctgctgaacaccatgggccaccacaccgtgggcctgaagctgtag

SEQ ID NO: 9318 - DNA, 366 bp, synthetic construct
  misc_feature 1..366: note = Description of Artificial Sequence: Synthetic coding sequence
  source 1..366: mol_type = other DNA
atggagaaggaggagaccaccagagagctgctgctgcccaactggcagggcagcggcagccacggcctgaccatcgcccagagagacgacggcgtgttcgtgcaggaggtgacccagaacagccccgccgccagaaccggcgtggtgaaggagggcgaccagatcgtgggcgccaccatctacttcgacaacctgcagagcggcgaggtgacccagctgctgaacaccatgggccaccacaccgtgggcctgaagctgcacagaaagggcgacagaagccccgagcccggccagacctggaccagagaggtgttcagcagctgcagcagcgaggtggtgctgaacaccccccagcccagcgcctag

SEQ ID NO: 9319 - DNA, 2904 bp, synthetic construct
  misc_feature 1..2904: note = Description of Artificial Sequence: Synthetic coding sequence
  source 1..2904: mol_type = other DNA
atggccaagggcttctacatcagcaagagcctgggcatcctgggcatcctgctgggcgtggccgccgtgtgcaccatcatcgccctgagcgtggtgtacagccaggagaagaacaagaacgccaacagcagccccgtggccagcaccacccccagcgccagcgccaccaccaaccccgccagcgccaccaccctggaccagagcaaggcctggaacagatacagactgcccaacaccctgaagcccgacagctacagagtgaccctgagaccctacctgacccccaacgacagaggcctgtacgtgttcaagggcagcagcaccgtgagattcacctgcaaggaggccaccgacgtgatcatcatccacagcaagaagctgaactacaccctgagccagggccacagagtggtgctgagaggcgtgggcggcagccagccccccgacatcgacaagaccgagctggtggagcccaccgagtacctggtggtgcacctgaagggcagcctggtgaaggacagccagtacgagatggacagcgagttcgagggcgagctggccgacgacctggccggcttctacagaagcgagtacatggagggcaacgtgagaaaggtggtggccaccacccagatgcaggccgccgacgccagaaagagcttcccctgcttcgacgagcccgccatgaaggccgagttcaacatcaccctgatccaccccaaggacctgaccgccctgagcaacatgctgcccaagggccccagcacccccctgcccgaggaccccaactggaacgtgaccgagttccacaccacccccaagatgagcacctacctgctggccttcatcgtgagcgagttcgactacgtggagaagcaggccagcaacggcgtgctgatcagaatctgggccagacccagcgccatcgccgccggccacggcgactacgccctgaacgtgaccggccccatcctgaacttcttcgccggccactacgacaccccctaccccctgcccaagagcgaccagatcggcctgcccgacttcaacgccggcgccatggagaactggggcctggtgacctacagagagaacagcctgctgttcgaccccctgagcagcagcagcagcaacaaggagagagtggtgaccgtgatcgcccacgagctggcccaccagtggttcggcaacctggtgaccatcgagtggtggaacgacctgtggctgaacgagggcttcgccagctacgtggagtacctgggcgccgactacgccgagcccacctggaacctgaaggacctgatggtgctgaacgacgtgtacagagtgatggccgtggacgccctggccagcagccaccccctgagcacccccgccagcgagatcaacacccccgcccagatcagcgagctgttcgacgccatcagctacagcaagggcgccagcgtgctgagaatgctgagcagcttcctgagcgaggacgtgttcaagcagggcctggccagctacctgcacaccttcgcctaccagaacaccatctacctgaacctgtgggaccacctgcaggaggccgtgaacaacagaagcatccagctgcccaccaccgtgagagacatcatgaacagatggaccctgcagatgggcttccccgtgatcaccgtggacaccagcaccggcaccctgagccaggagcacttcctgctggaccccgacagcaacgtgaccagacccagcgagttcaactacgtgtggatcgtgcccatcaccagcatcagagacggcagacagcagcaggactactggctgatcgacgtgagagcccagaacgacctgttcagcaccagcggcaacgagtgggtgctgctgaacctgaacgtgaccggctactacagagtgaactacgacgaggagaactggagaaagatccagacccagctgcagagagaccacagcgccatccccgtgatcaacagagcccagatcatcaacgacgccttcaacctggccagcgcccacaaggtgcccgtgaccctggccctgaacaacaccctgttcctgatcgaggagagacagtacatgccctgggaggccgccctgagcagcctgagctacttcaagctgatgttcgacagaagcgaggtgtacggccccatgaagaactacctgaagaagcaggtgacccccctgttcatccacttcagaaacaacaccaacaactggagagagatccccgagaacctgatggaccagtacagcgaggtgaacgccatcagcaccgcctgcagcaacggcgtgcccgagtgcgaggagatggtgagcggcctgttcaagcagtggatggagaaccccaacaacaaccccatccaccccaacctgagaagcaccgtgtactgcaacgccatcgcccagggcggcgaggaggagtgggacttcgcctgggagcagttcagaaacgccaccctggtgaacgaggccgacaagctgagagccgccctggcctgcagcaaggagctgtggatcctgaacagatacctgagctacaccctgaaccccgacctgatcagaaagcaggacgccaccagcaccatcatcagcatcaccaacaacgtgatcggccagggcctggtgtgggacttcgtgcagagcaactggaagaagctgttcaacgactacggcggcggcagcttcagcttcagcaacctgatccaggccgtgaccagaagattcagcaccgagtacgagctgcagcagctggagcagttcaagaaggacaacgaggagaccggcttcggcagcggcaccagagccctggagcaggccctggagaagaccaaggccaacatcaagtgggtgaaggagaacaaggaggtggtgctgcagtggttcaccgagaacagcaagtag

SEQ ID NO: 9320 - DNA, 312 bp, synthetic construct
  misc_feature 1..312: note = Description of Artificial Sequence: Synthetic coding sequence
  source 1..312: mol_type = other DNA
atggccaagggcttctacatcagcaagagcctgggcatcctgggcatcctgctgggcgtggccgccgtgtgcaccatcatcgccctgagcgtggtgtacagccaggagaagaacaagaacgccaacagcagccccgtggccagcaccacccccagcgccagcgccaccaccaaccccgccagcgccaccaccctggaccagagcaaggcctggaacagatacagactgcccaacaccctgaagcccgacagctacagagtgaccctgagaccctacctgacccccaacgacagaggcctgtacgtgttctag

SEQ ID NO: 9321 - DNA, 186 bp, synthetic construct
  misc_feature 1..186: note = Description of Artificial Sequence: Synthetic coding sequence
  source 1..186: mol_type = other DNA
atggccaagggcttctacatcagcaagagcctgggcatcctgggcatcctgctgggcgtggccgccgtgtgcaccatcatcgccctgagcgtggtgtacagccaggagaagaacaagaacgccaacagcagccccgtggccagcaccacccccagcgccagcgccaccaccaaccccgccagctag

SEQ ID NO: 9322 - DNA, 381 bp, synthetic construct
  misc_feature 1..381: note = Description of Artificial Sequence: Synthetic coding sequence
  source 1..381: mol_type = other DNA
atgaaccagaacaccgacaagatcagcggcagcggcagcaacagcgacatgatggagaacagcaaggaggagggcaccagcagcagcgagaagagcaagagcagcggcagcagcagaagcaagagaaagcccagcatcgtgaccaagtacgtggagagcgacgacgagaagcccctggacgacgagaccgtgaacgaggacgccagcaacgagaacagcgagaacgacatcaccatgcagagcctgcccaagggcaccgtgatcgtgcagcccgagcccgtgctgaacgaggacaaggacgacttcaagggccccgagttcagaagcagaagcaagatgaagaccgagaacctgaagaagagaggcggcaagtacaagtag

SEQ ID NO: 9323 - DNA, 7479 bp, synthetic construct
  misc_feature 1..7479: note = Description of Artificial Sequence: Synthetic coding sequence
  source 1..7479: mol_type = other DNA
atgaccgccgagcccatgagcgagagcaagctgaacaccctggtgcagaagctgcacgacttcctggcccacagcagcgaggagagcgaggagaccagcagcccccccagactggccatgaaccagaacaccgacaagatcagcggcagcggcagcaacagcgacatgatggagaacagcaaggaggagggcaccagcagcagcgagaagagcaagagcagcggcagcagcagaagcaagagaaagcccagcatcgtgaccaagtacgtggagagcgacgacgagaagcccctggacgacgagaccgtgaacgaggacgccagcaacgagaacagcgagaacgacatcaccatgcagagcctgcccaagggcaccgtgatcgtgcagcccgagcccgtgctgaacgaggacaaggacgacttcaagggccccgagttcagaagcagaagcaagatgaagaccgagaacctgaagaagagaggcgaggacggcctgcacggcatcgtgagctgcaccgcctgcggccagcaggtgaaccacttccagaaggacagcatctacagacaccccagcctgcaggtgctgatctgcaagaactgcttcaagtactacatgagcgacgacatcagcagagacagcgacggcatggacgagcagtgcagatggtgcgccgagggcggcaacctgatctgctgcgacttctgccacaacgccttctgcaagaagtgcatcctgagaaacctgggcagaaaggagctgagcaccatcatggacgagaacaaccagtggtactgctacatctgccaccccgagcccctgctggacctggtgaccgcctgcaacagcgtgttcgagaacctggagcagctgctgcagcagaacaagaagaagatcaaggtggacagcgagaagagcaacaaggtgtacgagcacaccagcagattcagccccaagaagaccagcagcaactgcaacggcgaggagaagaagctggacgacagctgcagcggcagcgtgacctacagctacagcgccctgatcgtgcccaaggagatgatcaagaaggccaagaagctgatcgagaccaccgccaacatgaacagcagctacgtgaagttcctgaagcaggccaccgacaacagcgagatcagcagcgccaccaagctgagacagctgaaggccttcaagagcgtgctggccgacatcaagaaggcccacctggccctggaggaggacctgaacagcgagttcagagccatggacgccgtgaacaaggagaagaacaccaaggagcacaaggtgatcgacgccaagttcgagaccaaggccagaaagggcgagaagccctgcgccctggagaagaaggacatcagcaagagcgaggccaagctgagcagaaagcaggtggacagcgagcacatgcaccagaacgtgcccaccgaggagcagagaaccaacaagagcaccggcggcgagcacaagaagagcgacagaaaggaggagccccagtacgagcccgccaacaccagcgaggacctggacatggacatcgtgagcgtgcccagcagcgtgcccgaggacatcttcgagaacctggagaccgccatggaggtgcagagcagcgtggaccaccagggcgacggcagcagcggcaccgagcaggaggtggagagcagcagcgtgaagctgaacatcagcagcaaggacaacagaggcggcatcaagagcaagaccaccgccaaggtgaccaaggagctgtacgtgaagctgacccccgtgagcctgagcaacagccccatcaagggcgccgactgccaggaggtgccccaggacaaggacggctacaagagctgcggcctgaaccccaagctggagaagtgcggcctgggccaggagaacagcgacaacgagcacctggtggagaacgaggtgagcctgctgctggaggagagcgacctgagaagaagccccagagtgaagaccacccccctgagaagacccaccgagaccaaccccgtgaccagcaacagcgacgaggagtgcaacgagaccgtgaaggagaagcagaagctgagcgtgcccgtgagaaagaaggacaagagaaacagcagcgacagcgccatcgacaaccccaagcccaacaagctgcccaagagcaagcagagcgagaccgtggaccagaacagcgacagcgacgagatgctggccatcctgaaggaggtgagcagaatgagccacagcagcagcagcgacaccgacatcaacgagatccacaccaaccacaagaccctgtacgacctgaagacccaggccggcaaggacgacaagggcaagagaaagagaaagagcagcaccagcggcagcgacttcgacaccaagaagggcaagagcgccaagagcagcatcatcagcaagaagaagagacagacccagagcgagagcagcaactacgacagcgagctggagaaggagatcaagagcatgagcaagatcggcgccgccagaaccaccaagaagagaatccccaacaccaaggacttcgacagcagcgaggacgagaagcacagcaagaagggcatggacaaccagggccacaagaacctgaagaccagccaggagggcagcagcgacgacgccgagagaaagcaggagagagagaccttcagcagcgccgagggcaccgtggacaaggacaccaccatcatggagctgagagacagactgcccaagaagcagcaggccagcgccagcaccgacggcgtggacaagctgagcggcaaggagcagagcttcaccagcctggaggtgagaaaggtggccgagaccaaggagaagagcaagcacctgaagaccaagacctgcaagaaggtgcaggacggcctgagcgacatcgccgagaagttcctgaagaaggaccagagcgacgagaccagcgaggacgacaagaagcagagcaagaagggcaccgaggagaagaagaagcccagcgacttcaagaagaaggtgatcaagatggagcagcagtacgagagcagcagcgacggcaccgagaagctgcccgagagagaggagatctgccacttccccaagggcatcaagcagatcaagaacggcaccaccgacggcgagaagaagagcaagaagatcagagacaagaccagcaagaagaaggacgagctgagcgactacgccgagaagagcaccggcaagggcgacagctgcgacagcagcgaggacaagaagagcaagaacggcgcctacggcagagagaagaagagatgcaagctgctgggcaagagcagcagaaagagacaggactgcagcagcagcgacaccgagaagtacagcatgaaggaggacggctgcaacagcagcgacaagagactgaagagaatcgagctgagagagagaagaaacctgagcagcaagagaaacaccaaggagatccagagcggcagcagcagcagcgacgccgaggagagcagcgaggacaacaagaagaagaagcagagaaccagcagcaagaagaaggccgtgatcgtgaaggagaagaagagaaacagcctgagaaccagcaccaagagaaagcaggccgacatcaccagcagcagcagcagcgacatcgaggacgacgaccagaacagcatcggcgagggcagcagcgacgagcagaagatcaagcccgtgaccgagaacctggtgctgagcagccacaccggcttctgccagagcagcggcgacgaggccctgagcaagagcgtgcccgtgaccgtggacgacgacgacgacgacaacgaccccgagaacagaatcgccaagaagatgctgctggaggagatcaaggccaacctgagcagcgacgaggacggcagcagcgacgacgagcccgaggagggcaagaagagaaccggcaagcagaacgaggagaaccccggcgacgaggaggccaagaaccaggtgaacagcgagagcgacagcgacagcgaggagagcaagaagcccagatacagacacagactgctgagacacaagctgaccgtgagcgacggcgagagcggcgaggagaagaagaccaagcccaaggagcacaaggaggtgaagggcagaaacagaagaaaggtgagcagcgaggacagcgaggacagcgacttccaggagagcggcgtgagcgaggaggtgagcgagagcgaggacgagcagagacccagaaccagaagcgccaagaaggccgagctggaggagaaccagagaagctacaagcagaagaagaagagaagaagaatcaaggtgcaggaggacagcagcagcgagaacaagagcaacagcgaggaggaggaggaggagaaggaggaggaggaggaggaggaggaggaggaggaggaggaggaggaggacgagaacgacgacagcaagagccccggcaagggcagaaagaagatcagaaagatcctgaaggacgacaagctgagaaccgagacccagaacgccctgaaggaggaggaggagagaagaaagagaatcgccgagagagagagagagagagagaagctgagagaggtgatcgagatcgaggacgccagccccaccaagtgccccatcaccaccaagctggtgctggacgaggacgaggagaccaaggagcccctggtgcaggtgcacagaaacatggtgatcaagctgaagccccaccaggtggacggcgtgcagttcatgtgggactgctgctgcgagagcgtgaagaagaccaagaagagccccggcagcggctgcatcctggcccactgcatgggcctgggcaagaccctgcaggtggtgagcttcctgcacaccgtgctgctgtgcgacaagctggacttcagcaccgccctggtggtgtgccccctgaacaccgccctgaactggatgaacgagttcgagaagtggcaggagggcctgaaggacgacgagaagctggaggtgagcgagctggccaccgtgaagagaccccaggagagaagctacatgctgcagagatggcaggaggacggcggcgtgatgatcatcggctacgagatgtacagaaacctggcccagggcagaaacgtgaagagcagaaagctgaaggagatcttcaacaaggccctggtggaccccggccccgacttcgtggtgtgcgacgagggccacatcctgaagaacgaggccagcgccgtgagcaaggccatgaacagcatcagaagcagaagaagaatcatcctgaccggcacccccctgcagaacaacctgatcgagtaccactgcatggtgaacttcatcaaggagaacctgctgggcagcatcaaggagttcagaaacagattcatcaaccccatccagaacggccagtgcgccgacagcaccatggtggacgtgagagtgatgaagaagagagcccacatcctgtacgagatgctggccggctgcgtgcagagaaaggactacaccgccctgaccaagttcctgccccccaagcacgagtacgtgctggccgtgagaatgaccagcatccagtgcaagctgtaccagtactacctggaccacctgaccggcgtgggcaacaacagcgagggcggcagaggcaaggccggcgccaagctgttccaggacttccagatgctgagcagaatctggacccacccctggtgcctgcagctggactacatcagcaaggagaacaagggctacttcgacgaggacagcatggacgagttcatcgccagcgacagcgacgagaccagcatgagcctgagcagcgacgactacaccaagaagaagaagaagggcaagaagggcaagaaggacagcagcagcagcggcagcggcagcgacaacgacgtggaggtgatcaaggtgtggaacagcagaagcagaggcggcggcgagggcaacgtggacgagaccggcaacaaccccagcgtgagcctgaagctggaggagagcaaggccaccagcagcagcaaccccagcagccccgcccccgactggtacaaggacttcgtgaccgacgccgacgccgaggtgctggagcacagcggcaagatggtgctgctgttcgagatcctgagaatggccgaggagatcggcgacaaggtgctggtgttcagccagagcctgatcagcctggacctgatcgaggacttcctggagctggccagcagagagaagaccgaggacaaggacaagcccctgatctacaagggcgagggcaagtggctgagaaacatcgactactacagactggacggcagcaccaccgcccagagcagaaagaagtgggccgaggagttcaacgacgagaccaacgtgagaggcagactgttcatcatcagcaccaaggccggcagcctgggcatcaacctggtggccgccaacagagtgatcatcttcgacgccagctggaaccccagctacgacatccagagcatcttcagagtgtacagattcggccagaccaagcccgtgtacgtgtacagattcctggcccagggcaccatggaggacaagatctacgacagacaggtgaccaagcagagcctgagcttcagagtggtggaccagcagcaggtggagagacacttcaccatgaacgagctgaccgagctgtacaccttcgagcccgacctgctggacgaccccaacagcgagaagaagaagaagagagacacccccatgctgcccaaggacaccatcctggccgagctgctgcagatccacaaggagcacatcgtgggctaccacgagcacgacagcctgctggaccacaaggaggaggaggagctgaccgaggaggagagaaaggccgcctgggccgagtacgaggccgagaagaagggcctgaccatgagattcaacatccccaccggcaccaacctgccccccgtgagcttcaacagccagaccccctacatccccttcaacctgggcgccctgagcgccatgagcaaccagcagctggaggacctgatcaaccagggcagagagaaggtggtggaggccaccaacagcgtgaccgccgtgagaatccagcccctggaggacatcatcagcgccgtgtggaaggagaacatgaacctgagcgaggcccaggtgcaggccctggccctgagcagacaggccagccaggagctggacgtgaagagaagagaggccatctacaacgacgtgctgaccaagcagcagatgctgatcagctgcgtgcagagaatcctgatgaacagaagactgcagcagcagtacaaccagcagcagcagcagcagatgacctaccagcaggccaccctgggccacctgatgatgcccaagccccccaacctgatcatgaaccccagcaactaccagcagatcgacatgagaggcatgtaccagcccgtggccggcggcatgcagcccccccccctgcagagagcccccccccccatgagaagcaagaaccccggccccagccagggcaagagcatgtag

SEQ ID NO: 9324 - DNA, 7365 bp, synthetic construct
  misc_feature 1..7365: note = Description of Artificial Sequence: Synthetic coding sequence
  source 1..7365: mol_type = other DNA
atgaccgccgagcccatgagcgagagcaagctgaacaccctggtgcagaagctgcacgacttcctggcccacagcagcgaggagagcgaggagaccagcagcccccccagactggccatgaaccagaacaccgacaagatcagcggcagcggcagcaacagcgacatgatggagaacagcaaggaggagggcaccagcagcagcgagaagagcaagagcagcggcagcagcagaagcaagagaaagcccagcatcgtgaccaagtacgtggagagcgacgacgagaagcccctggacgacgagaccgtgaacgaggacgccagcaacgagaacagcgagaacgacatcaccatgcagagcctgcccaaggaggacggcctgcacggcatcgtgagctgcaccgcctgcggccagcaggtgaaccacttccagaaggacagcatctacagacaccccagcctgcaggtgctgatctgcaagaactgcttcaagtactacatgagcgacgacatcagcagagacagcgacggcatggacgagcagtgcagatggtgcgccgagggcggcaacctgatctgctgcgacttctgccacaacgccttctgcaagaagtgcatcctgagaaacctgggcagaaaggagctgagcaccatcatggacgagaacaaccagtggtactgctacatctgccaccccgagcccctgctggacctggtgaccgcctgcaacagcgtgttcgagaacctggagcagctgctgcagcagaacaagaagaagatcaaggtggacagcgagaagagcaacaaggtgtacgagcacaccagcagattcagccccaagaagaccagcagcaactgcaacggcgaggagaagaagctggacgacagctgcagcggcagcgtgacctacagctacagcgccctgatcgtgcccaaggagatgatcaagaaggccaagaagctgatcgagaccaccgccaacatgaacagcagctacgtgaagttcctgaagcaggccaccgacaacagcgagatcagcagcgccaccaagctgagacagctgaaggccttcaagagcgtgctggccgacatcaagaaggcccacctggccctggaggaggacctgaacagcgagttcagagccatggacgccgtgaacaaggagaagaacaccaaggagcacaaggtgatcgacgccaagttcgagaccaaggccagaaagggcgagaagccctgcgccctggagaagaaggacatcagcaagagcgaggccaagctgagcagaaagcaggtggacagcgagcacatgcaccagaacgtgcccaccgaggagcagagaaccaacaagagcaccggcggcgagcacaagaagagcgacagaaaggaggagccccagtacgagcccgccaacaccagcgaggacctggacatggacatcgtgagcgtgcccagcagcgtgcccgaggacatcttcgagaacctggagaccgccatggaggtgcagagcagcgtggaccaccagggcgacggcagcagcggcaccgagcaggaggtggagagcagcagcgtgaagctgaacatcagcagcaaggacaacagaggcggcatcaagagcaagaccaccgccaaggtgaccaaggagctgtacgtgaagctgacccccgtgagcctgagcaacagccccatcaagggcgccgactgccaggaggtgccccaggacaaggacggctacaagagctgcggcctgaaccccaagctggagaagtgcggcctgggccaggagaacagcgacaacgagcacctggtggagaacgaggtgagcctgctgctggaggagagcgacctgagaagaagccccagagtgaagaccacccccctgagaagacccaccgagaccaaccccgtgaccagcaacagcgacgaggagtgcaacgagaccgtgaaggagaagcagaagctgagcgtgcccgtgagaaagaaggacaagagaaacagcagcgacagcgccatcgacaaccccaagcccaacaagctgcccaagagcaagcagagcgagaccgtggaccagaacagcgacagcgacgagatgctggccatcctgaaggaggtgagcagaatgagccacagcagcagcagcgacaccgacatcaacgagatccacaccaaccacaagaccctgtacgacctgaagacccaggccggcaaggacgacaagggcaagagaaagagaaagagcagcaccagcggcagcgacttcgacaccaagaagggcaagagcgccaagagcagcatcatcagcaagaagaagagacagacccagagcgagagcagcaactacgacagcgagctggagaaggagatcaagagcatgagcaagatcggcgccgccagaaccaccaagaagagaatccccaacaccaaggacttcgacagcagcgaggacgagaagcacagcaagaagggcatggacaaccagggccacaagaacctgaagaccagccaggagggcagcagcgacgacgccgagagaaagcaggagagagagaccttcagcagcgccgagggcaccgtggacaaggacaccaccatcatggagctgagagacagactgcccaagaagcagcaggccagcgccagcaccgacggcgtggacaagctgagcggcaaggagcagagcttcaccagcctggaggtgagaaaggtggccgagaccaaggagaagagcaagcacctgaagaccaagacctgcaagaaggtgcaggacggcctgagcgacatcgccgagaagttcctgaagaaggaccagagcgacgagaccagcgaggacgacaagaagcagagcaagaagggcaccgaggagaagaagaagcccagcgacttcaagaagaaggtgatcaagatggagcagcagtacgagagcagcagcgacggcaccgagaagctgcccgagagagaggagatctgccacttccccaagggcatcaagcagatcaagaacggcaccaccgacggcgagaagaagagcaagaagatcagagacaagaccagcaagaagaaggacgagctgagcgactacgccgagaagagcaccggcaagggcgacagctgcgacagcagcgaggacaagaagagcaagaacggcgcctacggcagagagaagaagagatgcaagctgctgggcaagagcagcagaaagagacaggactgcagcagcagcgacaccgagaagtacagcatgaaggaggacggctgcaacagcagcgacaagagactgaagagaatcgagctgagagagagaagaaacctgagcagcaagagaaacaccaaggagatccagagcggcagcagcagcagcgacgccgaggagagcagcgaggacaacaagaagaagaagcagagaaccagcagcaagaagaaggccgtgatcgtgaaggagaagaagagaaacagcctgagaaccagcaccaagagaaagcaggccgacatcaccagcagcagcagcagcgacatcgaggacgacgaccagaacagcatcggcgagggcagcagcgacgagcagaagatcaagcccgtgaccgagaacctggtgctgagcagccacaccggcttctgccagagcagcggcgacgaggccctgagcaagagcgtgcccgtgaccgtggacgacgacgacgacgacaacgaccccgagaacagaatcgccaagaagatgctgctggaggagatcaaggccaacctgagcagcgacgaggacggcagcagcgacgacgagcccgaggagggcaagaagagaaccggcaagcagaacgaggagaaccccggcgacgaggaggccaagaaccaggtgaacagcgagagcgacagcgacagcgaggagagcaagaagcccagatacagacacagactgctgagacacaagctgaccgtgagcgacggcgagagcggcgaggagaagaagaccaagcccaaggagcacaaggaggtgaagggcagaaacagaagaaaggtgagcagcgaggacagcgaggacagcgacttccaggagagcggcgtgagcgaggaggtgagcgagagcgaggacgagcagagacccagaaccagaagcgccaagaaggccgagctggaggagaaccagagaagctacaagcagaagaagaagagaagaagaatcaaggtgcaggaggacagcagcagcgagaacaagagcaacagcgaggaggaggaggaggagaaggaggaggaggaggaggaggaggaggaggaggaggaggaggaggaggacgagaacgacgacagcaagagccccggcaagggcagaaagaagatcagaaagatcctgaaggacgacaagctgagaaccgagacccagaacgccctgaaggaggaggaggagagaagaaagagaatcgccgagagagagagagagagagagaagctgagagaggtgatcgagatcgaggacgccagccccaccaagtgccccatcaccaccaagctggtgctggacgaggacgaggagaccaaggagcccctggtgcaggtgcacagaaacatggtgatcaagctgaagccccaccaggtggacggcgtgcagttcatgtgggactgctgctgcgagagcgtgaagaagaccaagaagagccccggcagcggctgcatcctggcccactgcatgggcctgggcaagaccctgcaggtggtgagcttcctgcacaccgtgctgctgtgcgacaagctggacttcagcaccgccctggtggtgtgccccctgaacaccgccctgaactggatgaacgagttcgagaagtggcaggagggcctgaaggacgacgagaagctggaggtgagcgagctggccaccgtgaagagaccccaggagagaagctacatgctgcagagatggcaggaggacggcggcgtgatgatcatcggctacgagatgtacagaaacctggcccagggcagaaacgtgaagagcagaaagctgaaggagatcttcaacaaggccctggtggaccccggccccgacttcgtggtgtgcgacgagggccacatcctgaagaacgaggccagcgccgtgagcaaggccatgaacagcatcagaagcagaagaagaatcatcctgaccggcacccccctgcagaacaacctgatcgagtaccactgcatggtgaacttcatcaaggagaacctgctgggcagcatcaaggagttcagaaacagattcatcaaccccatccagaacggccagtgcgccgacagcaccatggtggacgtgagagtgatgaagaagagagcccacatcctgtacgagatgctggccggctgcgtgcagagaaaggactacaccgccctgaccaagttcctgccccccaagcacgagtacgtgctggccgtgagaatgaccagcatccagtgcaagctgtaccagtactacctggaccacctgaccggcgtgggcaacaacagcgagggcggcagaggcaaggccggcgccaagctgttccaggacttccagatgctgagcagaatctggacccacccctggtgcctgcagctggactacatcagcaaggagaacaagggctacttcgacgaggacagcatggacgagttcatcgccagcgacagcgacgagaccagcatgagcctgagcagcgacgactacaccaagaagaagaagaagggcaagaagggcaagaaggacagcagcagcagcggcagcggcagcgacaacgacgtggaggtgatcaaggtgtggaacagcagaagcagaggcggcggcgagggcaacgtggacgagaccggcaacaaccccagcgtgagcctgaagctggaggagagcaaggccaccagcagcagcaaccccagcagccccgcccccgactggtacaaggacttcgtgaccgacgccgacgccgaggtgctggagcacagcggcaagatggtgctgctgttcgagatcctgagaatggccgaggagatcggcgacaaggtgctggtgttcagccagagcctgatcagcctggacctgatcgaggacttcctggagctggccagcagagagaagaccgaggacaaggacaagcccctgatctacaagggcgagggcaagtggctgagaaacatcgactactacagactggacggcagcaccaccgcccagagcagaaagaagtgggccgaggagttcaacgacgagaccaacgtgagaggcagactgttcatcatcagcaccaaggccggcagcctgggcatcaacctggtggccgccaacagagtgatcatcttcgacgccagctggaaccccagctacgacatccagagcatcttcagagtgtacagattcggccagaccaagcccgtgtacgtgtacagattcctggcccagggcaccatggaggacaagatctacgacagacaggtgaccaagcagagcctgagcttcagagtggtggaccagcagcaggtggagagacacttcaccatgaacgagctgaccgagctgtacaccttcgagcccgacctgctggacgaccccaacagcgagaagaagaagaagagagacacccccatgctgcccaaggacaccatcctggccgagctgctgcagatccacaaggagcacatcgtgggctaccacgagcacgacagcctgctggaccacaaggaggaggaggagctgaccgaggaggagagaaaggccgcctgggccgagtacgaggccgagaagaagggcctgaccatgagattcaacatccccaccggcaccaacctgccccccgtgagcttcaacagccagaccccctacatccccttcaacctgggcgccctgagcgccatgagcaaccagcagctggaggacctgatcaaccagggcagagagaaggtggtggaggccaccaacagcgtgaccgccgtgagaatccagcccctggaggacatcatcagcgccgtgtggaaggagaacatgaacctgagcgaggcccaggtgcaggccctggccctgagcagacaggccagccaggagctggacgtgaagagaagagaggccatctacaacgacgtgctgaccaagcagcagatgctgatcagctgcgtgcagagaatcctgatgaacagaagactgcagcagcagtacaaccagcagcagcagcagcagatgacctaccagcaggccaccctgggccacctgatgatgcccaagccccccaacctgatcatgaaccccagcaactaccagcagatcgacatgagaggcatgtaccagcccgtggccggcggcatgcagcccccccccctgcagagagcccccccccccatgagaagcaagaaccccggccccagccagggcaagagcatgtag

SEQ ID NO: 9325 - DNA, 369 bp, synthetic construct
  misc_feature 1..369: note = Description of Artificial Sequence: Synthetic coding sequence
  source 1..369: mol_type = other DNA
atcaactacaacagagacaagatcagcggcagcggcagcaacagcgacatgatggagaacagcaaggaggagggcaccagcagcagcgagaagagcaagagcagcggcagcagcagaagcaagagaaagcccagcatcgtgaccaagtacgtggagagcgacgacgagaagcccctggacgacgagaccgtgaacgaggacgccagcaacgagaacagcgagaacgacatcaccatgcagagcctgcccaagggcaccgtgatcgtgcagcccgagcccgtgctgaacgaggacaaggacgacttcaagggccccgagttcagaagcagaagcaagatgaagaccgagaacctgaagaagagaggctag

SEQ ID NO: 9326 - DNA, 4038 bp, synthetic construct
  misc_feature 1..4038: note = Description of Artificial Sequence: Synthetic coding sequence
  source 1..4038: mol_type = other DNA
atgagcgagagcaagctgaacaccctggtgcagaagctgcacgacttcctggcccacagcagcgaggagagcgaggagaccagcagcccccccagactggccatgaaccagaacaccgacaagatcagcggcagcggcagcaacagcgacatgatggagaacagcaaggaggagggcaccagcagcagcgagaagagcaagagcagcggcagcagcagaagcaagagaaagcccagcatcgtgaccaagtacgtggagagcgacgacgagaagcccctggacgacgagaccgtgaacgaggacgccagcaacgagaacagcgagaacgacatcaccatgcagagcctgcccaaggacggcctgcacggcatcgtgagctgcaccgcctgcggccagcaggtgaaccacttccagaaggacagcatctacagacaccccagcctgcaggtgctgatctgcaagaactgcttcaagtactacatgagcgacgacatcagcagagacagcgacggcatggacgagcagtgcagatggtgcgccgagggcggcaacctgatctgctgcgacttctgccacaacgccttctgcaagaagtgcatcctgagaaacctgggcagaaaggagctgagcaccatcatggacgagaacaaccagtggtactgctacatctgccaccccgagcccctgctggacctggtgaccgcctgcaacagcgtgttcgagaacctggagcagctgctgcagcagaacaagaagaagatcaaggtggacagcgagaagagcaacaaggtgtacgagcacaccagcagattcagccccaagaagaccagcagcaactgcaacggcgaggagaagaagctggacgacagctgcagcggcagcgtgacctacagctacagcgccctgatcgtgcccaaggagatgatcaagaaggccaagaagctgatcgagaccaccgccaacatgaacagcagctacgtgaagttcctgaagcaggccaccgacaacagcgagatcagcagcgccaccaagctgagacagctgaaggccttcaagagcgtgctggccgacatcaagaaggcccacctggccctggaggaggacctgaacagcgagttcagagccatggacgccgtgaacaaggagaagaacaccaaggagcacaaggtgatcgacgccaagttcgagaccaaggccagaaagggcgagaagccctgcgccctggagaagaaggacatcagcaagagcgaggccaagctgagcagaaagcaggtggacagcgagcacatgcaccagaacgtgcccaccgaggagcagagaaccaacaagagcaccggcggcgagcacaagaagagcgacagaaaggaggagccccagtacgagcccgccaacaccagcgaggacctggacatggacatcgtgagcgtgcccagcagcgtgcccgaggacatcttcgagaacctggagaccgccatggaggtgcagagcagcgtggaccaccagggcgacggcagcagcggcaccgagcaggaggtggagagcagcagcgtgaagctgaacatcagcagcaaggacaacagaggcggcgccgactgccaggaggtgccccaggacaaggacggctacaagagctgcggcctgaaccccaagctggagaagtgcggcctgggccaggagaacagcgacaacgagcacctggtggagaacgaggtgagcctgctgctggaggagagcgacctgagaagaagccccagagtgaagaccacccccctgagaagacccaccgagaccaaccccgtgaccagcaacagcgacgaggagtgcaacgagaccgtgaaggagaagcagaagctgagcgtgcccgtgagaaagaaggacaagagaaacagcagcgacagcgccatcgacaaccccaagcccaacaagctgcccaagagcaagcagagcgagaccgtggaccagaacagcgacagcgacgagatgctggccatcctgaaggaggtgagcagaatgagccacagcagcagcagcgacaccgacatcaacgagatccacaccaaccacaagaccctgtacgacctgaagacccaggccggcaaggacgacaagggcaagagaaagagaaagagcagcaccagcggcagcgacttcgacaccaagaagggcaagagcgccaagagcagcatcatcagcaagaagaagagacagacccagagcgagagcagcaactacgacagcgagctggagaaggagatcaagagcatgagcaagatcggcgccgccagaaccaccaagaagagaatccccaacaccaaggacttcgacagcagcgaggacgagaagcacagcaagaagggcatggacaaccagggccacaagaacctgaagaccagccaggagggcagcagcgacgacgccgagagaaagcaggagagagagaccttcagcagcgccgagggcaccgtggacaaggacaccaccatcatggagctgagagacagactgcccaagaagcagcaggccagcgccagcaccgacggcgtggacaagctgagcggcaaggagcagagcttcaccagcctggaggtgagaaaggtggccgagaccaaggagaagagcaagcacctgaagaccaagacctgcaagaaggtgcaggacggcctgagcgacatcgccgagaagttcctgaagaaggaccagagcgacgagaccagcgaggacgacaagaagcagagcaagaagggcaccgaggagaagaagaagcccagcgacttcaagaagaaggtgatcaagatggagcagcagtacgagagcagcagcgacggcaccgagaagctgcccgagagagaggagatctgccacttccccaagggcatcaagcagatcaagaacggcaccaccgacggcgagaagaagagcaagaagatcagagacaagaccagcaagaagaaggacgagctgagcgactacgccgagaagagcaccggcaagggcgacagctgcgacagcagcgaggacaagaagagcaagaacggcgcctacggcagagagaagaagagatgcaagctgctgggcaagagcagcagaaagagacaggactgcagcagcagcgacaccgagaagtacagcatgaaggaggacggctgcaacagcagcgacaagagactgaagagaatcgagctgagagagagaagaaacctgagcagcaagagaaacaccaaggagatccagagcggcagcagcagcagcgacgccgaggagagcagcgaggacaacaagaagaagaagcagagaaccagcagcaagaagaaggccgtgatcgtgaaggagaagaagagaaacagcctgagaaccagcaccaagagaaagcaggccgacatcaccagcagcagcagcagcgacatcgaggacgacgaccagaacagcatcggcgagggcagcagcgacgagcagaagatcaagcccgtgaccgagaacctggtgctgagcagccacaccggcttctgccagagcagcggcgacgaggccctgagcaagagcgtgcccgtgaccgtggacgacgacgacgacgacaacgaccccgagaacagaatcgccaagaagatgctgctggaggagatcaaggccaacctgagcagcgacgaggacggcagcagcgacgacgagcccgaggagggcaagaagagaaccggcaagcagaacgaggagaaccccggcgacgaggaggccaagaaccaggtgaacagcgagagcgacagcgacagcgaggagagcaagaagcccagatacagacacagactgctgagacacaagctgaccgtgagcgacggcgagagcggcgaggagaagaagaccaagcccaaggagcacaaggaggtgaagggcagaaacagaagaaaggtgagcagcgaggacagcgaggacagcgacttccaggagagcggcgtgagcgaggaggtgagcgagagcgaggacgagcagagacccagaaccagaagcgccaagaaggccgagctggaggagaaccagagaagctag

SEQ ID NO: 9327 - DNA, 483 bp, synthetic construct
  misc_feature 1..483: note = Description of Artificial Sequence: Synthetic coding sequence
  source 1..483: mol_type = other DNA
tgacccgacttcgtggtgtgcgacgagggccacatcctgaagaacgaggccagcgccgtgagcaaggccatgaacagcatcagaagcagaagaagaatcatcctgaccggcacccccctgcagaacaacctgatcgagtaccactgcatggtgaacttcatcaaggagaacctgctgggcagcatcaaggagttcagaaacagattcatcaaccccatccagaacggccagtgcgccgacagcaccatggtggacgtgagagtgatgaagaagagagcccacatcctgtacgagatgctggccggctgcgtgcagagaaaggactacaccgccctgaccaagttcctgccccccaagcacgagtacgtgctggccgtgagaatgaccagcatccagtgcaagctgtaccagtactacctggaccacctgaccgtgctgcacctgaacaagatgggcatgctgaagagcatcaagtacttctag

SEQ ID NO: 9328 - DNA, 2514 bp, synthetic construct
  misc_feature 1..2514: note = Description of Artificial Sequence: Synthetic coding sequence
  source 1..2514: mol_type = other DNA
atgaaccacctggagggcagcgccgaggtggaggtgaccgacgaggccgccggcggcgaggtgaacgagagcgtggaggccgacctggagcaccccgaggtggaggaggagcagcagcagcccccccagcagcagcactacgtgggcagacaccagagaggcagagccctggaggacctgagagcccagctgggccaggaggaggaggagagaggcgagtgcctggccagaagcgccagcaccgagagcggcttccacaaccacaccgacaccgccgagggcgacgtgatcgccgccgccagagacggctacgacgccgagagagcccaggaccccgaggacgagagcgcctacgccgtgcagtacagacccgaggccgaggagtacaccgagcaggccgaggccgagcacgccgaggccacccacagaagagccctgcccaaccacctgcacttccacagcctggagcacgaggaggccatgaacgccgcctacagcggctacgtgtacacccacagactgttccacagaggcgaggacgagccctacagcgagccctacgccgactacggcggcctgcaggagcacgtgtacgaggagatcggcgacgcccccgagctggacgccagagacggcctgagactgtacgagcaggagagagacgaggccgccgcctacagacaggaggccctgggcgccagactgcaccactacgacgagagaagcgacggcgagagcgacagccccgagaaggaggccgagttcgccccctaccccagaatggacagctacgagcaggaggaggacatcgaccagatcgtggccgaggtgaagcagagcatgagcagccagagcctggacaaggccgccgaggacatgcccgaggccgagcaggacctggagagaccccccacccccgccggcggcagacccgacagccccggcctgcaggcccccgccggccagcagagagccgtgggccccgccggcggcggcgaggccggccagagatacagcaaggagaagagagacgccatcagcctggccatcaaggacatcaaggaggccatcgaggaggtgaagaccagaaccatcagaagcccctacacccccgacgagcccaaggagcccatctgggtgatgagacaggacatcagccccaccagagactgcgacgaccagagacccatggacggcgacagccccagccccggcagcagcagccccctgggcgccgagagcagcagcaccagcctgcaccccagcgaccccgtggaggccagcaccaacaaggagagcagaaagagcctggccagcttccccacctacgtggaggtgcccggcccctgcgaccccgaggacctgatcgacggcatcatcttcgccgccaactacctgggcagcacccagctgctgagcgacaagacccccagcaagaacgtgagaatgatgcaggcccaggaggccgtgagcagaatcaagatggcccagaagctggccaagagcagaaagaaggcccccgagggcgagagccagcccatgaccgaggtggacctgttcatcagcacccagagaatcaaggtgctgaacgccgacacccaggagaccatgatggaccaccccctgagaaccatcagctacatcgccgacatcggcaacatcgtggtgctgatggccagaagaagaatgcccagaagcaacagccaggagaacgtggaggccagccaccccagccaggacggcaagagacagtacaagatgatctgccacgtgttcgagagcgaggacgcccagctgatcgcccagagcatcggccaggccttcagcgtggcctaccaggagttcctgagagccaacggcatcaaccccgaggacctgagccagaaggagtacagcgacctgctgaacacccaggacatgtacaacgacgacctgatccacttcagcaagagcgagaactgcaaggacgtgttcatcgagaagcagaagggcgagatcctgggcgtggtgatcgtggagagcggctggggcagcatcctgcccaccgtgatcatcgccaacatgatgcacggcggccccgccgagaagagcggcaagctgaacatcggcgaccagatcatgagcatcaacggcaccagcctggtgggcctgcccctgagcacctgccagagcatcatcaagggcctgaagaaccagagcagagtgaagctgaacatcgtgagatgcccccccgtgaccaccgtgctgatcagaagacccgacctgagataccagctgggcttcagcgtgcagaacggcatcatctgcagcctgatgagaggcggcatcgccgagagaggcggcgtgagagtgggccacagaatcatcgagatcaacggccagagcgtggtggccaccccccacgagaagatcgtgcacatcctgagcaacgccgtgggcgagatccacatgaagaccatgcccgccgccatgtacagactgctgaccgcccaggagcagcccgtgtacatctag

SEQ ID NO: 9329 - DNA, 2469 bp, synthetic construct
  misc_feature 1..2469: note = Description of Artificial Sequence: Synthetic coding sequence
  source 1..2469: mol_type = other DNA
atggccgccgccgtggtggtggccgagggcgacagcgacagcagacccggccaggagctgctggtggcctggaacaccgtgagcaccggcctggtgccccccgccgccctgggcctggtgagcagcagaaccagcggcgccgtgccccccaaggaggaggagctgagagccgccgtggaggtgctgagaggccacggcctgcacagcgtgctggaggagtggttcgtggaggtgctgcagaacgacctgcaggccaacatcagccccgagttctggaacgccatcagccagtgcgagaacagcgccgacgagccccagtgcctgctgctgctgctggacgccttcggcctgctggagagcagactggacccctacctgagaagcctggagctgctggagaagtggaccagactgggcctgctgatgggcaccggcgcccagggcctgagagaggaggtgcacaccatgctgagaggcgtgctgttcttcagcacccccagaaccttccaggagatgatccagagactgtacggctgcttcctgagagtgtacatgcagagcaagagaaagggcgagggcggcaccgaccccgagctggagggcgagctggacagcagatacgccagaagaagatactacagactgctgcagagccccctgtgcgccggctgcagcagcgacaagcagcagtgctggtgcagacaggccctggagcagttccaccagctgagccaggtgctgcacagactgagcctgctggagagagtgagcgccgaggccgtgaccaccaccctgcaccaggtgaccagagagagaatggaggacagatgcagaggcgagtacgagagaagcttcctgagagagttccacaagtggatcgagagagtggtgggctggctgggcaaggtgttcctgcaggacggccccgccagacccgccagccccgaggccggcaacaccctgagaagatggagatgccacgtgcagagattcttctacagaatctacgccagcctgagaatcgaggagctgttcagcatcgtgagagacttccccgacagcagacccgccatcgaggacctgaagtactgcctggagagaaccgaccagagacagcagctgctggtgagcctgaaggccgccctggagaccagactgctgcaccccggcgtgaacacctgcgacatcatcaccctgtacatcagcgccatcaaggccctgagagtgctggaccccagcatggtgatcctggaggtggcctgcgagcccatcagaagatacctgagaaccagagaggacaccgtgagacagatcgtggccggcctgaccggcgacagcgacggcaccggcgacctggccgtggagctgagcaagaccgaccccgccagcctggagaccggccaggacagcgaggacgacagcggcgagcccgaggactgggtgcccgaccccgtggacgccgaccccggcaagagcagcagcaagagaagaagcagcgacatcatcagcctgctggtgagcatctacggcagcaaggacctgttcatcaacgagtacagaagcctgctggccgacagactgctgcaccagttcagcttcagccccgagagagagatcagaaacgtggagctgctgaagctgagattcggcgaggcccccatgcacttctgcgaggtgatgctgaaggacatggccgacagcagaagaatcaacgccaacatcagagaggaggacgagaagagacccgccgaggagcagccccccttcggcgtgtacgccgtgatcctgagcagcgagttctggccccccttcaaggacgagaagctggaggtgcccgaggacatcagagccgccctggaggcctactgcaagaagtacgagcagctgaaggccatgagaaccctgagctggaagcacaccctgggcctggtgaccatggacgtggagctggccgacagaaccctgagcgtggccgtgacccccgtgcaggccgtgatcctgctgtacttccaggaccaggccagctggaccctggaggagctgagcaaggccgtgaagatgcccgtggccctgctgagaagaagaatgagcgtgtggctgcagcagggcgtgctgagagaggagccccccggcaccttcagcgtgatcgaggaggagagaccccaggacagagacaacatggtgctgatcgacagcgacgacgagagcgacagcggcatggccagccaggccgaccagaaggaggaggagctgctgctgttctggacctacatccaggccatgctgaccaacctggagagcctgagcctggacagaatctacaacatgctgagaatgttcgtggtgaccggccccgccctggccgagatcgacctgcaggagctgcagggctacctgcagaagaaggtgagagaccagcagctggtgtacagcgccggcgtgtacagactgcccaagaactgcagctag

SEQ ID NO: 9330 - DNA, 4863 bp, synthetic construct
  misc_feature 1..4863: note = Description of Artificial Sequence: Synthetic coding sequence
  source 1..4863: mol_type = other DNA
atgggcgccatcggcctgctgtggctgctgcccctgctgctgagcaccgccgccgtgggcagcggcatgggcaccggccagagagccggcagccccgccgccggcccccccctgcagcccagagagcccctgagctacagcagactgcagagaaagagcctggccgtggacttcgtggtgcccagcctgttcagagtgtacgccagagacctgctgctgccccccagcagcagcgagctgaaggccggcagacccgaggccagaggcagcctggccctggactgcgcccccctgctgagactgctgggccccgcccccggcgtgagctggaccgccggcagccccgcccccgccgaggccagaaccctgagcagagtgctgaagggcggcagcgtgagaaagctgagaagagccaagcagctggtgctggagctgggcgaggaggccatcctggagggctgcgtgggcccccccggcgaggccgccgtgggcctgctgcagttcaacctgagcgagctgttcagctggtggatcagacagggcgagggcagactgagaatcagactgatgcccgagaagaaggccagcgaggtgggcagagagggcagactgagcgccgccatcagagccagccagcccagactgctgttccagatcttcggcaccggccacagcagcctggagagccccaccaacatgcccagccccagccccgactacttcacctggaacctgacctggatcatgaaggacagcttccccttcctgagccacagaagcagatacggcctggagtgcagcttcgacttcccctgcgagctggagtacagcccccccctgcacgacctgagaaaccagagctggagctggagaagaatccccagcgaggaggccagccagatggacctgctggacggccccggcgccgagagaagcaaggagatgcccagaggcagcttcctgctgctgaacaccagcgccgacagcaagcacaccatcctgagcccctggatgagaagcagcagcgagcactgcaccctggccgtgagcgtgcacagacacctgcagcccagcggcagatacatcgcccagctgctgccccacaacgaggccgccagagagatcctgctgatgcccacccccggcaagcacggctggaccgtgctgcagggcagaatcggcagacccgacaaccccttcagagtggccctggagtacatcagcagcggcaacagaagcctgagcgccgtggacttcttcgccctgaagaactgcagcgagggcaccagccccggcagcaagatggccctgcagagcagcttcacctgctggaacggcaccgtgctgcagctgggccaggcctgcgacttccaccaggactgcgcccagggcgaggacgagagccagatgtgcagaaagctgcccgtgggcttctactgcaacttcgaggacggcttctgcggctggacccagggcaccctgagcccccacaccccccagtggcaggtgagaaccctgaaggacgccagattccaggaccaccaggaccacgccctgctgctgagcaccaccgacgtgcccgccagcgagagcgccaccgtgaccagcgccaccttccccgcccccatcaagagcagcccctgcgagctgagaatgagctggctgatcagaggcgtgctgagaggcaacgtgagcctggtgctggtggagaacaagaccggcaaggagcagggcagaatggtgtggcacgtggccgcctacgagggcctgagcctgtggcagtggatggtgctgcccctgctggacgtgagcgacagattctggctgcagatggtggcctggtggggccagggcagcagagccatcgtggccttcgacaacatcagcatcagcctggactgctacctgaccatcagcggcgaggacaagatcctgcagaacaccgcccccaagagcagaaacctgttcgagagaaaccccaacaaggagctgaagcccggcgagaacagccccagacagacccccatcttcgaccccaccgtgcactggctgttcaccacctgcggcgccagcggcccccacggccccacccaggcccagtgcaacaacgcctaccagaacagcaacctgagcgtggaggtgggcagcgagggccccctgaagggcatccagatctggaaggtgcccgccaccgacacctacagcatcagcggctacggcgccgccggcggcaagggcggcaagaacaccatgatgagaagccacggcgtgagcgtgctgggcatcttcaacctggagaaggacgacatgctgtacatcctggtgggccagcagggcgaggacgcctgccccagcaccaaccagctgatccagaaggtgtgcatcggcgagaacaacgtgatcgaggaggagatcagagtgaacagaagcgtgcacgagtgggccggcggcggcggcggcggcggcggcgccacctacgtgttcaagatgaaggacggcgtgcccgtgcccctgatcatcgccgccggcggcggcggcagagcctacggcgccaagaccgacaccttccaccccgagagactggagaacaacagcagcgtgctgggcctgaacggcaacagcggcgccgccggcggcggcggcggctggaacgacaacaccagcctgctgtgggccggcaagagcctgcaggagggcgccaccggcggccacagctgcccccaggccatgaagaagtggggctgggagaccagaggcggcttcggcggcggcggcggcggctgcagcagcggcggcggcggcggcggctacatcggcggcaacgccgccagcaacaacgaccccgagatggacggcgaggacggcgtgagcttcatcagccccctgggcatcctgtacacccccgccctgaaggtgatggagggccacggcgaggtgaacatcaagcactacctgaactgcagccactgcgaggtggacgagtgccacatggaccccgagagccacaaggtgatctgcttctgcgaccacggcaccgtgctggccgaggacggcgtgagctgcatcgtgagccccacccccgagccccacctgcccctgagcctgatcctgagcgtggtgaccagcgccctggtggccgccctggtgctggccttcagcggcatcatgatcgtgtacagaagaaagcaccaggagctgcaggccatgcagatggagctgcagagccccgagtacaagctgagcaagctgagaaccagcaccatcatgaccgactacaaccccaactactgcttcgccggcaagaccagcagcatcagcgacctgaaggaggtgcccagaaagaacatcaccctgatcagaggcctgggccacggcgccttcggcgaggtgtacgagggccaggtgagcggcatgcccaacgaccccagccccctgcaggtggccgtgaagaccctgcccgaggtgtgcagcgagcaggacgagctggacttcctgatggaggccctgatcatcagcaagttcaaccaccagaacatcgtgagatgcatcggcgtgagcctgcagagcctgcccagattcatcctgctggagctgatggccggcggcgacctgaagagcttcctgagagagaccagacccagacccagccagcccagcagcctggccatgctggacctgctgcacgtggccagagacatcgcctgcggctgccagtacctggaggagaaccacttcatccacagagacatcgccgccagaaactgcctgctgacctgccccggccccggcagagtggccaagatcggcgacttcggcatggccagagacatctacagagccagctactacagaaagggcggctgcgccatgctgcccgtgaagtggatgccccccgaggccttcatggagggcatcttcaccagcaagaccgacacctggagcttcggcgtgctgctgtgggagatcttcagcctgggctacatgccctaccccagcaagagcaaccaggaggtgctggagttcgtgaccagcggcggcagaatggacccccccaagaactgccccggccccgtgtacagaatcatgacccagtgctggcagcaccagcccgaggacagacccaacttcgccatcatcctggagagaatcgagtactgcacccaggaccccgacgtgatcaacaccgccctgcccatcgagtacggccccctggtggaggaggaggagaaggtgcccgtgagacccaaggaccccgagggcgtgccccccctgctggtgagccagcaggccaagagagaggaggagagaagccccgccgcccccccccccctgcccaccaccagcagcggcaaggccgccaagaagcccaccgccgccgagatcagcgtgagagtgcccagaggccccgccgtggagggcggccacgtgaacatggccttcagccagagcaacccccccagcgagctgcacaaggtgcacggcagcagaaacaagcccaccagcctgtggaaccccacctacggcagctggttcaccgagaagcccaccaagaagaacaaccccatcgccaagaaggagccccacgacagaggcaacctgggcctggagggcagctgcaccgtgccccccaacgtggccaccggcagactgcccggcgccagcctgctgctggagcccagcagcctgaccgccaacatgaaggaggtgcccctgttcagactgagacacttcccctgcggcaacgtgaactacggctaccagcagcagggcctgcccctggaggccgccaccgcccccggcgccggccactacgaggacaccatcctgaagagcaagaacagcatgaaccagcccggcccctag

SEQ ID NO: 9331 - DNA, 1353 bp, synthetic construct
  misc_feature 1..1353: note = Description of Artificial Sequence: Synthetic coding sequence
  source 1..1353: mol_type = other DNA
atgggcgccatcggcctgctgtggctgctgcccctgctgctgagcaccgccgccgtgggcagcggcatgggcaccggccagagagccggcagccccgccgccggcccccccctgcagcccagagagcccctgagctacagcagactgcagagaaagagcctggccgtggacttcgtggtgcccagcctgttcagagtgtacgccagagacctgctgctgccccccagcagcagcgagctgaaggccggcagacccgaggccagaggcagcctggccctggactgcgcccccctgctgagactgctgggccccgcccccggcgtgagctggaccgccggcagccccgcccccgccgaggccagaaccctgagcagagtgctgaagggcggcagcgtgagaaagctgagaagagccaagcagctggtgctggagctgggcgaggaggccatcctggagggctgcgtgggcccccccggcgaggccgccgtgggcctgctgcagttcaacctgagcgagctgttcagctggtggatcagacagggcgagggcagactgagaatcagactgatgcccgagaagaaggccagcgaggtgggcagagagggcagactgagcgccgccatcagagccagccagcccagactgctgttccagatcttcggcaccggccacagcagcctggagagccccaccaacatgcccagccccagccccgactacttcacctggaacctgacctggatcatgaaggacagcttccccttcctgagccacagaagcagatacggcaaggagagaagccccgccgcccccccccccctgcccaccaccagcagcggcaaggccgccaagaagcccaccgccgccgagatcagcgtgagagtgcccagaggccccgccgtggagggcggccacgtgaacatggccttcagccagagcaacccccccagcgagctgcacaaggtgcacggcagcagaaacaagcccaccagcctgtggaaccccacctacggcagctggttcaccgagaagcccaccaagaagaacaaccccatcgccaagaaggagccccacgacagaggcaacctgggcctggagggcagctgcaccgtgccccccaacgtggccaccggcagactgcccggcgccagcctgctgctggagcccagcagcctgaccgccaacatgaaggaggtgcccctgttcagactgagacacttcccctgcggcaacgtgaactacggctaccagcagcagggcctgcccctggaggccgccaccgcccccggcgccggccactacgaggacaccatcctgaagagcaagaacagcatgaaccagcccggcccctag

SEQ ID NO: 9332 - DNA, 1935 bp, synthetic construct
  misc_feature 1..1935: note = Description of Artificial Sequence: Synthetic coding sequence
  source 1..1935: mol_type = other DNA
atggaggtgcagctgggcctgggcagagtgtaccccagaccccccagcaagacctacagaggcgccttccagaacctgttccagagcgtgagagaggtgatccagaaccccggccccagacaccccgaggccgccagcgccgccccccccggcgccagcctgctgctgctgcagcagcagcagcagcagcagcagcagcagcagcagcagcagcagcagcagcagcagcagcagcagcaggagaccagccccagacagcagcagcagcagcagggcgaggacggcagcccccaggcccacagaagaggccccaccggctacctggtgctggacgaggagcagcagcccagccagccccagagcgccctggagtgccaccccgagagaggctgcgtgcccgagcccggcgccgccgtggccgccagcaagggcctgccccagcagctgcccgccccccccgacgaggacgacagcgccgcccccagcaccctgagcctgctgggccccaccttccccggcctgagcagctgcagcgccgacctgaaggacatcctgagcgaggccagcaccatgcagctgctgcagcagcagcagcaggaggccgtgagcgagggcagcagcagcggcagagccagagaggccagcggcgcccccaccagcagcaaggacaactacctgggcggcaccagcaccatcagcgacaacgccaaggagctgtgcaaggccgtgagcgtgagcatgggcctgggcgtggaggccctggagcacctgagccccggcgagcagctgagaggcgactgcatgtacgcccccctgctgggcgtgccccccgccgtgagacccaccccctgcgcccccctggccgagtgcaagggcagcctgctggacgacagcgccggcaagagcaccgaggacaccgccgagtacagccccttcaagggcggctacaccaagggcctggagggcgagagcctgggctgcagcggcagcgccgccgccggcagcagcggcaccctggagctgcccagcaccctgagcctgtacaagagcggcgccctggacgaggccgccgcctaccagagcagagactactacaacttccccctggccctggccggccccccccccccccccccccccccccacccccacgccagaatcaagctggagaaccccctggactacggcagcgcctgggccgccgccgccgcccagtgcagatacggcgacctggccagcctgcacggcgccggcgccgccggccccggcagcggcagccccagcgccgccgccagcagcagctggcacaccctgttcaccgccgaggagggccagctgtacggcccctgcggcggcggcggcggcggcggcggcggcggcggcggcggcggcggcggcggcggcggcggcggcggcggcgaggccggcgccgtggccccctacggctacaccagacccccccagggcctggccggccaggagagcgacttcaccgcccccgacgtgtggtaccccggcggcatggtgagcagagtgccctaccccagccccacctgcgtgaagagcgagatgggcccctggatggacagctacagcggcccctacggcgacatgagactggagaccgccagagaccacgtgctgcccatcgactactacttccccccccagaagacctgcctgatctgcggcgacgaggccagcggctgccactacggcgccctgacctgcggcagctgcaaggtgttcttcaagagagccgccgagggcaagcagaagtacctgtgcgccagcagaaacgactgcaccatcgacaagttcagaagaaagaactgccccagctgcagactgagaaagtgctacgaggccggcatgaccctgggcgagaagttcagagtgggcaactgcaagcacctgaagatgaccagaccctag

SEQ ID NO: 9333 - DNA, 1803 bp, synthetic construct
  misc_feature 1..1803: note = Description of Artificial Sequence: Synthetic coding sequence
  source 1..1803: mol_type = other DNA
atggaggtgcagctgggcctgggcagagtgtaccccagaccccccagcaagacctacagaggcgccttccagaacctgttccagagcgtgagagaggtgatccagaaccccggccccagacaccccgaggccgccagcgccgccccccccggcgccagcctgctgctgctgcagcagcagcagcagcagcagcagcagcagcagcagcagcagcagcagcagcagcagcagcagcagcaggagaccagccccagacagcagcagcagcagcagggcgaggacggcagcccccaggcccacagaagaggccccaccggctacctggtgctggacgaggagcagcagcccagccagccccagagcgccctggagtgccaccccgagagaggctgcgtgcccgagcccggcgccgccgtggccgccagcaagggcctgccccagcagctgcccgccccccccgacgaggacgacagcgccgcccccagcaccctgagcctgctgggccccaccttccccggcctgagcagctgcagcgccgacctgaaggacatcctgagcgaggccagcaccatgcagctgctgcagcagcagcagcaggaggccgtgagcgagggcagcagcagcggcagagccagagaggccagcggcgcccccaccagcagcaaggacaactacctgggcggcaccagcaccatcagcgacaacgccaaggagctgtgcaaggccgtgagcgtgagcatgggcctgggcgtggaggccctggagcacctgagccccggcgagcagctgagaggcgactgcatgtacgcccccctgctgggcgtgccccccgccgtgagacccaccccctgcgcccccctggccgagtgcaagggcagcctgctggacgacagcgccggcaagagcaccgaggacaccgccgagtacagccccttcaagggcggctacaccaagggcctggagggcgagagcctgggctgcagcggcagcgccgccgccggcagcagcggcaccctggagctgcccagcaccctgagcctgtacaagagcggcgccctggacgaggccgccgcctaccagagcagagactactacaacttccccctggccctggccggccccccccccccccccccccccccccacccccacgccagaatcaagctggagaaccccctggactacggcagcgcctgggccgccgccgccgcccagtgcagatacggcgacctggccagcctgcacggcgccggcgccgccggccccggcagcggcagccccagcgccgccgccagcagcagctggcacaccctgttcaccgccgaggagggccagctgtacggcccctgcggcggcggcggcggcggcggcggcggcggcggcggcggcggcggcggcggcggcggcggcggcggcggcgaggccggcgccgtggccccctacggctacaccagacccccccagggcctggccggccaggagagcgacttcaccgcccccgacgtgtggtaccccggcggcatggtgagcagagtgccctaccccagccccacctgcgtgaagagcgagatgggcccctggatggacagctacagcggcccctacggcgacatgagactggagaccgccagagaccacgtgctgcccatcgactactacttccccccccagaagacctgcctgatctgcggcgacgaggccagcggctgccactacggcgccctgacctgcggcagctgcaaggtgttcttcaagagagccgccgagggcttcttcagaatgaacaagctgaaggagagctag

SEQ ID NO: 9334 - DNA, 444 bp, synthetic construct
  misc_feature 1..444: note = Description of Artificial Sequence: Synthetic coding sequence
  source 1..444: mol_type = other DNA
atggtgatgggcctgggcgtgctgctgctggtgttcgtgctgggcctgggcctgaccccccccaccctggcccaggacaacagcagatacacccacttcctgacccagcactacgacgccaagccccagggcagagacgacagatactgcgagagcatcatgagaagaagaggcctgaccagcccctgcaaggacatcaacaccttcatccacggcaacaagagaagcatcaaggccatctgcgagaacaagaacggcaacccccacagagagaacctgagaatcagcaagagcagcttccaggtgaccacctgcaagctgcacggcggcagcccctggcccccctgccagtacagagccaccgccggcttcagaaacgtggtggtggcctgcgagaacggcctgcccgtgcacctggaccagagcatcttcagaagaccctag

SEQ ID NO: 9335 - DNA, 444 bp, synthetic construct; identical to SEQ ID NO: 9334
  misc_feature 1..444: note = Description of Artificial Sequence: Synthetic coding sequence
  source 1..444: mol_type = other DNA

SEQ ID NO: 9336 - DNA, 1494 bp, synthetic construct
  misc_feature 1..1494: note = Description of Artificial Sequence: Synthetic coding sequence
  source 1..1494: mol_type = other DNA
atgaccgtgttcctgagcttcgccttcctggccgccatcctgacccacatcggctgcagcaaccagagaagaagccccgagaacagcggcagaagatacaacagaatccagcacggccagtgcgcctacaccttcatcctgcccgagcacgacggcaactgcagagagagcaccaccgaccagtacaacaccaacgccctgcagagagacgccccccacgtggagcccgacttcagcagccagaagctgcagcacctggagcacgtgatggagaactacacccagtggctgcagaagctggagaactacatcgtggagaacatgaagagcgagatggcccagatccagcagaacgccgtgcagaaccacaccgccaccatgctggagatcggcaccagcctgctgagccagaccgccgagcagaccagaaagctgaccgacgtggagacccaggtgctgaaccagaccagcagactggagatccagctgctggagaacagcctgagcacctacaagctggagaagcagctgctgcagcagaccaacgagatcctgaagatccacgagaagaacagcctgctggagcacaagatcctggagatggagggcaagcacaaggaggagctggacaccctgaaggaggagaaggagaacctgcagggcctggtgaccagacagacctacatcatccaggagctggagaagcagctgaacagagccaccaccaacaacagcgtgctgcagaagcagcagctggagctgatggacaccgtgcacaacctggtgaacctgtgcaccaaggaggtgctgctgaagggcggcaagagagaggaggagaagcccttcagagactgcgccgacgtgtaccaggccggcttcaacaagagcggcatctacaccatctacatcaacaacatgcccgagcccaagaaggtgttctgcaacatggacgtgaacggcggcggctggaccgtgatccagcacagagaggacggcagcctggacttccagagaggctggaaggagtacaagatgggcttcggcaaccccagcggcgagtactggctgggcaacgagttcatcttcgccatcaccagccagagacagtacatgctgagaatcgagctgatggactgggagggcaacagagcctacagccagtacgacagattccacatcggcaacgagaagcagaactacagactgtacctgaagggccacaccggcaccgccggcaagcagagcagcctgatcctgcacggcgccgacttcagcaccaaggacgccgacaacgacaactgcatgtgcaagtgcgccctgatgctgaccggcggctggtggttcgacgcctgcggccccagcaacctgaacggcatgttctacaccgccggccagaaccacggcaagctgaacggcatcaagtggcactacttcaagggccccagctacagcctgagaagcaccaccatgatgatcagacccctggacttctag

SEQ ID NO: 9337 - DNA, 459 bp, synthetic construct
  misc_feature 1..459: note = Description of Artificial Sequence: Synthetic coding sequence
  source 1..459: mol_type = other DNA
accgtgagcaacctgctggagcacaagatcctggagatggagggcaagcacaaggaggagctggacaccctgaaggaggagaaggagaacctgcagggcctggtgaccagacagacctacatcatccaggagctggagaagcagctgaacagagccaccaccaacaacagcgtgctgcagaagcagcagctggagctgatggacaccgtgcacaacctggtgaacctgtgcaccaaggagggcgtgctgctgaagggcggcaagagagaggaggagaagcccttcagagactgcgccgacgtgtaccaggccggcttcaacaagagcggcatctacaccatctacatcaacaacatgcccgagcccaagaaggtgttctgcaacatggacgtgaacggcggcggctggaccgtgatccagcacagagaggacggcagcctggacttccagagaggctag

SEQ ID NO: 9338 - DNA, 1497 bp, synthetic construct
  misc_feature 1..1497: note = Description of Artificial Sequence: Synthetic coding sequence
  source 1..1497: mol_type = other DNA
atgaccgtgttcctgagcttcgccttcctggccgccatcctgacccacatcggctgcagcaaccagagaagaagccccgagaacagcggcagaagatacaacagaatccagcacggccagtgcgcctacaccttcatcctgcccgagcacgacggcaactgcagagagagcaccaccgaccagtacaacaccaacgccctgcagagagacgccccccacgtggagcccgacttcagcagccagaagctgcagcacctggagcacgtgatggagaactacacccagtggctgcagaagctggagaactacatcgtggagaacatgaagagcgagatggcccagatccagcagaacgccgtgcagaaccacaccgccaccatgctggagatcggcaccagcctgctgagccagaccgccgagcagaccagaaagctgaccgacgtggagacccaggtgctgaaccagaccagcagactggagatccagctgctggagaacagcctgagcacctacaagctggagaagcagctgctgcagcagaccaacgagatcctgaagatccacgagaagaacagcctgctggagcacaagatcctggagatggagggcaagcacaaggaggagctggacaccctgaaggaggagaaggagaacctgcagggcctggtgaccagacagacctacatcatccaggagctggagaagcagctgaacagagccaccaccaacaacagcgtgctgcagaagcagcagctggagctgatggacaccgtgcacaacctggtgaacctgtgcaccaaggagggcgtgctgctgaagggcggcaagagagaggaggagaagcccttcagagactgcgccgacgtgtaccaggccggcttcaacaagagcggcatctacaccatctacatcaacaacatgcccgagcccaagaaggtgttctgcaacatggacgtgaacggcggcggctggaccgtgatccagcacagagaggacggcagcctggacttccagagaggctggaaggagtacaagatgggcttcggcaaccccagcggcgagtactggctgggcaacgagttcatcttcgccatcaccagccagagacagtacatgctgagaatcgagctgatggactgggagggcaacagagcctacagccagtacgacagattccacatcggcaacgagaagcagaactacagactgtacctgaagggccacaccggcaccgccggcaagcagagcagcctgatcctgcacggcgccgacttcagcaccaaggacgccgacaacgacaactgcatgtgcaagtgcgccctgatgctgaccggcggctggtggttcgacgcctgcggccccagcaacctgaacggcatgttctacaccgccggccagaaccacggcaagctgaacggcatcaagtggcactacttcaagggccccagctacagcctgagaagcaccaccatgatgatcagacccctggacttctag

SEQ ID NO: 9339 - DNA, 894 bp, synthetic construct
  misc_feature 1..894: note = Description of Artificial Sequence: Synthetic coding sequence
  source 1..894: mol_type = other DNA
atggagggcaagcacaaggaggagctggacaccctgaaggaggagaaggagaacctgcagggcctggtgaccagacagacctacatcatccaggagctggagaagcagctgaacagagccaccaccaacaacagcgtgctgcagaagcagcagctggagctgatggacaccgtgcacaacctggtgaacctgtgcaccaaggaggtgctgctgaagggcggcaagagagaggaggagaagcccttcagagactgcgccgacgtgtaccaggccggcttcaacaagagcggcatctacaccatctacatcaacaacatgcccgagcccaagaaggtgttctgcaacatggacgtgaacggcggcggctggaccgtgatccagcacagagaggacggcagcctggacttccagagaggctggaaggagtacaagatgggcttcggcaaccccagcggcgagtactggctgggcaacgagttcatcttcgccatcaccagccagagacagtacatgctgagaatcgagctgatggactgggagggcaacagagcctacagccagtacgacagattccacatcggcaacgagaagcagaactacagactgtacctgaagggccacaccggcaccgccggcaagcagagcagcctgatcctgcacggcgccgacttcagcaccaaggacgccgacaacgacaactgcatgtgcaagtgcgccctgatgctgaccggcggctggtggttcgacgcctgcggccccagcaacctgaacggcatgttctacaccgccggccagaaccacggcaagctgaacggcatcaagtggcactacttcaagggccccagctacagcctgagaagcaccaccatgatgatcagacccctggacttctag

SEQ ID NO: 9340 - DNA, 897 bp, synthetic construct
  misc_feature 1..897: note = Description of Artificial Sequence: Synthetic coding sequence
  source 1..897: mol_type = other DNA
atggagggcaagcacaaggaggagctggacaccctgaaggaggagaaggagaacctgcagggcctggtgaccagacagacctacatcatccaggagctggagaagcagctgaacagagccaccaccaacaacagcgtgctgcagaagcagcagctggagctgatggacaccgtgcacaacctggtgaacctgtgcaccaaggagggcgtgctgctgaagggcggcaagagagaggaggagaagcccttcagagactgcgccgacgtgtaccaggccggcttcaacaagagcggcatctacaccatctacatcaacaacatgcccgagcccaagaaggtgttctgcaacatggacgtgaacggcggcggctggaccgtgatccagcacagagaggacggcagcctggacttccagagaggctggaaggagtacaagatgggcttcggcaaccccagcggcgagtactggctgggcaacgagttcatcttcgccatcaccagccagagacagtacatgctgagaatcgagctgatggactgggagggcaacagagcctacagccagtacgacagattccacatcggcaacgagaagcagaactacagactgtacctgaagggccacaccggcaccgccggcaagcagagcagcctgatcctgcacggcgccgacttcagcaccaaggacgccgacaacgacaactgcatgtgcaagtgcgccctgatgctgaccggcggctggtggttcgacgcctgcggccccagcaacctgaacggcatgttctacaccgccggccagaaccacggcaagctgaacggcatcaagtggcactacttcaagggccccagctacagcctgagaagcaccaccatgatgatcagacccctggacttctag

SEQ ID NO: 9341 - DNA, 1491 bp, synthetic construct
  misc_feature 1..1491: note = Description of Artificial Sequence: Synthetic coding sequence
  source 1..1491: mol_type = other DNA
atgtggcagatcgtgttcttcaccctgagctgcgacctggtgctggccgccgcctacaacaacttcagaaagagcatggacagcatcggcaagaagcagtaccaggtgcagcacggcagctgcagctacaccttcctgctgcccgagatggacaactgcagaagcagcagcagcccctacgtgagcaacgccgtgcagagagacgcccccctggagtacgacgacagcgtgcagagactgcaggtgctggagaacatcatggagaacaacacccagtggctgatgaagctggagaactacatccaggacaacatgaagaaggagatggtggagatccagcagaacgccgtgcagaaccagaccgccgtgatgatcgagatcggcaccaacctgctgaaccagaccgccgagcagaccagaaagctgaccgacgtggaggcccaggtgctgaaccagaccaccagactggagctgcagctgctggagcacagcctgagcaccaacaagctggagaagcagatcctggaccagaccagcgagatcaacaagctgcaggacaagaacagcttcctggagaagaaggtgctggccatggaggacaagcacatcatccagctgcagagcatcaaggaggagaaggaccagctgcaggtgctggtgagcaagcagaacagcatcatcgaggagctggagaagaagatcgtgaccgccaccgtgaacaacagcgtgctgcagaagcagcagcacgacctgatggagaccgtgaacaacctgctgaccatgatgagcaccagcaacagcgccaaggaccccaccgtggccaaggaggagcagatcagcttcagagactgcgccgaggtgttcaagagcggccacaccaccaacggcatctacaccctgaccttccccaacagcaccgaggagatcaaggcctactgcgacatggaggccggcggcggcggctggaccatcatccagagaagagaggacggcagcgtggacttccagagaacctggaaggagtacaaggtgggcttcggcaaccccagcggcgagtactggctgggcaacgagttcgtgagccagctgaccaaccagcagagatacgtgctgaagatccacctgaaggactgggagggcaacgaggcctacagcctgtacgagcacttctacctgagcagcgaggagctgaactacagaatccacctgaagggcctgaccggcaccgccggcaagatcagcagcatcagccagcccggcaacgacttcagcaccaaggacggcgacaacgacaagtgcatctgcaagtgcagccagatgctgaccggcggctggtggttcgacgcctgcggccccagcaacctgaacggcatgtactacccccagagacagaacaccaacaagttcaacggcatcaagtggtactactggaagggcagcggctacagcctgaaggccaccaccatgatgatcagacccgccgacttctag

SEQ ID NO: 9342 - DNA, 1488 bp, synthetic construct
  misc_feature 1..1488: note = Description of Artificial Sequence: Synthetic coding sequence
  source 1..1488: mol_type = other DNA
atgtggcagatcgtgttcttcaccctgagctgcgacctggtgctggccgccgcctacaacaacttcagaaagagcatggacagcatcggcaagaagcagtaccaggtgcagcacggcagctgcagctacaccttcctgctgcccgagatggacaactgcagaagcagcagcagcccctacgtgagcaacgccgtgcagagagacgcccccctggagtacgacgacagcgtgcagagactgcaggtgctggagaacatcatggagaacaacacccagtggctgatgaagctggagaactacatccaggacaacatgaagaaggagatggtggagatccagcagaacgccgtgcagaaccagaccgccgtgatgatcgagatcggcaccaacctgctgaaccagaccgccgagcagaccagaaagctgaccgacgtggaggcccaggtgctgaaccagaccaccagactggagctgcagctgctggagcacagcctgagcaccaacaagctggagaagcagatcctggaccagaccagcgagatcaacaagctgcaggacaagaacagcttcctggagaagaaggtgctggccatggaggacaagcacatcatccagctgcagagcatcaaggaggagaaggaccagctgcaggtgctggtgagcaagcagaacagcatcatcgaggagctggagaagaagatcgtgaccgccaccgtgaacaacagcgtgctgcagaagcagcagcacgacctgatggagaccgtgaacaacctgctgaccatgatgagcaccagcaacagcaaggaccccaccgtggccaaggaggagcagatcagcttcagagactgcgccgaggtgttcaagagcggccacaccaccaacggcatctacaccctgaccttccccaacagcaccgaggagatcaaggcctactgcgacatggaggccggcggcggcggctggaccatcatccagagaagagaggacggcagcgtggacttccagagaacctggaaggagtacaaggtgggcttcggcaaccccagcggcgagtactggctgggcaacgagttcgtgagccagctgaccaaccagcagagatacgtgctgaagatccacctgaaggactgggagggcaacgaggcctacagcctgtacgagcacttctacctgagcagcgaggagctgaactacagaatccacctgaagggcctgaccggcaccgccggcaagatcagcagcatcagccagcccggcaacgacttcagcaccaaggacggcgacaacgacaagtgcatctgcaagtgcagccagatgctgaccggcggctggtggttcgacgcctgcggccccagcaacctgaacggcatgtactacccccagagacagaacaccaacaagttcaacggcatcaagtggtactactggaagggcagcggctacagcctgaaggccaccaccatgatgatcagacccgccgacttctag

SEQ ID NO: 9343 - DNA, 1335 bp, synthetic construct
  misc_feature 1..1335: note = Description of Artificial Sequence: Synthetic coding sequence
  source 1..1335: mol_type = other DNA
atgtggcagatcgtgttcttcaccctgagctgcgacctggtgctggccgccgcctacaacaacttcagaaagagcatggacagcatcggcaagaagcagtaccaggtgcagcacggcagctgcagctacaccttcctgctgcccgagatggacaactgcagaagcagcagcagcccctacgtgagcaacgccgtgcagagagacgcccccctggagtacgacgacagcgtgcagagactgcaggtgctggagaacatcatggagaacaacacccagtggctgatgaaggtgctgaaccagaccaccagactggagctgcagctgctggagcacagcctgagcaccaacaagctggagaagcagatcctggaccagaccagcgagatcaacaagctgcaggacaagaacagcttcctggagaagaaggtgctggccatggaggacaagcacatcatccagctgcagagcatcaaggaggagaaggaccagctgcaggtgctggtgagcaagcagaacagcatcatcgaggagctggagaagaagatcgtgaccgccaccgtgaacaacagcgtgctgcagaagcagcagcacgacctgatggagaccgtgaacaacctgctgaccatgatgagcaccagcaacagcgccaaggaccccaccgtggccaaggaggagcagatcagcttcagagactgcgccgaggtgttcaagagcggccacaccaccaacggcatctacaccctgaccttccccaacagcaccgaggagatcaaggcctactgcgacatggaggccggcggcggcggctggaccatcatccagagaagagaggacggcagcgtggacttccagagaacctggaaggagtacaaggtgggcttcggcaaccccagcggcgagtactggctgggcaacgagttcgtgagccagctgaccaaccagcagagatacgtgctgaagatccacctgaaggactgggagggcaacgaggcctacagcctgtacgagcacttctacctgagcagcgaggagctgaactacagaatccacctgaagggcctgaccggcaccgccggcaagatcagcagcatcagccagcccggcaacgacttcagcaccaaggacggcgacaacgacaagtgcatctgcaagtgcagccagatgctgaccggcggctggtggttcgacgcctgcggccccagcaacctgaacggcatgtactacccccagagacagaacaccaacaagttcaacggcatcaagtggtactactggaagggcagcggctacagcctgaaggccaccaccatgatgatcagacccgccgacttctag

SEQ ID NO: 9344 - DNA, 1221 bp, synthetic construct
  misc_feature 1..1221: note = Description of Artificial Sequence: Synthetic coding sequence
  source 1..1221: mol_type = other DNA
atgagcggcgcccccaccgccggcgccgccctgatgctgtgcgccgccaccgccgtgctgctgagcgcccagggcggccccgtgcagagcaagagccccagattcgccagctgggacgagatgaacgtgctggcccacggcctgctgcagctgggccagggcctgagagagcacgccgagagaaccagaagccagctgagcgccctggagagaagactgagcgcctgcggcagcgcctgccagggcaccgagggcagcaccgacctgcccctggcccccgagagcagagtggaccccgaggtgctgcacagcctgcagacccagctgaaggcccagaacagcagaatccagcagctgttccacaaggtggcccagcagcagagacacctggagaagcagcacctgagaatccagcacctgcagagccagttcggcctgctggaccacaagcacctggaccacgaggtggccaagcccgccagaagaaagagactgcccgagatggcccagcccgtggaccccgcccacaacgtgagcagactgcacagactgcccagagactgccaggagctgttccaggtgggcgagagacagagcggcctgttcgagatccagccccagggcagcccccccttcctggtgaactgcaagatgaccagcgacggcggctggaccgtgatccagagaagacacgacggcagcgtggacttcaacagaccctgggaggcctacaaggccggcttcggcgacccccacggcgagttctggctgggcctggagaaggtgcacagcatcaccggcgacagaaacagcagactggccgtgcagctgagagactgggacggcaacgccgagctgctgcagttcagcgtgcacctgggcggcgaggacaccgcctacagcctgcagctgaccgcccccgtggccggccagctgggcgccaccaccgtgccccccagcggcctgagcgtgcccttcagcacctgggaccaggaccacgacctgagaagagacaagaactgcgccaagagcctgagcggcggctggtggttcggcacctgcagccacagcaacctgaacggccagtacttcagaagcatcccccagcagagacagaagctgaagaagggcatcttctggaagacctggagaggcagatactaccccctgcaggccaccaccatgctgatccagcccatggccgccgaggccgccagctag

SEQ ID NO: 9345 - DNA, 1107 bp, synthetic construct
  misc_feature 1..1107: note = Description of Artificial Sequence: Synthetic coding sequence
  source 1..1107: mol_type = other DNA
atgagcggcgcccccaccgccggcgccgccctgatgctgtgcgccgccaccgccgtgctgctgagcgcccagggcggccccgtgcagagcaagagccccagattcgccagctgggacgagatgaacgtgctggcccacggcctgctgcagctgggccagggcctgagagagcacgccgagagaaccagaagccagctgagcgccctggagagaagactgagcgcctgcggcagcgcctgccagggcaccgagggcagcaccgacctgcccctggcccccgagagcagagtggaccccgaggtgctgcacagcctgcagacccagctgaaggcccagaacagcagaatccagcagctgttccacaaggtggcccagcagcagagacacctggagaagcagcacctgagaatccagcacctgcagagccagttcggcctgctggaccacaagcacctggaccacgaggtggccaagcccgccagaagaaagagactgcccgagatggcccagcccgtggaccccgcccacaacgtgagcagactgcaccacggcggctggaccgtgatccagagaagacacgacggcagcgtggacttcaacagaccctgggaggcctacaaggccggcttcggcgacccccacggcgagttctggctgggcctggagaaggtgcacagcatcaccggcgacagaaacagcagactggccgtgcagctgagagactgggacggcaacgccgagctgctgcagttcagcgtgcacctgggcggcgaggacaccgcctacagcctgcagctgaccgcccccgtggccggccagctgggcgccaccaccgtgccccccagcggcctgagcgtgcccttcagcacctgggaccaggaccacgacctgagaagagacaagaactgcgccaagagcctgagcggcggctggtggttcggcacctgcagccacagcaacctgaacggccagtacttcagaagcatcccccagcagagacagaagctgaagaagggcatcttctggaagacctggagaggcagatactaccccctgcaggccaccaccatgctgatccagcccatggccgccgaggccgccagctag

SEQ ID NO: 9346 - DNA, 720 bp, synthetic construct
  misc_feature 1..720: note = Description of Artificial Sequence: Synthetic coding sequence
  source 1..720: mol_type = other DNA
atggcccagcccgtggaccccgcccacaacgtgagcagactgcacagactgcccagagactgccaggagctgttccaggtgggcgagagacagagcggcctgttcgagatccagccccagggcagcccccccttcctggtgaactgcaagatgaccagcgacggcggctggaccgtgatccagagaagacacgacggcagcgtggacttcaacagaccctgggaggcctacaaggccggcttcggcgacccccacggcgagttctggctgggcctggagaaggtgcacagcatcaccggcgacagaaacagcagactggccgtgcagctgagagactgggacggcaacgccgagctgctgcagttcagcgtgcacctgggcggcgaggacaccgcctacagcctgcagctgaccgcccccgtggccggccagctgggcgccaccaccgtgccccccagcggcctgagcgtgcccttcagcacctgggaccaggaccacgacctgagaagagacaagaactgcgccaagagcctgagcggcggctggtggttcggcacctgcagccacagcaacctgaacggccagtacttcagaagcatcccccagcagagacagaagctgaagaagggcatcttctggaagacctggagaggcagatactaccccctgcaggccaccaccatgctgatccagcccatggccgccgaggccgccagctag

SEQ ID NO: 9347 - DNA, 837 bp, synthetic construct
  misc_feature 1..837: note = Description of Artificial Sequence: Synthetic coding sequence
  source 1..837: mol_type = other DNA
atggagcccagagccgccgacggctgcttcctgggcgacgtgggcttctgggtggagagaacccccgtgcacgaggccgcccagagaggcgagagcctgcagctgcagcagctgatcgagagcggcgcctgcgtgaaccaggtgaccgtggacagcatcacccccctgcacgccgccagcctgcagggccaggccagatgcgtgcagctgctgctggccgccggcgcccaggtggacgccagaaacatcgacggcagcacccccctgtgcgacgcctgcgccagcggcagcatcgagtgcgtgaagctgctgctgagctacggcgccaaggtgaacccccccctgtacaccgccagccccctgcacgaggcctgcatgagcggcagcagcgagtgcgtgagactgctgatcgacgtgggcgccaacctggaggcccacgactgccacttcggcacccccctgcacgtggcctgcgccagagagcacctggactgcgtgaaggtgctgctgaacgccggcgccaacgtgaacgccgccaagctgcacgagaccgccctgcaccacgccgccaaggtgaagaacgtggacctgatcgagatgctgatcgagttcggcggcaacatctacgccagagacaacagaggcaagaagcccagcgactacacctggagcagcagcgcccccgccaagtgcttcgagtactacgagaagacccccctgaccctgagccagctgtgcagagtgaacctgagaaaggccaccggcgtgagaggcctggagaagatcgccaagctgaacatcccccccagactgatcgactacctgagctacaactag

SEQ ID NO: 9348 - DNA, 396 bp, synthetic construct
  misc_feature 1..396: note = Description of Artificial Sequence: Synthetic coding sequence
  source 1..396: mol_type = other DNA
atggagaagatccccgtgagcgccttcctgctgctggtggccctgagctacaccctggccagagacaccaccgtgaagcccggcgccaagaaggacaccaaggacagcagacccaagctgccccagaccctgagcagaggctggggcgaccagctgatctggacccagacctacgaggaggccctgtacaagagcaagaccagcaacaagcccctgatgatcatccaccacctggacgagtgcccccacagccaggccctgaagaaggtgttcgccgagaacaaggagatccagaagctggccgagcagttcgtgctgctgaacctggtgtacgagaccaccgacaagcacctgagccccgacggccagtacgtgcccagaatcatgttcgtgtag

SEQ ID NO: 9349 - DNA, 528 bp, synthetic construct
  misc_feature 1..528: note = Description of Artificial Sequence: Synthetic coding sequence
  source 1..528: mol_type = other DNA
atggagaagatccccgtgagcgccttcctgctgctggtggccctgagctacaccctggccagagacaccaccgtgaagcccggcgccaagaaggacaccaaggacagcagacccaagctgccccagaccctgagcagaggctggggcgaccagctgatctggacccagacctacgaggaggccctgtacaagagcaagaccagcaacaagcccctgatgatcatccaccacctggacgagtgcccccacagccaggccctgaagaaggtgttcgccgagaacaaggagatccagaagctggccgagcagttcgtgctgctgaacctggtgtacgagaccaccgacaagcacctgagccccgacggccagtacgtgcccagaatcatgttcgtggaccccagcctgaccgtgagagccgacatcaccggcagatacagcaacagactgtacgcctacgagcccgccgacaccgccctgctgctggacaacatgaagaaggccctgaagctgctgaagaccgagctgtag

SEQ ID NO: 9350 - DNA, 588 bp, synthetic construct
  misc_feature 1..588: note = Description of Artificial Sequence: Synthetic coding sequence
  source 1..588: mol_type = other DNA
atgagcaactacaccgacgccgagagcagcttcagcaagcaggagatcatcagagtggccatggagaagatccccgtgagcgccttcctgctgctggtggccctgagctacaccctggccagagacaccaccgtgaagcccggcgccaagaaggacaccaaggacagcagacccaagctgccccagaccctgagcagaggctggggcgaccagctgatctggacccagacctacgaggaggccctgtacaagagcaagaccagcaacaagcccctgatgatcatccaccacctggacgagtgcccccacagccaggccctgaagaaggtgttcgccgagaacaaggagatccagaagctggccgagcagttcgtgctgctgaacctggtgtacgagaccaccgacaagcacctgagccccgacggccagtacgtgcccagaatcatgttcgtggaccccagcctgaccgtgagagccgacatcaccggcagatacagcaacagactgtacgcctacgagcccgccgacaccgccctgctgctggacaacatgaagaaggccctgaagctgctgaagaccgagctgtag

SEQ ID NO: 9351 - DNA, 1251 bp, synthetic construct
  misc_feature 1..1251: note = Description of Artificial Sequence: Synthetic coding sequence
  source 1..1251: mol_type = other DNA
atgtggcccaccagaagactggtgaccatcaagagaagcggcgtggacggcccccacttccccctgagcctgagcacctgcctgttcggcagatacgagaacgagagcctgcagaacggcagaaagagcaccgagttccccagaaagatcagagagcaggagcccgccagaagagtgagcagaagcagcttcagcagcgaccccgacgagagcgagggcatccccctgaagagaagaagagtgagcttcggcggccacctgagacccgagctgttcgacgagaacctgccccccaacacccccctgaagagaggcgaggcccccaccaagagaaagagcctggtgatgcacaccccccccgtgctgaagaagatcatcaaggagcagccccagcccagcggcaagcaggagagcggcagcgagatccacgtggaggtgaaggcccagagcctggtgatcagcccccccgcccccagccccagaaagacccccgtggccagcgaccagagaagaagaagctgcaagaccgcccccgccagcagcagcaagagccagaccgaggtgcccaagagaggcggcagaaagagcggcaacctgcccagcaagagagtgagcatcagcagaagccagcacgacatcctgcagatgatctgcagcaagagaagaagcggcgccagcgaggccaacctgatcgtggccaagagctgggccgacgtggtgaagctgggcgccaagcagacccagaccaaggtgatcaagcacggcccccagagaagcatgaacaagagacagagaagacccgccacccccaagaagcccgtgggcgaggtgcacagccagttcagcaccggccacgccaacagcccctgcaccatcatcatcggcaaggcccacaccgagaaggtgcacgtgcccgccagaccctacagagtgctgaacaacttcatcagcaaccagaagatggacttcaaggaggacctgagcggcatcgccgagatgttcaagacccccgtgaaggagcagccccagctgaccagcacctgccacatcgccatcagcaacagcgagaacctgctgggcaagcagttccagggcaccgacagcggcgaggagcccctgctgcccaccagcgagagcttcggcggcaacgtgttcttcagcgcccagaacgccgccaagcagcccagcgacaagtgcagcgccagcccccccctgagaagacagtgcatcagagagaacggcaacgtgtag

SEQ ID NO: 9352 - DNA, 8691 bp, synthetic construct
  misc_feature 1..8691: note = Description of Artificial Sequence: Synthetic coding sequence
  source 1..8691: mol_type = other DNA
atgtggcccaccagaagactggtgaccatcaagagaagcggcgtggacggcccccacttccccctgagcctgagcacctgcctgttcggcagaggcatcgagtgcgacatcagaatccagctgcccgtggtgagcaagcagcactgcaagatcgagatccacgagcaggaggccatcctgcacaacttcagcagcaccaaccccacccaggtgaacggcagcgtgatcgacgagcccgtgagactgaagcacggcgacgtgatcaccatcatcgacagaagcttcagatacgagaacgagagcctgcagaacggcagaaagagcaccgagttccccagaaagatcagagagcaggagcccgccagaagagtgagcagaagcagcttcagcagcgaccccgacgagagcgagggcatccccctgaagagaagaagagtgagcttcggcggccacctgagacccgagctgttcgacgagaacctgccccccaacacccccctgaagagaggcgaggcccccaccaagagaaagagcctggtgatgcacaccccccccgtgctgaagaagatcatcaaggagcagccccagcccagcggcaagcaggagagcggcagcgagatccacgtggaggtgaaggcccagagcctggtgatcagcccccccgcccccagccccagaaagacccccgtggccagcgaccagagaagaagaagctgcaagaccgcccccgccagcagcagcaagagccagaccgaggtgcccaagagaggcggcagaaagagcggcaacctgcccagcaagagagtgagcatcagcagaagccagcacgacatcctgcagatgatctgcagcaagagaagaagcggcgccagcgaggccaacctgatcgtggccaagagctgggccgacgtggtgaagctgggcgccaagcagacccagaccaaggtgatcaagcacggcccccagagaagcatgaacaagagacagagaagacccgccacccccaagaagcccgtgggcgaggtgcacagccagttcagcaccggccacgccaacagcccctgcaccatcatcatcggcaaggcccacaccgagaaggtgcacgtgcccgccagaccctacagagtgctgaacaacttcatcagcaaccagaagatggacttcaaggaggacctgagcggcatcgccgagatgttcaagacccccgtgaaggagcagccccagctgaccagcacctgccacatcgccatcagcaacagcgagaacctgctgggcaagcagttccagggcaccgacagcggcgaggagcccctgctgcccaccagcgagagcttcggcggcaacgtgttcttcagcgcccagaacgccgccaagcagcccagcgacaagtgcagcgccagcccccccctgagaagacagtgcatcagagagaacggcaacgtggccaagacccccagaaacacctacaagatgaccagcctggagaccaagaccagcgacaccgagaccgagcccagcaagaccgtgagcaccgccaacagaagcggcagaagcaccgagttcagaaacatccagaagctgcccgtggagagcaagagcgaggagaccaacaccgagatcgtggagtgcatcctgaagagaggccagaaggccaccctgctgcagcagagaagagagggcgagatgaaggagatcgagagacccttcgagacctacaaggagaacatcgagctgaaggagaacgacgagaagatgaaggccatgaagagaagcagaacctggggccagaagtgcgcccccatgagcgacctgaccgacctgaagagcctgcccgacaccgagctgatgaaggacaccgccagaggccagaacctgctgcagacccaggaccacgccaaggcccccaagagcgagaagggcaagatcaccaagatgccctgccagagcctgcagcccgagcccatcaacacccccacccacaccaagcagcagctgaaggccagcctgggcaaggtgggcgtgaaggaggagctgctggccgtgggcaagttcaccagaaccagcggcgagaccacccacacccacagagagcccgccggcgacggcaagagcatcagaaccttcaaggagagccccaagcagatcctggaccccgccgccagagtgaccggcatgaagaagtggcccagaacccccaaggaggaggcccagagcctggaggacctggccggcttcaaggagctgttccagacccccggccccagcgaggagagcatgaccgacgagaagaccaccaagatcgcctgcaagagccccccccccgagagcgtggacacccccaccagcaccaagcagtggcccaagagaagcctgagaaaggccgacgtggaggaggagttcctggccctgagaaagctgacccccagcgccggcaaggccatgctgacccccaagcccgccggcggcgacgagaaggacatcaaggccttcatgggcacccccgtgcagaagctggacctggccggcaccctgcccggcagcaagagacagctgcagacccccaaggagaaggcccaggccctggaggacctggccggcttcaaggagctgttccagacccccggccacaccgaggagctggtggccgccggcaagaccaccaagatcccctgcgacagcccccagagcgaccccgtggacacccccaccagcaccaagcagagacccaagagaagcatcagaaaggccgacgtggagggcgagctgctggcctgcagaaacctgatgcccagcgccggcaaggccatgcacacccccaagcccagcgtgggcgaggagaaggacatcatcatcttcgtgggcacccccgtgcagaagctggacctgaccgagaacctgaccggcagcaagagaagaccccagacccccaaggaggaggcccaggccctggaggacctgaccggcttcaaggagctgttccagacccccggccacaccgaggaggccgtggccgccggcaagaccaccaagatgccctgcgagagcagcccccccgagagcgccgacacccccaccagcaccagaagacagcccaagacccccctggagaagagagacgtgcagaaggagctgagcgccctgaagaagctgacccagaccagcggcgagaccacccacaccgacaaggtgcccggcggcgaggacaagagcatcaacgccttcagagagaccgccaagcagaagctggaccccgccgccagcgtgaccggcagcaagagacaccccaagaccaaggagaaggcccagcccctggaggacctggccggcctgaaggagctgttccagacccccgtgtgcaccgacaagcccaccacccacgagaagaccaccaagatcgcctgcagaagccagcccgaccccgtggacacccccaccagcagcaagccccagagcaagagaagcctgagaaaggtggacgtggaggaggagttcttcgccctgagaaagagaacccccagcgccggcaaggccatgcacacccccaagcccgccgtgagcggcgagaagaacatctacgccttcatgggcacccccgtgcagaagctggacctgaccgagaacctgaccggcagcaagagaagactgcagacccccaaggagaaggcccaggccctggaggacctggccggcttcaaggagctgttccagaccagaggccacaccgaggagagcatgaccaacgacaagaccgccaaggtggcctgcaagagcagccagcccgaccccgacaagaaccccgccagcagcaagagaagactgaagaccagcctgggcaaggtgggcgtgaaggaggagctgctggccgtgggcaagctgacccagaccagcggcgagaccacccacacccacaccgagcccaccggcgacggcaagagcatgaaggccttcatggagagccccaagcagatcctggacagcgccgccagcctgaccggcagcaagagacagctgagaacccccaagggcaagagcgaggtgcccgaggacctggccggcttcatcgagctgttccagacccccagccacaccaaggagagcatgaccaacgagaagaccaccaaggtgagctacagagccagccagcccgacctggtggacacccccaccagcagcaagccccagcccaagagaagcctgagaaaggccgacaccgaggaggagttcctggccttcagaaagcagacccccagcgccggcaaggccatgcacacccccaagcccgccgtgggcgaggagaaggacatcaacaccttcctgggcacccccgtgcagaagctggaccagcccggcaacctgcccggcagcaacagaagactgcagaccagaaaggagaaggcccaggccctggaggagctgaccggcttcagagagctgttccagaccccctgcaccgacaaccccaccaccgacgagaagaccaccaagaagatcctgtgcaagagcccccagagcgaccccgccgacacccccaccaacaccaagcagagacccaagagaagcctgaagaaggccgacgtggaggaggagttcctggccttcagaaagctgacccccagcgccggcaaggccatgcacacccccaaggccgccgtgggcgaggagaaggacatcaacaccttcgtgggcacccccgtggagaagctggacctgctgggcaacctgcccggcagcaagagaagaccccagacccccaaggagaaggccaaggccctggaggacctggccggcttcaaggagctgttccagacccccggccacaccgaggagagcatgaccgacgacaagatcaccgaggtgagctgcaagagcccccagcccgaccccgtgaagacccccaccagcagcaagcagagactgaagatcagcctgggcaaggtgggcgtgaaggaggaggtgctgcccgtgggcaagctgacccagaccagcggcaagaccacccagacccacagagagaccgccggcgacggcaagagcatcaaggccttcaaggagagcgccaagcagatgctggaccccgccaactacggcaccggcatggagagatggcccagaacccccaaggaggaggcccagagcctggaggacctggccggcttcaaggagctgttccagacccccgaccacaccgaggagagcaccaccgacgacaagaccaccaagatcgcctgcaagagccccccccccgagagcatggacacccccaccagcaccagaagaagacccaagacccccctgggcaagagagacatcgtggaggagctgagcgccctgaagcagctgacccagaccacccacaccgacaaggtgcccggcgacgaggacaagggcatcaacgtgttcagagagaccgccaagcagaagctggaccccgccgccagcgtgaccggcagcaagagacagcccagaacccccaagggcaaggcccagcccctggaggacctggccggcctgaaggagctgttccagacccccatctgcaccgacaagcccaccacccacgagaagaccaccaagatcgcctgcagaagcccccagcccgaccccgtgggcacccccaccatcttcaagccccagagcaagagaagcctgagaaaggccgacgtggaggaggagagcctggccctgagaaagagaacccccagcgtgggcaaggccatggacacccccaagcccgccggcggcgacgagaaggacatgaaggccttcatgggcacccccgtgcagaagctggacctgcccggcaacctgcccggcagcaagagatggccccagacccccaaggagaaggcccaggccctggaggacctggccggcttcaaggagctgttccagacccccggcaccgacaagcccaccaccgacgagaagaccaccaagatcgcctgcaagagcccccagcccgaccccgtggacacccccgccagcaccaagcagagacccaagagaaacctgagaaaggccgacgtggaggaggagttcctggccctgagaaagagaacccccagcgccggcaaggccatggacacccccaagcccgccgtgagcgacgagaagaacatcaacaccttcgtggagacccccgtgcagaagctggacctgctgggcaacctgcccggcagcaagagacagccccagacccccaaggagaaggccgaggccctggaggacctggtgggcttcaaggagctgttccagacccccggccacaccgaggagagcatgaccgacgacaagatcaccgaggtgagctgcaagagcccccagcccgagagcttcaagaccagcagaagcagcaagcagagactgaagatccccctggtgaaggtggacatgaaggaggagcccctggccgtgagcaagctgaccagaaccagcggcgagaccacccagacccacaccgagcccaccggcgacagcaagagcatcaaggccttcaaggagagccccaagcagatcctggaccccgccgccagcgtgaccggcagcagaagacagctgagaaccagaaaggagaaggccagagccctggaggacctggtggacttcaaggagctgttcagcgcccccggccacaccgaggagagcatgaccatcgacaagaacaccaagatcccctgcaagagccccccccccgagctgaccgacaccgccaccagcaccaagagatgccccaagaccagacccagaaaggaggtgaaggaggagctgagcgccgtggagagactgacccagaccagcggccagagcacccacacccacaaggagcccgccagcggcgacgagggcatcaaggtgctgaagcagagagccaagaagaagcccaaccccgtggaggaggagcccagcagaagaagacccagagcccccaaggagaaggcccagcccctggaggacctggccggcttcaccgagctgagcgagaccagcggccacacccaggagagcctgaccgccggcaaggccaccaagatcccctgcgagagcccccccctggaggtggtggacaccaccgccagcaccaagagacacctgagaaccagagtgcagaaggtgcaggtgaaggaggagcccagcgccgtgaagttcacccagaccagcggcgagaccaccgacgccgacaaggagcccgccggcgaggacaagggcatcaaggccctgaaggagagcgccaagcagacccccgcccccgccgccagcgtgaccggcagcagaagaagacccagagcccccagagagagcgcccaggccatcgaggacctggccggcttcaaggaccccgccgccggccacaccgaggagagcatgaccgacgacaagaccaccaagatcccctgcaagagcagccccgagctggaggacaccgccaccagcagcaagagaagacccagaaccagagcccagaaggtggaggtgaaggaggagctgctggccgtgggcaagctgacccagaccagcggcgagaccacccacaccgacaaggagcccgtgggcgagggcaagggcaccaaggccttcaagcagcccgccaagagaaagctggacgccgaggacgtgatcggcagcagaagacagcccagagcccccaaggagaaggcccagcccctggaggacctggccagcttccaggagctgagccagacccccggccacaccgaggagctggccaacggcgccgccgacagcttcaccagcgcccccaagcagacccccgacagcggcaagcccctgaagatcagcagaagagtgctgagagcccccaaggtggagcccgtgggcgacgtggtgagcaccagagaccccgtgaagagccagagcaagagcaacaccagcctgccccccctgcccttcaagagaggcggcggcaaggacggcagcgtgaccggcaccaagagactgagatgcatgcccgcccccgaggagatcgtggaggagctgcccgccagcaagaagcagagagtggcccccagagccagaggcaagagcagcgagcccgtggtgatcatgaagagaagcctgagaaccagcgccaagagaatcgagcccgccgaggagctgaacagcaacgacatgaagaccaacaaggaggagcacaagctgcaggacagcgtgcccgagaacaagggcatcagcctgagaagcagaagacagaacaagaccgaggccgagcagcagatcaccgaggtgttcgtgctggccgagagaatcgagatcaacagaaacgagaagaagcccatgaagaccagccccgagatggacatccagaaccccgacgacggcgccagaaagcccatccccagagacaaggtgaccgagaacaagagatgcctgagaagcgccagacagaacgagagcagccagcccaaggtggccgaggagagcggcggccagaagagcgccaaggtgctgatgcagaaccagaagggcaagggcgaggccggcaacagcgacagcatgtgcctgagaagcagaaagaccaagagccagcccgccgccagcaccctggagagcaagagcgtgcagagagtgaccagaagcgtgaagagatgcgccgagaaccccaagaaggccgaggacaacgtgtgcgtgaagaagatcagaaccagaagccacagagacagcgaggacatctag

SEQ ID NO: 9353 - DNA, 9771 bp, synthetic construct
  misc_feature 1..9771: note = Description of Artificial Sequence: Synthetic coding sequence
  source 1..9771: mol_type = other DNA
atgtggcccaccagaagactggtgaccatcaagagaagcggcgtggacggcccccacttccccctgagcctgagcacctgcctgttcggcagaggcatcgagtgcgacatcagaatccagctgcccgtggtgagcaagcagcactgcaagatcgagatccacgagcaggaggccatcctgcacaacttcagcagcaccaaccccacccaggtgaacggcagcgtgatcgacgagcccgtgagactgaagcacggcgacgtgatcaccatcatcgacagaagcttcagatacgagaacgagagcctgcagaacggcagaaagagcaccgagttccccagaaagatcagagagcaggagcccgccagaagagtgagcagaagcagcttcagcagcgaccccgacgagaaggcccaggacagcaaggcctacagcaagatcaccgagggcaaggtgagcggcaacccccaggtgcacatcaagaacgtgaaggaggacagcaccgccgacgacagcaaggacagcgtggcccagggcaccaccaacgtgcacagcagcgagcacgccggcagaaacggcagaaacgccgccgaccccatcagcggcgacttcaaggagatcagcagcgtgaagctggtgagcagatacggcgagctgaagagcgtgcccaccacccagtgcctggacaacagcaagaagaacgagagccccttctggaagctgtacgagagcgtgaagaaggagctggacgtgaagagccagaaggagaacgtgctgcagtactgcagaaagagcggcctgcagaccgactacgccaccgagaaggagagcgccgacggcctgcagggcgagacccagctgctggtgagcagaaagagcagacccaagagcggcggcagcggccacgccgtggccgagcccgccagccccgagcaggagctggaccagaacaagggcaagggcagagacgtggagagcgtgcagacccccagcaaggccgtgggcgccagcttccccctgtacgagcccgccaagatgaagacccccgtgcagtacagccagcagcagaacagcccccagaagcacaagaacaaggacctgtacaccaccggcagaagagagagcgtgaacctgggcaagagcgagggcttcaaggccggcgacaagaccctgacccccagaaagctgagcaccagaaacagaacccccgccaaggtggaggacgccgccgacagcgccaccaagcccgagaacctgagcagcaagaccagaggcagcatccccaccgacgtggaggtgctgcccaccgagaccgagatccacaacgagcccttcctgaccctgtggctgacccaggtggagagaaagatccagaaggacagcctgagcaagcccgagaagctgggcaccaccgccggccagatgtgcagcggcctgcccggcctgagcagcgtggacatcaacaacttcggcgacagcatcaacgagagcgagggcatccccctgaagagaagaagagtgagcttcggcggccacctgagacccgagctgttcgacgagaacctgccccccaacacccccctgaagagaggcgaggcccccaccaagagaaagagcctggtgatgcacaccccccccgtgctgaagaagatcatcaaggagcagccccagcccagcggcaagcaggagagcggcagcgagatccacgtggaggtgaaggcccagagcctggtgatcagcccccccgcccccagccccagaaagacccccgtggccagcgaccagagaagaagaagctgcaagaccgcccccgccagcagcagcaagagccagaccgaggtgcccaagagaggcggcagaaagagcggcaacctgcccagcaagagagtgagcatcagcagaagccagcacgacatcctgcagatgatctgcagcaagagaagaagcggcgccagcgaggccaacctgatcgtggccaagagctgggccgacgtggtgaagctgggcgccaagcagacccagaccaaggtgatcaagcacggcccccagagaagcatgaacaagagacagagaagacccgccacccccaagaagcccgtgggcgaggtgcacagccagttcagcaccggccacgccaacagcccctgcaccatcatcatcggcaaggcccacaccgagaaggtgcacgtgcccgccagaccctacagagtgctgaacaacttcatcagcaaccagaagatggacttcaaggaggacctgagcggcatcgccgagatgttcaagacccccgtgaaggagcagccccagctgaccagcacctgccacatcgccatcagcaacagcgagaacctgctgggcaagcagttccagggcaccgacagcggcgaggagcccctgctgcccaccagcgagagcttcggcggcaacgtgttcttcagcgcccagaacgccgccaagcagcccagcgacaagtgcagcgccagcccccccctgagaagacagtgcatcagagagaacggcaacgtggccaagacccccagaaacacctacaagatgaccagcctggagaccaagaccagcgacaccgagaccgagcccagcaagaccgtgagcaccgccaacagaagcggcagaagcaccgagttcagaaacatccagaagctgcccgtggagagcaagagcgaggagaccaacaccgagatcgtggagtgcatcctgaagagaggccagaaggccaccctgctgcagcagagaagagagggcgagatgaaggagatcgagagacccttcgagacctacaaggagaacatcgagctgaaggagaacgacgagaagatgaaggccatgaagagaagcagaacctggggccagaagtgcgcccccatgagcgacctgaccgacctgaagagcctgcccgacaccgagctgatgaaggacaccgccagaggccagaacctgctgcagacccaggaccacgccaaggcccccaagagcgagaagggcaagatcaccaagatgccctgccagagcctgcagcccgagcccatcaacacccccacccacaccaagcagcagctgaaggccagcctgggcaaggtgggcgtgaaggaggagctgctggccgtgggcaagttcaccagaaccagcggcgagaccacccacacccacagagagcccgccggcgacggcaagagcatcagaaccttcaaggagagccccaagcagatcctggaccccgccgccagagtgaccggcatgaagaagtggcccagaacccccaaggaggaggcccagagcctggaggacctggccggcttcaaggagctgttccagacccccggccccagcgaggagagcatgaccgacgagaagaccaccaagatcgcctgcaagagccccccccccgagagcgtggacacccccaccagcaccaagcagtggcccaagagaagcctgagaaaggccgacgtggaggaggagttcctggccctgagaaagctgacccccagcgccggcaaggccatgctgacccccaagcccgccggcggcgacgagaaggacatcaaggccttcatgggcacccccgtgcagaagctggacctggccggcaccctgcccggcagcaagagacagctgcagacccccaaggagaaggcccaggccctggaggacctggccggcttcaaggagctgttccagacccccggccacaccgaggagctggtggccgccggcaagaccaccaagatcccctgcgacagcccccagagcgaccccgtggacacccccaccagcaccaagcagagacccaagagaagcatcagaaaggccgacgtggagggcgagctgctggcctgcagaaacctgatgcccagcgccggcaaggccatgcacacccccaagcccagcgtgggcgaggagaaggacatcatcatcttcgtgggcacccccgtgcagaagctggacctgaccgagaacctgaccggcagcaagagaagaccccagacccccaaggaggaggcccaggccctggaggacctgaccggcttcaaggagctgttccagacccccggccacaccgaggaggccgtggccgccggcaagaccaccaagatgccctgcgagagcagcccccccgagagcgccgacacccccaccagcaccagaagacagcccaagacccccctggagaagagagacgtgcagaaggagctgagcgccctgaagaagctgacccagaccagcggcgagaccacccacaccgacaaggtgcccggcggcgaggacaagagcatcaacgccttcagagagaccgccaagcagaagctggaccccgccgccagcgtgaccggcagcaagagacaccccaagaccaaggagaaggcccagcccctggaggacctggccggcctgaaggagctgttccagacccccgtgtgcaccgacaagcccaccacccacgagaagaccaccaagatcgcctgcagaagccagcccgaccccgtggacacccccaccagcagcaagccccagagcaagagaagcctgagaaaggtggacgtggaggaggagttcttcgccctgagaaagagaacccccagcgccggcaaggccatgcacacccccaagcccgccgtgagcggcgagaagaacatctacgccttcatgggcacccccgtgcagaagctggacctgaccgagaacctgaccggcagcaagagaagactgcagacccccaaggagaaggcccaggccctggaggacctggccggcttcaaggagctgttccagaccagaggccacaccgaggagagcatgaccaacgacaagaccgccaaggtggcctgcaagagcagccagcccgaccccgacaagaaccccgccagcagcaagagaagactgaagaccagcctgggcaaggtgggcgtgaaggaggagctgctggccgtgggcaagctgacccagaccagcggcgagaccacccacacccacaccgagcccaccggcgacggcaagagcatgaaggccttcatggagagccccaagcagatcctggacagcgccgccagcctgaccggcagcaagagacagctgagaacccccaagggcaagagcgaggtgcccgaggacctggccggcttcatcgagctgttccagacccccagccacaccaaggagagcatgaccaacgagaagaccaccaaggtgagctacagagccagccagcccgacctggtggacacccccaccagcagcaagccccagcccaagagaagcctgagaaaggccgacaccgaggaggagttcctggccttcagaaagcagacccccagcgccggcaaggccatgcacacccccaagcccgccgtgggcgaggagaaggacatcaacaccttcctgggcacccccgtgcagaagctggaccagcccggcaacctgcccggcagcaacagaagactgcagaccagaaaggagaaggcccaggccctggaggagctgaccggcttcagagagctgttccagaccccctgcaccgacaaccccaccaccgacgagaagaccaccaagaagatcctgtgcaagagcccccagagcgaccccgccgacacccccaccaacaccaagcagagacccaagagaagcctgaagaaggccgacgtggaggaggagttcctggccttcagaaagctgacccccagcgccggcaaggccatgcacacccccaaggccgccgtgggcgaggagaaggacatcaacaccttcgtgggcacccccgtggagaagctggacctgctgggcaacctgcccggcagcaagagaagaccccagacccccaaggagaaggccaaggccctggaggacctggccggcttcaaggagctgttccagacccccggccacaccgaggagagcatgaccgacgacaagatcaccgaggtgagctgcaagagcccccagcccgaccccgtgaagacccccaccagcagcaagcagagactgaagatcagcctgggcaaggtgggcgtgaaggaggaggtgctgcccgtgggcaagctgacccagaccagcggcaagaccacccagacccacagagagaccgccggcgacggcaagagcatcaaggccttcaaggagagcgccaagcagatgctggaccccgccaactacggcaccggcatggagagatggcccagaacccccaaggaggaggcccagagcctggaggacctggccggcttcaaggagctgttccagacccccgaccacaccgaggagagcaccaccgacgacaagaccaccaagatcgcctgcaagagccccccccccgagagcatggacacccccaccagcaccagaagaagacccaagacccccctgggcaagagagacatcgtggaggagctgagcgccctgaagcagctgacccagaccacccacaccgacaaggtgcccggcgacgaggacaagggcatcaacgtgttcagagagaccgccaagcagaagctggaccccgccgccagcgtgaccggcagcaagagacagcccagaacccccaagggcaaggcccagcccctggaggacctggccggcctgaaggagctgttccagacccccatctgcaccgacaagcccaccacccacgagaagaccaccaagatcgcctgcagaagcccccagcccgaccccgtgggcacccccaccatcttcaagccccagagcaagagaagcctgagaaaggccgacgtggaggaggagagcctggccctgagaaagagaacccccagcgtgggcaaggccatggacacccccaagcccgccggcggcgacgagaaggacatgaaggccttcatgggcacccccgtgcagaagctggacctgcccggcaacctgcccggcagcaagagatggccccagacccccaaggagaaggcccaggccctggaggacctggccggcttcaaggagctgttccagacccccggcaccgacaagcccaccaccgacgagaagaccaccaagatcgcctgcaagagcccccagcccgaccccgtggacacccccgccagcaccaagcagagacccaagagaaacctgagaaaggccgacgtggaggaggagttcctggccctgagaaagagaacccccagcgccggcaaggccatggacacccccaagcccgccgtgagcgacgagaagaacatcaacaccttcgtggagacccccgtgcagaagctggacctgctgggcaacctgcccggcagcaagagacagccccagacccccaaggagaaggccgaggccctggaggacctggtgggcttcaaggagctgttccagacccccggccacaccgaggagagcatgaccgacgacaagatcaccgaggtgagctgcaagagcccccagcccgagagcttcaagaccagcagaagcagcaagcagagactgaagatccccctggtgaaggtggacatgaaggaggagcccctggccgtgagcaagctgaccagaaccagcggcgagaccacccagacccacaccgagcccaccggcgacagcaagagcatcaaggccttcaaggagagccccaagcagatcctggaccccgccgccagcgtgaccggcagcagaagacagctgagaaccagaaaggagaaggccagagccctggaggacctggtggacttcaaggagctgttcagcgcccccggccacaccgaggagagcatgaccatcgacaagaacaccaagatcccctgcaagagccccccccccgagctgaccgacaccgccaccagcaccaagagatgccccaagaccagacccagaaaggaggtgaaggaggagctgagcgccgtggagagactgacccagaccagcggccagagcacccacacccacaaggagcccgccagcggcgacgagggcatcaaggtgctgaagcagagagccaagaagaagcccaaccccgtggaggaggagcccagcagaagaagacccagagcccccaaggagaaggcccagcccctggaggacctggccggcttcaccgagctgagcgagaccagcggccacacccaggagagcctgaccgccggcaaggccaccaagatcccctgcgagagcccccccctggaggtggtggacaccaccgccagcaccaagagacacctgagaaccagagtgcagaaggtgcaggtgaaggaggagcccagcgccgtgaagttcacccagaccagcggcgagaccaccgacgccgacaaggagcccgccggcgaggacaagggcatcaaggccctgaaggagagcgccaagcagacccccgcccccgccgccagcgtgaccggcagcagaagaagacccagagcccccagagagagcgcccaggccatcgaggacctggccggcttcaaggaccccgccgccggccacaccgaggagagcatgaccgacgacaagaccaccaagatcccctgcaagagcagccccgagctggaggacaccgccaccagcagcaagagaagacccagaaccagagcccagaaggtggaggtgaaggaggagctgctggccgtgggcaagctgacccagaccagcggcgagaccacccacaccgacaaggagcccgtgggcgagggcaagggcaccaaggccttcaagcagcccgccaagagaaagctggacgccgaggacgtgatcggcagcagaagacagcccagagcccccaaggagaaggcccagcccctggaggacctggccagcttccaggagctgagccagacccccggccacaccgaggagctggccaacggcgccgccgacagcttcaccagcgcccccaagcagacccccgacagcggcaagcccctgaagatcagcagaagagtgctgagagcccccaaggtggagcccgtgggcgacgtggtgagcaccagagaccccgtgaagagccagagcaagagcaacaccagcctgccccccctgcccttcaagagaggcggcggcaaggacggcagcgtgaccggcaccaagagactgagatgcatgcccgcccccgaggagatcgtggaggagctgcccgccagcaagaagcagagagtggcccccagagccagaggcaagagcagcgagcccgtggtgatcatgaagagaagcctgagaaccagcgccaagagaatcgagcccgccgaggagctgaacagcaacgacatgaagaccaacaaggaggagcacaagctgcaggacagcgtgcccgagaacaagggcatcagcctgagaagcagaagacagaacaagaccgaggccgagcagcagatcaccgaggtgttcgtgctggccgagagaatcgagatcaacagaaacgagaagaagcccatgaagaccagccccgagatggacatccagaaccccgacgacggcgccagaaagcccatccccagagacaaggtgaccgagaacaagagatgcctgagaagcgccagacagaacgagagcagccagcccaaggtggccgaggagagcggcggccagaagagcgccaaggtgctgatgcagaaccagaagggcaagggcgaggccggcaacagcgacagcatgtgcctgagaagcagaaagaccaagagccagcccgccgccagcaccctggagagcaagagcgtgcagagagtgaccagaagcgtgaagagatgcgccgagaaccccaagaaggccgaggacaacgtgtgcgtgaagaagatcagaaccagaagccacagagacagcgaggacatctag

SEQ ID NO: 9354 - DNA, 9768 bp, synthetic construct
  misc_feature 1..9768: note = Description of Artificial Sequence: Synthetic coding sequence
  source 1..9768: mol_type = other DNA
atgtggcccaccagaagactggtgaccatcaagagaagcggcgtggacggcccccacttccccctgagcctgagcacctgcctgttcggcagaggcatcgagtgcgacatcagaatccagctgcccgtggtgagcaagcagcactgcaagatcgagatccacgagcaggaggccatcctgcacaacttcagcagcaccaaccccacccaggtgaacggcagcgtgatcgacgagcccgtgagactgaagcacggcgacgtgatcaccatcatcgacagaagcttcagatacgagaacgagagcctgcagaacggcagaaagagcaccgagttccccagaaagatcagagagcaggagcccgccagaagagtgagcagaagcagcttcagcagcgaccccgacgagaaggcccaggacagcaaggcctacagcaagatcaccgagggcaaggtgagcggcaacccccaggtgcacatcaagaacgtgaaggaggacagcaccgccgacgacagcaaggacagcgtggcccagggcaccaccaacgtgcacagcagcgagcacgccggcagaaacggcagaaacgccgccgaccccatcagcggcgacttcaaggagatcagcagcgtgaagctggtgagcagatacggcgagctgaagagcgtgcccaccacccagtgcctggacaacagcaagaagaacgagagccccttctggaagctgtacgagagcgtgaagaaggagctggacgtgaagagccagaaggagaacgtgctgcagtactgcagaaagagcggcctgcagaccgactacgccaccgagaaggagagcgccgacggcctgcagggcgagacccagctgctggtgagcagaaagagcagacccaagagcggcggcagcggccacgccgtggccgagcccgccagccccgagcaggagctggaccagaacaagggcaagggcagagacgtggagagcgtgcagacccccagcaaggccgtgggcgccagcttccccctgtacgagcccgccaagatgaagacccccgtgcagtacagccagcagcagaacagcccccagaagcacaagaacaaggacctgtacaccaccggcagaagagagagcgtgaacctgggcaagagcgagggcttcaaggccggcgacaagaccctgacccccagaaagctgagcaccagaaacagaacccccgccaaggtggaggacgccgccgacagcgccaccaagcccgagaacctgagcagcaagaccagaggcagcatccccaccgacgtggaggtgctgcccaccgagaccgagatccacaacgagcccttcctgaccctgtggctgacccaggtggagagaaagatccagaaggacagcctgagcaagcccgagaagctgggcaccaccgccggccagatgtgcagcggcctgcccggcctgagcagcgtggacatcaacaacttcggcgacagcatcaacgagagcgagggcatccccctgaagagaagaagagtgagcttcggcggccacctgagacccgagctgttcgacgagaacctgccccccaacacccccctgaagagaggcgaggcccccaccaagagaaagagcctggtgatgcacaccccccccgtgctgaagaagatcatcaaggagcagccccagcccagcggcaagcaggagagcggcagcgagatccacgtggaggtgaaggcccagagcctggtgatcagcccccccgcccccagccccagaaagacccccgtggccagcgaccagagaagaagaagctgcaagaccgcccccgccagcagcagcaagagccagaccgaggtgcccaagagaggcggcgagagagtggccacctgcctgcagagagtgagcatcagcagaagccagcacgacatcctgcagatgatctgcagcaagagaagaagcggcgccagcgaggccaacctgatcgtggccaagagctgggccgacgtggtgaagctgggcgccaagcagacccagaccaaggtgatcaagcacggcccccagagaagcatgaacaagagacagagaagacccgccacccccaagaagcccgtgggcgaggtgcacagccagttcagcaccggccacgccaacagcccctgcaccatcatcatcggcaaggcccacaccgagaaggtgcacgtgcccgccagaccctacagagtgctgaacaacttcatcagcaaccagaagatggacttcaaggaggacctgagcggcatcgccgagatgttcaagacccccgtgaaggagcagccccagctgaccagcacctgccacatcgccatcagcaacagcgagaacctgctgggcaagcagttccagggcaccgacagcggcgaggagcccctgctgcccaccagcgagagcttcggcggcaacgtgttcttcagcgcccagaacgccgccaagcagcccagcgacaagtgcagcgccagcccccccctgagaagacagtgcatcagagagaacggcaacgtggccaagacccccagaaacacctacaagatgaccagcctggagaccaagaccagcgacaccgagaccgagcccagcaagaccgtgagcaccgccaacagaagcggcagaagcaccgagttcagaaacatccagaagctgcccgtggagagcaagagcgaggagaccaacaccgagatcgtggagtgcatcctgaagagaggccagaaggccaccctgctgcagcagagaagagagggcgagatgaaggagatcgagagacccttcgagacctacaaggagaacatcgagctgaaggagaacgacgagaagatgaaggccatgaagagaagcagaacctggggccagaagtgcgcccccatgagcgacctgaccgacctgaagagcctgcccgacaccgagctgatgaaggacaccgccagaggccagaacctgctgcagacccaggaccacgccaaggcccccaagagcgagaagggcaagatcaccaagatgccctgccagagcctgcagcccgagcccatcaacacccccacccacaccaagcagcagctgaaggccagcctgggcaaggtgggcgtgaaggaggagctgctggccgtgggcaagttcaccagaaccagcggcgagaccacccacacccacagagagcccgccggcgacggcaagagcatcagaaccttcaaggagagccccaagcagatcctggaccccgccgccagagtgaccggcatgaagaagtggcccagaacccccaaggaggaggcccagagcctggaggacctggccggcttcaaggagctgttccagacccccggccccagcgaggagagcatgaccgacgagaagaccaccaagatcgcctgcaagagccccccccccgagagcgtggacacccccaccagcaccaagcagtggcccaagagaagcctgagaaaggccgacgtggaggaggagttcctggccctgagaaagctgacccccagcgccggcaaggccatgctgacccccaagcccgccggcggcgacgagaaggacatcaaggccttcatgggcacccccgtgcagaagctggacctggccggcaccctgcccggcagcaagagacagctgcagacccccaaggagaaggcccaggccctggaggacctggccggcttcaaggagctgttccagacccccggccacaccgaggagctggtggccgccggcaagaccaccaagatcccctgcgacagcccccagagcgaccccgtggacacccccaccagcaccaagcagagacccaagagaagcatcagaaaggccgacgtggagggcgagctgctggcctgcagaaacctgatgcccagcgccggcaaggccatgcacacccccaagcccagcgtgggcgaggagaaggacatcatcatcttcgtgggcacccccgtgcagaagctggacctgaccgagaacctgaccggcagcaagagaagaccccagacccccaaggaggaggcccaggccctggaggacctgaccggcttcaaggagctgttccagacccccggccacaccgaggaggccgtggccgccggcaagaccaccaagatgccctgcgagagcagcccccccgagagcgccgacacccccaccagcaccagaagacagcccaagacccccctggagaagagagacgtgcagaaggagctgagcgccctgaagaagctgacccagaccagcggcgagaccacccacaccgacaaggtgcccggcggcgaggacaagagcatcaacgccttcagagagaccgccaagcagaagctggaccccgccgccagcgtgaccggcagcaagagacaccccaagaccaaggagaaggcccagcccctggaggacctggccggcctgaaggagctgttccagacccccgtgtgcaccgacaagcccaccacccacgagaagaccaccaagatcgcctgcagaagccagcccgaccccgtggacacccccaccagcagcaagccccagagcaagagaagcctgagaaaggtggacgtggaggaggagttcttcgccctgagaaagagaacccccagcgccggcaaggccatgcacacccccaagcccgccgtgagcggcgagaagaacatctacgccttcatgggcacccccgtgcagaagctggacctgaccgagaacctgaccggcagcaagagaagactgcagacccccaaggagaaggcccaggccctggaggacctggccggcttcaaggagctgttccagaccagaggccacaccgaggagagcatgaccaacgacaagaccgccaaggtggcctgcaagagcagccagcccgaccccgacaagaaccccgccagcagcaagagaagactgaagaccagcctgggcaaggtgggcgtgaaggaggagctgctggccgtgggcaagctgacccagaccagcggcgagaccacccacacccacaccgagcccaccggcgacggcaagagcatgaaggccttcatggagagccccaagcagatcctggacagcgccgccagcctgaccggcagcaagagacagctgagaacccccaagggcaagagcgaggtgcccgaggacctggccggcttcatcgagctgttccagacccccagccacaccaaggagagcatgaccaacgagaagaccaccaaggtgagctacagagccagccagcccgacctggtggacacccccaccagcagcaagccccagcccaagagaagcctgagaaaggccgacaccgaggaggagttcctggccttcagaaagcagacccccagcgccggcaaggccatgcacacccccaagcccgccgtgggcgaggagaaggacatcaacaccttcctgggcacccccgtgcagaagctggaccagcccggcaacctgcccggcagcaacagaagactgcagaccagaaaggagaaggcccaggccctggaggagctgaccggcttcagagagctgttccagaccccctgcaccgacaaccccaccaccgacgagaagaccaccaagaagatcctgtgcaagagcccccagagcgaccccgccgacacccccaccaacaccaagcagagacccaagagaagcctgaagaaggccgacgtggaggaggagttcctggccttcagaaagctgacccccagcgccggcaaggccatgcacacccccaaggccgccgtgggcgaggagaaggacatcaacaccttcgtgggcacccccgtggagaagctggacctgctgggcaacctgcccggcagcaagagaagaccccagacccccaaggagaaggccaaggccctggaggacctggccggcttcaaggagctgttccagacccccggccacaccgaggagagcatgaccgacgacaagatcaccgaggtgagctgcaagagcccccagcccgaccccgtgaagacccccaccagcagcaagcagagactgaagatcagcctgggcaaggtgggcgtgaaggaggaggtgctgcccgtgggcaagctgacccagaccagcggcaagaccacccagacccacagagagaccgccggcgacggcaagagcatcaaggccttcaaggagagcgccaagcagatgctggaccccgccaactacggcaccggcatggagagatggcccagaacccccaaggaggaggcccagagcctggaggacctggccggcttcaaggagctgttccagacccccgaccacaccgaggagagcaccaccgacgacaagaccaccaagatcgcctgcaagagccccccccccgagagcatggacacccccaccagcaccagaagaagacccaagacccccctgggcaagagagacatcgtggaggagctgagcgccctgaagcagctgacccagaccacccacaccgacaaggtgcccggcgacgaggacaagggcatcaacgtgttcagagagaccgccaagcagaagctggaccccgccgccagcgtgaccggcagcaagagacagcccagaacccccaagggcaaggcccagcccctggaggacctggccggcctgaaggagctgttccagacccccatctgcaccgacaagcccaccacccacgagaagaccaccaagatcgcctgcagaagcccccagcccgaccccgtgggcacccccaccatcttcaagccccagagcaagagaagcctgagaaaggccgacgtggaggaggagagcctggccctgagaaagagaacccccagcgtgggcaaggccatggacacccccaagcccgccggcggcgacgagaaggacatgaaggccttcatgggcacccccgtgcagaagctggacctgcccggcaacctgcccggcagcaagagatggccccagacccccaaggagaaggcccaggccctggaggacctggccggcttcaaggagctgttccagacccccggcaccgacaagcccaccaccgacgagaagaccaccaagatcgcctgcaagagcccccagcccgaccccgtggacacccccgccagcaccaagcagagacccaagagaaacctgagaaaggccgacgtggaggaggagttcctggccctgagaaagagaacccccagcgccggcaaggccatggacacccccaagcccgccgtgagcgacgagaagaacatcaacaccttcgtggagacccccgtgcagaagctggacctgctgggcaacctgcccggcagcaagagacagccccagacccccaaggagaaggccgaggccctggaggacctggtgggcttcaaggagctgttccagacccccggccacaccgaggagagcatgaccgacgacaagatcaccgaggtgagctgcaagagcccccagcccgagagcttcaagaccagcagaagcagcaagcagagactgaagatccccctggtgaaggtggacatgaaggaggagcccctggccgtgagcaagctgaccagaaccagcggcgagaccacccagacccacaccgagcccaccggcgacagcaagagcatcaaggccttcaaggagagccccaagcagatcctggaccccgccgccagcgtgaccggcagcagaagacagctgagaaccagaaaggagaaggccagagccctggaggacctggtggacttcaaggagctgttcagcgcccccggccacaccgaggagagcatgaccatcgacaagaacaccaagatcccctgcaagagccccccccccgagctgaccgacaccgccaccagcaccaagagatgccccaagaccagacccagaaaggaggtgaaggaggagctgagcgccgtggagagactgacccagaccagcggccagagcacccacacccacaaggagcccgccagcggcgacgagggcatcaaggtgctgaagcagagagccaagaagaagcccaaccccgtggaggaggagcccagcagaagaagacccagagcccccaaggagaaggcccagcccctggaggacctggccggcttcaccgagctgagcgagaccagcggccacacccaggagagcctgaccgccggcaaggccaccaagatcccctgcgagagcccccccctggaggtggtggacaccaccgccagcaccaagagacacctgagaaccagagtgcagaaggtgcaggtgaaggaggagcccagcgccgtgaagttcacccagaccagcggcgagaccaccgacgccgacaaggagcccgccggcgaggacaagggcatcaaggccctgaaggagagcgccaagcagacccccgcccccgccgccagcgtgaccggcagcagaagaagacccagagcccccagagagagcgcccaggccatcgaggacctggccggcttcaaggaccccgccgccggccacaccgaggagagcatgaccgacgacaagaccaccaagatcccctgcaagagcagccccgagctggaggacaccgccaccagcagcaagagaagacccagaaccagagcccagaaggtggaggtgaaggaggagctgctggccgtgggcaagctgacccagaccagcggcgagaccacccacaccgacaaggagcccgtgggcgagggcaagggcaccaaggccttcaagcagcccgccaagagaaagctggacgccgaggacgtgatcggcagcagaagacagcccagagcccccaaggagaaggcccagcccctggaggacctggccagcttccaggagctgagccagacccccggccacaccgaggagctggccaacggcgccgccgacagcttcaccagcgcccccaagcagacccccgacagcggcaagcccctgaagatcagcagaagagtgctgagagcccccaaggtggagcccgtgggcgacgtggtgagcaccagagaccccgtgaagagccagagcaagagcaacaccagcctgccccccctgcccttcaagagaggcggcggcaaggacggcagcgtgaccggcaccaagagactgagatgcatgcccgcccccgaggagatcgtggaggagctgcccgccagcaagaagcagagagtggcccccagagccagaggcaagagcagcgagcccgtggtgatcatgaagagaagcctgagaaccagcgccaagagaatcgagcccgccgaggagctgaacagcaacgacatgaagaccaacaaggaggagcacaagctgcaggacagcgtgcccgagaacaagggcatcagcctgagaagcagaagacagaacaagaccgaggccgagcagcagatcaccgaggtgttcgtgctggccgagagaatcgagatcaacagaaacgagaagaagcccatgaagaccagccccgagatggacatccagaaccccgacgacggcgccagaaagcccatccccagagacaaggtgaccgagaacaagagatgcctgagaagcgccagacagaacgagagcagccagcccaaggtggccgaggagagcggcggccagaagagcgccaaggtgctgatgcagaaccagaagggcaagggcgaggccggcaacagcgacagcatgtgcctgagaagcagaaagaccaagagccagcccgccgccagcaccctggagagcaagagcgtgcagagagtgaccagaagcgtgaagagatgcgccgagaaccccaagaaggccgaggacaacgtgtgcgtgaagaagatcagaaccagaagccacagagacagcgaggacatctag

SEQ ID NO: 9355 - DNA, 141 bp, synthetic construct
  misc_feature 1..141: note = Description of Artificial Sequence: Synthetic coding sequence
  source 1..141: mol_type = other DNA
atgtggcccaccagaagactggtgaccatcaagagaagcggcgtggacggcccccacttccccctgagcctgagcacctgcctgttcggcagaagaaagtgcgtgctgcagtgcaccgagtgcagcaagaccgccatctag

SEQ ID NO: 9356 - DNA, 1557 bp, synthetic construct
  misc_feature 1..1557: note = Description of Artificial Sequence: Synthetic coding sequence
  source 1..1557: mol_type = other DNA
atgctgagagtggtgagctggaacatcaacggcatcagaagacccctgcagggcgtggccaaccaggagcccagcaactgcgccgccgtggccgtgggcagaatcctggacgagctggacgccgacatcgtgtgcctgcaggagaccaaggtgaccagagacgccctgaccgagcccctggccatcgtggagggctacaacagctacttcagcttcagcagaaacagaagcggctacagcggcgtggccaccttctgcaaggacaacgccacccccgtggccgccgaggagggcctgagcggcctgttcgccacccagaacggcgacgtgggctgctacggcaacatggacgagttcacccaggaggagctgagagccctggacagcgagggcagagccctgctgacccagcacaagatcagaacctgggagggcaaggagaagaccctgaccctgatcaacgtgtactgcccccacgccgaccccggcagacccgagagactggtgttcaagatgagattctacagactgctgcagatcagagccgaggccctgctggccgccggcagccacgtgatcatcctgggcgacctgaacaccgcccacagacccatcgaccactgggacgccgtgaacctggagtgcttcgaggaggaccccggcagaaagtggatggacagcctgctgagcaacctgggctgccagagcgccagccacgtgggccccttcatcgacagctacagatgcttccagcccaagcaggagggcgccttcacctgctggagcgccgtgaccggcgccagacacctgaactacggcagcagactggactacgtgctgggcgacagaaccctggtgatcgacaccttccaggccagcttcctgctgcccgaggtgatgggcagcgaccactgccccgtgggcgccgtgctgagcgtgagcagcgtgcccgccaagcagtgcccccccctgtgcaccagattcctgcccgagttcgccggcacccagctgaagatcctgagattcctggtgcccctggagcagagccccgtgctggagcagagcaccctgcagcacaacaaccagaccagagtgcagacctgccagaacaaggcccaggtgagaagcaccagaccccagcccagccaggtgggcagcagcagaggccagaagaacctgaagagctacttccagcccagccccagctgcccccaggccagccccgacatcgagctgcccagcctgcccctgatgagcgccctgatgacccccaagacccccgaggagaaggccgtggccaaggtggtgaagggccaggccaagaccagcgaggccaaggacgagaaggagctgagaaccagcttctggaagagcgtgctggccggccccctgagaacccccctgtgcggcggccacagagagccctgcgtgatgagaaccgtgaagaagcccggccccaacctgggcagaagattctacatgtgcgccagacccagaggcccccccaccgaccccagcagcagatgcaacttcttcctgtggagcagacccagctag

SEQ ID NO: 9357 - DNA, 1191 bp, synthetic construct
  misc_feature 1..1191: note = Description of Artificial Sequence: Synthetic coding sequence
  source 1..1191: mol_type = other DNA
atgcccagagtgaaggccgcccaggccggcagacagagcagcgccaagagacacctggccgagcagttcgccgtgggcgagatcatcaccgacatggccaagaaggagtggaaggtgggcctgcccatcggccagggcggcttcggctgcatctacctggccgacatgaacagcagcgagagcgtgggcagcgacgccccctgcgtggtgaaggtggagcccagcgacaacggccccctgttcaccgagctgaagttctaccagagagccgccaagcccgagcagatccagaagtggatcagaaccagaaagctgaagtacctgggcgtgcccaagtactggggcagcggcctgcacgacaagaacggcaagagctacagattcatgatcatggacagattcggcagcgacctgcagaagatctacgaggccaacgccaagagattcagcagaaagaccgtgctgcagctgagcctgagaatcctggacatcctggagtacatccacgagcacgagtacgtgcacggcgacatcaaggccagcaacctgctgctgaactacaagaaccccgaccaggtgtacctggtggactacggcctggcctacagatactgccccgagggcgtgcacaaggagtacaaggaggaccccaagagatgccacgacggcaccatcgagttcaccagcatcgacgcccacaacggcgtggcccccagcagaagaggcgacctggagatcctgggctactgcatgatccagtggctgaccggccacctgccctgggaggacaacctgaaggaccccaagtacgtgagagacagcaagatcagatacagagagaacatcgccagcctgatggacaagtgcttccccgagaagaacaagcccggcgagatcgccaagtacatggagaccgtgaagctgctggactacaccgagaagcccctgtacgagaacctgagagacatcctgctgcagggcctgaaggccatcggcagcaaggacgacggcaagctggacctgagcgtggtggagaacggcggcctgaaggccaagaccatcaccaagaagagaaagaaggagatcgaggagagcaaggagcccggcgtggaggacaccgagtggagcaacacccagaccgaggaggccatccagaccagaagcagaaccagaaagagagtgcagaagtag

SEQ ID NO: 9358 - DNA, 957 bp, synthetic construct
  misc_feature 1..957: note = Description of Artificial Sequence: Synthetic coding sequence
  source 1..957: mol_type = other DNA
atgcccaagagaggcaagaagggcgccgtggccgaggacggcgacgagctgagaaccgagcccgaggccaagaagagcaagaccgccgccaagaagaacgacaaggaggccgccggcgagggccccgccctgtacgaggacccccccgaccagaagaccagccccagcggcaagcccgccaccctgaagatctgcagctggaacgtggacggcctgagagcctggatcaagaagaagggcctggactgggtgaaggaggaggcccccgacatcctgtgcctgcaggagaccaagtgcagcgagaacaagctgcccgccgagctgcaggagctgcccggcctgagccaccagtactggagcgcccccagcgacaaggagggctacagcggcgtgggcctgctgagcagacagtgccccctgaaggtgagctacggcatcggcgacgaggagcacgaccaggagggcagagtgatcgtggccgagttcgacagcttcgtgctggtgaccgcctacgtgcccaacgccggcagaggcctggtgagactggagtacagacagagatgggacgaggccttcagaaagttcctgaagggcctggccagcagaaagcccctggtgctgtgcggcgacctgaacgtggcccacgaggagatcgacctgagaaaccccaagggcaacaagaagaacgccggcttcaccccccaggagagacagggcttcggcgagctgctgcaggccgtgcccctggccgacagcttcagacacctgtaccccaacaccccctacgcctacaccttctggacctacatgatgaacgccagaagcaagaacgtgggctggagactggactacttcctgctgagccacagcctgctgcccgccctgtgcgacagcaagatcagaagcaaggccctgggcagcgaccactgccccatcaccctgtacctggccctgtag

SEQ ID NO: 9359 - DNA, 792 bp, synthetic construct
  misc_feature 1..792: note = Description of Artificial Sequence: Synthetic coding sequence
  source 1..792: mol_type = other DNA
atgcccaagagaggcaagaagggcgccgtggccgaggacggcgacgagctgagaaccgagcccgaggccaagaagagcaagaccgccgccaagaagaacgacaaggaggccgccggcgagggccccgccctgtacgaggacccccccgaccagaagaccagccccagcggcaagcccgccaccctgaagatctgcagctggaacgtggacggcctgagagcctggatcaagaagaagggcctggactgggtgaaggaggaggcccccgacatcctgtgcctgcaggagaccaagtgcagcgagaacaagctgcccgccgagctgcaggagctgcccggcctgagccaccagtactggagcgcccccagcgacaaggagggctacagcggcgtgggcctgctgagcagacagtgccccctgaaggtgagctacggcatcggcgacgaggagcacgaccaggagggcagagtgatcgtggccgagttcgacagcttcgtgctggtgaccgcctacgtgcccaacgccggcagaggcctggtgagactggagtacagacagagatgggacgaggccttcagaaagttcctgaagggcctggccagcagaaagcccctggtgctgtgcggcgacctgaacgtggcccacgaggagatcgacctgagaaaccccaagggcaacaagaagaacgccggcttcaccccccaggagagacagggcttcggcgagctgctgcaggccgtgcccctggccgacagcttcagacacctgtaccccaacaccccctacgcctag

SEQ ID NO: 9360 - DNA, 957 bp, synthetic construct; identical to SEQ ID NO: 9358
  misc_feature 1..957: note = Description of Artificial Sequence: Synthetic coding sequence
  source 1..957: mol_type = other DNA

SEQ ID NO: 9361 - DNA, 525 bp, synthetic construct
  misc_feature 1..525: note = Description of Artificial Sequence: Synthetic coding sequence
  source 1..525: mol_type = other DNA
atgcccaagagaggcaagaagggcgccgtggccgaggacggcgacgagctgagaaccgagcccgaggccaagaagagcaagaccgccgccaagaagaacgacaaggaggccgccggcgagggccccgccctgtacgaggacccccccgaccagaagaccagccccagcggcaagcccgccaccctgaagatctgcagctggaacgtggacggcctgagagcctggatcaagaagaagggcctggactgggtgaaggaggaggcccccgacatcctgtgcctgcaggagaccaagtgcagcgagaacaagctgcccgccgagctgcaggagctgcccggcctgagccaccagtactggagcgcccccagcgacaaggagggctacagcggcgtgggcctgctgagcagacagtgccccctgaaggtgagctacggcatcggcgacgaggagcacgaccaggagggcagagtgatcgtggccgagttcgacagcttcgtgctggtgaccgcctacgtgcccaactag

SEQ ID NO: 9362 - DNA, 327 bp, synthetic construct
  misc_feature 1..327: note = Description of Artificial Sequence: Synthetic coding sequence
  source 1..327: mol_type = other DNA
atgcccaagagaggcaagaagggcgccgtggccgaggacggcgacgagctgagaaccgagcccgaggccaagaagagcaagaccgccgccaagaagaacgacaaggaggccgccggcgagggccccgccctgtacgaggacccccccgaccagaagaccagccccagcggcaagcccgccaccctgaagatctgcagctggaacgtggacggcctgagagcctggatcaagaagaagggcctggactgggtgaaggaggaggcccccgacatcctgtgcctgcaggagaccaagtgcagcgagaacaagctgcccgccgagctgtag

SEQ ID NO: 9363 - DNA, 441 bp, synthetic construct
  misc_feature 1..441: note = Description of Artificial Sequence: Synthetic coding sequence
  source 1..441: mol_type = other DNA
atgcccaagagaggcaagaagggcgccgtggccgaggacggcgacgagctgagaaccgagcccgaggccaagaagagcaagaccgccgccaagaagaacgacaaggaggccgccggcgagggccccgccctgtacgaggacccccccgaccagaagaccagccccagcggcaagcccgccaccctgaagatctgcagctggaacgtggacggcctgagagcctggatcaagaagaagggcctggactgggtgaaggaggaggcccccgacatcctgtgcctgcaggagaccaagtgcagcgagaacaagctgcccgccgagctgcaggagctgcccggcctgagccaccagtactggagcgcccccagcgacaaggagggctacagcggcgtgggcctgctgagcagacagtgccccctgaaggtgagctacggcatctag

SEQ ID NO: 9364 - DNA, 975 bp, synthetic construct
  misc_feature 1..975: note = Description of Artificial Sequence: Synthetic coding sequence
  source 1..975: mol_type = other DNA
atgttcagatgcggcggcctggccgccggcgccctgaagcagaagctggtgcccctggtgagaaccgtgtgcgtgagaagccccagacagagaaacagactgcccggcaacctgttccagagatggcacgtgcccctggagctgcagatgaccagacagatggccagcagcggcgccagcggcggcaagatcgacaacagcgtgctggtgctgatcgtgggcctgagcaccgtgggcgccggcgcctacgcctacaagaccatgaaggaggacgagaagagatacaacgagagaatcagcggcctgggcctgacccccgagcagaagcagaagaaggccgccctgagcgccagcgagggcgaggaggtgccccaggacaaggcccccagccacgtgcccttcctgctgatcggcggcggcaccgccgccttcgccgccgccagaagcatcagagccagagaccccggcgccagagtgctgatcgtgagcgaggaccccgagctgccctacatgagaccccccctgagcaaggagctgtggttcagcgacgaccccaacgtgaccaagaccctgagattcaagcagtggaacggcaaggagagaagcatctacttccagccccccagcttctacgtgagcgcccaggacctgccccacatcgagaacggcggcgtggccgtgctgaccggcaagaaggtggtgcagctggacgtgagagacaacatggtgaagctgaacgacggcagccagatcacctacgagaagtgcctgatcgccaccggcggcacccccagaagcctgagcgccatcgacagagccggcgccgaggtgaagagcagaaccaccctgttcagaaagatcggcgacttcagaagcctggagaagatcagcagagaggtgaagagcatcaccatcatcggcggcggcttcctgggcagcgagctggcctgcgccctgggcagaaaggacatctag

SEQ ID NO: 9365 - DNA, 1842 bp, synthetic construct
  misc_feature 1..1842: note = Description of Artificial Sequence: Synthetic coding sequence
  source 1..1842: mol_type = other DNA
atgttcagatgcggcggcctggccgccggcgccctgaagcagaagctggtgcccctggtgagaaccgtgtgcgtgagaagccccagacagagaaacagactgcccggcaacctgttccagagatggcacgtgcccctggagctgcagatgaccagacagatggccagcagcggcgccagcggcggcaagatcgacaacagcgtgctggtgctgatcgtgggcctgagcaccgtgggcgccggcgcctacgcctacaagaccatgaaggaggacgagaagagatacaacgagagaatcagcggcctgggcctgacccccgagcagaagcagaagaaggccgccctgagcgccagcgagggcgaggaggtgccccaggacaaggcccccagccacgtgcccttcctgctgatcggcggcggcaccgccgccttcgccgccgccagaagcatcagagccagagaccccggcgccagagtgctgatcgtgagcgaggaccccgagctgccctacatgagaccccccctgagcaaggagctgtggttcagcgacgaccccaacgtgaccaagaccctgagattcaagcagtggaacggcaaggagagaagcatctacttccagccccccagcttctacgtgagcgcccaggacctgccccacatcgagaacggcggcgtggccgtgctgaccggcaagaaggtggtgcagctggacgtgagagacaacatggtgaagctgaacgacggcagccagatcacctacgagaagtgcctgatcgccaccggcggcacccccagaagcctgagcgccatcgacagagccggcgccgaggtgaagagcagaaccaccctgttcagaaagatcggcgacttcagaagcctggagaagatcagcagagaggtgaagagcatcaccatcatcggcggcggcttcctgggcagcgagctggcctgcgccctgggcagaaaggccagagccctgggcaccgaggtgatccagctgttccccgagaagggcaacatgggcaagatcctgcccgagtacctgagcaactggaccatggagaaggtgagaagagagggcgtgaaggtgatgcccaacgccatcgtgcagagcgtgggcgtgagcagcggcaagctgctgatcaagctgaaggacggcagaaaggtggagaccgaccacatcgtggccgccgtgggcctggagcccaacgtggagctggccaagaccggcggcctggagatcgacagcgacttcggcggcttcagagtgaacgccgagctgcaggccagaagcaacatctgggtggccggcgacgccgcctgcttctacgacatcaagctgggcagaagaagagtggagcaccacgaccacgccgtggtgagcggcagactggccggcgagaacatgaccggcgccgccaagccctactggcaccagagcatgttctggagcgacctgggccccgacgtgggctacgaggccatcggcctggtggacagcagcctgcccaccgtgggcgtgttcgccaaggccaccgcccaggacaaccccaagagcgccaccgagcagagcggcaccggcatcagaagcgagagcgagaccgagagcgaggccagcgagatcaccatcccccccagcacccccgccgtgccccaggcccccgtgcagggcgaggactacggcaagggcgtgatcttctacctgagagacaaggtggtggtgggcatcgtgctgtggaacatcttcaacagaatgcccatcgccagaaagatcatcaaggacggcgagcagcacgaggacctgaacgaggtggccaagctgttcaacatccacgaggactag

SEQ ID NO: 9366 - DNA, 1830 bp, synthetic construct
  misc_feature 1..1830: note = Description of Artificial Sequence: Synthetic coding sequence
  source 1..1830: mol_type = other DNA
atgttcagatgcggcggcctggccgccggcgccctgaagcagaagctggtgcccctggtgagaaccgtgtgcgtgagaagccccagacagagaaacagactgcccgtggtgcagagccaccacctgggcagccccagcagaagcctggccagcaccggcgccagcggcaaggacggcagcaacctggtgtacttcctgatcgtgggcgccaccgtgaccggcgccggcgtgtactacgcctacaagaccatgaaggaggacgagaagagatacaacgagagaatcagcggcctgggcctgacccccgagcagaagcagaagaaggccgccctgagcgccagcgagggcgaggaggtgccccaggacaaggcccccagccacgtgcccttcctgctgatcggcggcggcaccgccgccttcgccgccgccagaagcatcagagccagagaccccggcgccagagtgctgatcgtgagcgaggaccccgagctgccctacatgagaccccccctgagcaaggagctgtggttcagcgacgaccccaacgtgaccaagaccctgagattcaagcagtggaacggcaaggagagaagcatctacttccagccccccagcttctacgtgagcgcccaggacctgccccacatcgagaacggcggcgtggccgtgctgaccggcaagaaggtggtgcagctggacgtgagagacaacatggtgaagctgaacgacggcagccagatcacctacgagaagtgcctgatcgccaccggcggcacccccagaagcctgagcgccatcgacagagccggcgccgaggtgaagagcagaaccaccctgttcagaaagatcggcgacttcagaagcctggagaagatcagcagagaggtgaagagcatcaccatcatcggcggcggcttcctgggcagcgagctggcctgcgccctgggcagaaaggccagagccctgggcaccgaggtgatccagctgttccccgagaagggcaacatgggcaagatcctgcccgagtacctgagcaactggaccatggagaaggtgagaagagagggcgtgaaggtgatgcccaacgccatcgtgcagagcgtgggcgtgagcagcggcaagctgctgatcaagctgaaggacggcagaaaggtggagaccgaccacatcgtggccgccgtgggcctggagcccaacgtggagctggccaagaccggcggcctggagatcgacagcgacttcggcggcttcagagtgaacgccgagctgcaggccagaagcaacatctgggtggccggcgacgccgcctgcttctacgacatcaagctgggcagaagaagagtggagcaccacgaccacgccgtggtgagcggcagactggccggcgagaacatgaccggcgccgccaagccctactggcaccagagcatgttctggagcgacctgggccccgacgtgggctacgaggccatcggcctggtggacagcagcctgcccaccgtgggcgtgttcgccaaggccaccgcccaggacaaccccaagagcgccaccgagcagagcggcaccggcatcagaagcgagagcgagaccgagagcgaggccagcgagatcaccatcccccccagcacccccgccgtgccccaggcccccgtgcagggcgaggactacggcaagggcgtgatcttctacctgagagacaaggtggtggtgggcatcgtgctgtggaacatcttcaacagaatgcccatcgccagaaagatcatcaaggacggcgagcagcacgaggacctgaacgaggtggccaagctgttcaacatccacgaggactag

SEQ ID NO: 9367 - DNA, 981 bp, synthetic construct
  misc_feature 1..981: note = Description of Artificial Sequence: Synthetic coding sequence
  source 1..981: mol_type = other DNA
atgttcagatgcggcggcctggccgccggcgccctgaagcagaagctggtgcccctggtgagaaccgtgtgcgtgagaagccccagacagagaaacagactgcccgccagagccctgggcaccgaggtgatccagctgttccccgagaagggcaacatgggcaagatcctgcccgagtacctgagcaactggaccatggagaaggtgagaagagagggcgtgaaggtgatgcccaacgccatcgtgcagagcgtgggcgtgagcagcggcaagctgctgatcaagctgaaggacggcagaaaggtggagaccgaccacatcgtggccgccgtgggcctggagcccaacgtggagctggccaagaccggcggcctggagatcgacagcgacttcggcggcttcagagtgaacgccgagctgcaggccagaagcaacatctgggtggccggcgacgccgcctgcttctacgacatcaagctgggcagaagaagagtggagcaccacgaccacgccgtggtgagcggcagactggccggcgagaacatgaccggcgccgccaagccctactggcaccagagcatgttctggagcgacctgggccccgacgtgggctacgaggccatcggcctggtggacagcagcctgcccaccgtgggcgtgttcgccaaggccaccgcccaggacaaccccaagagcgccaccgagcagagcggcaccggcatcagaagcgagagcgagaccgagagcgaggccagcgagatcaccatcccccccagcacccccgccgtgccccaggcccccgtgcagggcgaggactacggcaagggcgtgatcttctacctgagagacaaggtggtggtgggcatcgtgctgtggaacatcttcaacagaatgcccatcgccagaaagatcatcaaggacggcgagcagcacgaggacctgaacgaggtggccaagctgttcaacatccacgaggactag

SEQ ID NO: 9368 - DNA, 786 bp, synthetic construct
  misc_feature 1..786: note = Description of Artificial Sequence: Synthetic coding sequence
  source 1..786: mol_type = other DNA
atggagaaggtgagaagagagggcgtgaaggtgatgcccaacgccatcgtgcagagcgtgggcgtgagcagcggcaagctgctgatcaagctgaaggacggcagaaaggtggagaccgaccacatcgtggccgccgtgggcctggagcccaacgtggagctggccaagaccggcggcctggagatcgacagcgacttcggcggcttcagagtgaacgccgagctgcaggccagaagcaacatctgggtggccggcgacgccgcctgcttctacgacatcaagctgggcagaagaagagtggagcaccacgaccacgccgtggtgagcggcagactggccggcgagaacatgaccggcgccgccaagccctactggcaccagagcatgttctggagcgacctgggccccgacgtgggctacgaggccatcggcctggtggacagcagcctgcccaccgtgggcgtgttcgccaaggccaccgcccaggacaaccccaagagcgccaccgagcagagcggcaccggcatcagaagcgagagcgagaccgagagcgaggccagcgagatcaccatcccccccagcacccccgccgtgccccaggcccccgtgcagggcgaggactacggcaagggcgtgatcttctacctgagagacaaggtggtggtgggcatcgtgctgtggaacatcttcaacagaatgcccatcgccagaaagatcatcaaggacggcgagcagcacgaggacctgaacgaggtggccaagctgttcaacatccacgaggactag

SEQ ID NO: 9369 - DNA, 825 bp, synthetic construct
  misc_feature 1..825: note = Description of Artificial Sequence: Synthetic coding sequence
  source 1..825: mol_type = other DNA
atgggcaagatcctgcccgagtacctgagcaactggaccatggagaaggtgagaagagagggcgtgaaggtgatgcccaacgccatcgtgcagagcgtgggcgtgagcagcggcaagctgctgatcaagctgaaggacggcagaaaggtggagaccgaccacatcgtggccgccgtgggcctggagcccaacgtggagctggccaagaccggcggcctggagatcgacagcgacttcggcggcttcagagtgaacgccgagctgcaggccagaagcaacatctgggtggccggcgacgccgcctgcttctacgacatcaagctgggcagaagaagagtggagcaccacgaccacgccgtggtgagcggcagactggccggcgagaacatgaccggcgccgccaagccctactggcaccagagcatgttctggagcgacctgggccccgacgtgggctacgaggccatcggcctggtggacagcagcctgcccaccgtgggcgtgttcgccaaggccaccgcccaggacaaccccaagagcgccaccgagcagagcggcaccggcatcagaagcgagagcgagaccgagagcgaggccagcgagatcaccatcccccccagcacccccgccgtgccccaggcccccgtgcagggcgaggactacggcaagggcgtgatcttctacctgagagacaaggtggtggtgggcatcgtgctgtggaacatcttcaacagaatgcccatcgccagaaagatcatcaaggacggcgagcagcacgaggacctgaacgaggtggccaagctgttcaacatccacgaggactag

SEQ ID NO: 9370 - DNA, 714 bp, synthetic construct
  misc_feature 1..714: note = Description of Artificial Sequence: Synthetic coding sequence
  source 1..714: mol_type = other DNA
atgaaggaggacgagaagagatacaacgagagaatcagcggcctgggcctgacccccgagcagaagcagaagaaggccgccctgagcgccagcgagggcgaggaggtgccccaggacaaggcccccagccacgtgcccttcctgctgatcggcggcggcaccgccgccttcgccgccgccagaagcatcagagccagagaccccggcgccagagtgctgatcgtgagcgaggaccccgagctgccctacatgagaccccccctgagcaaggagctgtggttcagcgacgaccccaacgtgaccaagaccctgagattcaagcagtggaacggcaaggagagaagcatctacttccagccccccagcttctacgtgagcgcccaggacctgccccacatcgagaacggcggcgtggccgtgctgaccggcaagaaggtggtgcagctggacgtgagagacaacatggtgaagctgaacgacggcagccagatcacctacgagaagtgcctgatcgccaccggcggcacccccagaagcctgagcgccatcgacagagccggcgccgaggtgaagagcagaaccaccctgttcagaaagatcggcgacttcagaagcctggagaagatcagcagagaggtgaagagcatcaccatcatcggcggcggcttcctgggcagcgagctggcctgcgccctgggcagaaaggacatctag

SEQ ID NO: 9371 - DNA, 1017 bp, synthetic construct
  misc_feature 1..1017: note = Description of Artificial Sequence: Synthetic coding sequence
  source 1..1017: mol_type = other DNA
atggacgccaaggccagaaactgcctgctgcagcacagagaggccctggagaaggacatcaagaccagctacatcatggaccacatgatcagcgacggcttcctgaccatcagcgaggaggagaaggtgagaaacgagcccacccagcagcagagagccgccatgctgatcaagatgatcctgaagaaggacaacgacagctacgtgagcttctacaacgccctgctgcacgagggctacaaggacctggccgccctgctgcacgacggcatccccgtggtgagcagcagcagcggcaaggacagcgtgagcggcatcaccagctacgtgagaaccgtgctgtgcgagggcggcgtgccccagagacccgtggtgttcgtgaccagaaagaagctggtgaacgccatccagcagaagctgagcaagctgaagggcgagcccggctgggtgaccatccacggcatggccggctgcggcaagagcgtgctggccgccgaggccgtgagagaccacagcctgctggagggctgcttccccggcggcgtgcactgggtgagcgtgggcaagcaggacaagagcggcctgctgatgaagctgcagaacctgtgcaccagactggaccaggacgagagcttcagccagagactgcccctgaacatcgaggaggccaaggacagactgagaatcctgatgctgagaaagcaccccagaagcctgctgatcctggacgacgtgtgggacagctgggtgctgaaggccttcgacagccagtgccagatcctgctgaccaccagagacaagagcgtgaccgacagcgtgatgggccccaagtacgtggtgcccgtggagagcagcctgggcaaggagaagggcctggagatcctgagcctgttcgtgaacatgaagaaggccgacctgcccgagcaggcccacagcatcatcaaggagtgcaaggtggtggagagatgccactggggcatcctgaccgacctgctgcacaagtggaaccagagctag

SEQ ID NO: 9372 - DNA, 3492 bp, synthetic construct
  misc_feature 1..3492: note = Description of Artificial Sequence: Synthetic coding sequence
  source 1..3492: mol_type = other DNA
atggacgccaaggccagaaactgcctgctgcagcacagagaggccctggagaaggacatcaagaccagctacatcatggaccacatgatcagcgacggcttcctgaccatcagcgaggaggagaaggtgagaaacgagcccacccagcagcagagagccgccatgctgatcaagatgatcctgaagaaggacaacgacagctacgtgagcttctacaacgccctgctgcacgagggctacaaggacctggccgccctgctgcacgacggcatccccgtggtgagcagcagcagcggcaaggacagcgtgagcggcatcaccagctacgtgagaaccgtgctgtgcgagggcggcgtgccccagagacccgtggtgttcgtgaccagaaagaagctggtgaacgccatccagcagaagctgagcaagctgaagggcgagcccggctgggtgaccatccacggcatggccggctgcggcaagagcgtgctggccgccgaggccgtgagagaccacagcctgctggagggctgcttccccggcggcgtgcactgggtgagcgtgggcaagcaggacaagagcggcctgctgatgaagctgcagaacctgtgcaccagactggaccaggacgagagcttcagccagagactgcccctgaacatcgaggaggccaaggacagactgagaatcctgatgctgagaaagcaccccagaagcctgctgatcctggacgacgtgtgggacagctgggtgctgaaggccttcgacagccagtgccagatcctgctgaccaccagagacaagagcgtgaccgacagcgtgatgggccccaagtacgtggtgcccgtggagagcagcctgggcaaggagaagggcctggagatcctgagcctgttcgtgaacatgaagaaggccgacctgcccgagcaggcccacagcatcatcaaggagtgcaagggcagccccctggtggtgagcctgatcggcgccctgctgagagacttccccaacagatgggagtactacctgaagcagctgcagaacaagcagttcaagagaatcagaaagagcagcagctacgactacgaggccctggacgaggccatgagcatcagcgtggagatgctgagagaggacatcaaggactactacaccgacctgagcatcctgcagaaggacgtgaaggtgcccaccaaggtgctgtgcatcctgtgggacatggagaccgaggaggtggaggacatcctgcaggagttcgtgaacaagagcctgctgttctgcgacagaaacggcaagagcttcagatactacctgcacgacctgcaggtggacttcctgaccgagaagaactgcagccagctgcaggacctgcacaagaagatcatcacccagttccagagataccaccagccccacaccctgagccccgaccaggaggactgcatgtactggtacaacttcctggcctaccacatggccagcgccaagatgcacaaggagctgtgcgccctgatgttcagcctggactggatcaaggccaagaccgagctggtgggccccgcccacctgatccacgagttcgtggagtacagacacatcctggacgagaaggactgcgccgtgagcgagaacttccaggagttcctgagcctgaacggccacctgctgggcagacagcccttccccaacatcgtgcagctgggcctgtgcgagcccgagaccagcgaggtgtaccagcaggccaagctgcaggccaagcaggaggtggacaacggcatgctgtacctggagtggatcaacaagaagaacatcaccaacctgagcagactggtggtgagaccccacaccgacgccgtgtaccacgcctgcttcagcgaggacggccagagaatcgccagctgcggcgccgacaagaccctgcaggtgttcaaggccgagaccggcgagaagctgctggagatcaaggcccacgaggacgaggtgctgtgctgcgccttcagcaccgacgacagattcatcgccacctgcagcgtggacaagaaggtgaagatctggaacagcatgaccggcgagctggtgcacacctacgacgagcacagcgagcaggtgaactgctgccacttcaccaacagcagccaccacctgctgctggccaccggcagcagcgactgcttcctgaagctgtgggacctgaaccagaaggagtgcagaaacaccatgttcggccacaccaacagcgtgaaccactgcagattcagccccgacgacaagctgctggccagctgcagcgccgacggcaccctgaagctgtgggacgccaccagcgccaacgagagaaagagcatcaacgtgaagcagttcttcctgaacctggaggacccccaggaggacatggaggtgatcgtgaagtgctgcagctggagcgccgacggcgccagaatcatggtggccgccaagaacaagatcttcctgtggaacaccgacagcagaagcaaggtggccgactgcagaggccacctgagctgggtgcacggcgtgatgttcagccccgacggcagcagcttcctgaccagcagcgacgaccagaccatcagactgtgggagaccaagaaggtgtgcaagaacagcgccgtgatgctgaagcaggaggtggacgtggtgttccaggagaacgaggtgatggtgctggccgtggaccacatcagaagactgcagctgatcaacggcagaaccggccagatcgactacctgaccgaggcccaggtgagctgctgctgcctgagcccccacctgcagtacatcgccttcggcgacgagaacggcgccatcgagatcctggagctggtgaacaacagaatcttccagagcagattccagcacaagaagaccgtgtggcacatccagttcaccgccgacgagaagaccctgatcagcagcagcgacgacgccgagatccaggtgtggaactggcagctggacaagtgcatcttcctgagaggccaccaggagaccgtgaaggacttcagactgctgaagaacagcagactgctgagctggagcttcgacggcaccgtgaaggtgtggaacatcatcaccggcaacaaggagaaggacttcgtgtgccaccagggcaccgtgctgagctgcgacatcagccacgacgccaccaagttcagcagcaccagcgccgacaagaccgccaagatctggaacgtgagcaacggcgagctgctgcacctgtgcgcccccctgagcgaggagggcgccgccacccacggcggctgggtgaccgacctgtgcttcagccccgacggcaagatgctgatcagcgccggcggctacatcaagtggtggaacgtggtgaccggcgagagcagccagaccttctacaccaacggcaccaacctgaagaagatccacgtgagccccgacttcaagacctacgtgaccgtggacaacctgggcatcctgtacatcctgcagaccctggagtag

SEQ ID NO: 9373 - DNA, 3618 bp, synthetic construct
  misc_feature 1..3618: note = Description of Artificial Sequence: Synthetic coding sequence
  source 1..3618: mol_type = other DNA
atggacgccaaggccagaaactgcctgctgcagcacagagaggccctggagaaggacatcaagaccagctacatcatggaccacatgatcagcgacggcttcctgaccatcagcgaggaggagaaggtgagaaacgagcccacccagcagcagagagccgccatgctgatcaagatgatcctgaagaaggacaacgacagctacgtgagcttctacaacgccctgctgcacgagggctacaaggacctggccgccctgctgcacgacggcatccccgtggtgagcagcagcagcggcaaggacagcgtgagcggcatcaccagctacgtgagaaccgtgctgtgcgagggcggcgtgccccagagacccgtggtgttcgtgaccagaaagaagctggtgaacgccatccagcagaagctgagcaagctgaagggcgagcccggctgggtgaccatccacggcatggccggctgcggcaagagcgtgctggccgccgaggccgtgagagaccacagcctgctggagggctgcttccccggcggcgtgcactgggtgagcgtgggcaagcaggacaagagcggcctgctgatgaagctgcagaacctgtgcaccagactggaccaggacgagagcttcagccagagactgcccctgaacatcgaggaggccaaggacagactgagaatcctgatgctgagaaagcaccccagaagcctgctgatcctggacgacgtgtgggacagctgggtgctgaaggccttcgacagccagtgccagatcctgctgaccaccagagacaagagcgtgaccgacagcgtgatgggccccaagtacgtggtgcccgtggagagcagcctgggcaaggagaagggcctggagatcctgagcctgttcgtgaacatgaagaaggccgacctgcccgagcaggcccacagcatcatcaaggagtgcaagggcagccccctggtggtgagcctgatcggcgccctgctgagagacttccccaacagatgggagtactacctgaagcagctgcagaacaagcagttcaagagaatcagaaagagcagcagctacgactacgaggccctggacgaggccatgagcatcagcgtggagatgctgagagaggacatcaaggactactacaccgacctgagcatcctgcagaaggacgtgaaggtgcccaccaaggtgctgtgcatcctgtgggacatggagaccgaggaggtggaggacatcctgcaggagttcgtgaacaagagcctgctgttctgcgacagaaacggcaagagcttcagatactacctgcacgacctgcaggtggacttcctgaccgagaagaactgcagccagctgcaggacctgcacaagaagatcatcacccagttccagagataccaccagccccacaccctgagccccgaccaggaggactgcatgtactggtacaacttcctggcctaccacatggccagcgccaagatgcacaaggagctgtgcgccctgatgttcagcctggactggatcaaggccaagaccgagctggtgggccccgcccacctgatccacgagttcgtggagtacagacacatcctggacgagaaggactgcgccgtgagcgagaacttccaggagttcctgagcctgaacggccacctgctgggcagacagcccttccccaacatcgtgcagctgggcctgtgcgagcccgagaccagcgaggtgtaccagcaggccaagctgcaggccaagcaggaggtggacaacggcatgctgtacctggagtggatcaacaagaagaacatcaccaacctgagcagactggtggtgagaccccacaccgacgccgtgtaccacgcctgcttcagcgaggacggccagagaatcgccagctgcggcgccgacaagaccctgcaggtgttcaaggccgagaccggcgagaagctgctggagatcaaggcccacgaggacgaggtgctgtgctgcgccttcagcaccgacgacagattcatcgccacctgcagcgtggacaagaaggtgaagatctggaacagcatgaccggcgagctggtgcacacctacgacgagcacagcgagcaggtgaactgctgccacttcaccaacagcagccaccacctgctgctggccaccggcagcagcgactgcttcctgaagctgtgggacctgaaccagaaggagtgcagaaacaccatgttcggccacaccaacagcgtgaaccactgcagattcagccccgacgacaagctgctggccagctgcagcgccgacggcaccctgaagctgtgggacgccaccagcgccaacgagagaaagagcatcaacgtgaagcagttcttcctgaacctggaggacccccaggaggacatggaggtgatcgtgaagtgctgcagctggagcgccgacggcgccagaatcatggtggccgccaagaacaagatcttcctgtggaacaccgacagcagaagcaaggtggccgactgcagaggccacctgagctgggtgcacggcgtgatgttcagccccgacggcagcagcttcctgaccagcagcgacgaccagaccatcagactgtgggagaccaagaaggtgtgcaagaacagcgccgtgatgctgaagcaggaggtggacgtggtgttccaggagaacgaggtgatggtgctggccgtggaccacatcagaagactgcagctgatcaacggcagaaccggccagatcgactacctgaccgaggcccaggtgagctgctgctgcctgagcccccacctgcagtacatcgccttcggcgacgagaacggcgccatcgagatcctggagctggtgaacaacagaatcttccagagcagattccagcacaagaagaccgtgtggcacatccagttcaccgccgacgagaagaccctgatcagcagcagcgacgacgccgagatccaggtgtggaactggcagctggacaagtgcatcttcctgagaggccaccaggagaccgtgaaggacttcagactgctgaagaacagcagactgctgagctggagcttcgacggcaccgtgaaggtgtggaacatcatcaccggcaacaaggagaaggacttcgtgtgccaccagggcaccgtgctgagctgcgacatcagccacgacgccaccaagttcagcagcaccagcgccgacaagaccgccaagatctggagcttcgacctgctgctgcccctgcacgagctgagaggccacaacggctgcgtgagatgcagcgccttcagcgtggacagcaccctgctggccaccggcgacgacaacggcgagatcagaatctggaacgtgagcaacggcgagctgctgcacctgtgcgcccccctgagcgaggagggcgccgccacccacggcggctgggtgaccgacctgtgcttcagccccgacggcaagatgctgatcagcgccggcggctacatcaagtggtggaacgtggtgaccggcgagagcagccagaccttctacaccaacggcaccaacctgaagaagatccacgtgagccccgacttcaagacctacgtgaccgtggacaacctgggcatcctgtacatcctgcagaccctggagtag

SEQ ID NO: 9374 - DNA, 3585 bp, synthetic construct
  misc_feature 1..3585: note = Description of Artificial Sequence: Synthetic coding sequence
  source 1..3585: mol_type = other DNA
atggacgccaaggccagaaactgcctgctgcagcacagagaggccctggagaaggacatcaagaccagctacatcatggaccacatgatcagcgacggcttcctgaccatcagcgaggaggagaaggtgagaaacgagcccacccagcagcagagagccgccatgctgatcaagatgatcctgaagaaggacaacgacagctacgtgagcttctacaacgccctgctgcacgagggctacaaggacctggccgccctgctgcacgacggcatccccgtggtgagcagcagcagcgtgagaaccgtgctgtgcgagggcggcgtgccccagagacccgtggtgttcgtgaccagaaagaagctggtgaacgccatccagcagaagctgagcaagctgaagggcgagcccggctgggtgaccatccacggcatggccggctgcggcaagagcgtgctggccgccgaggccgtgagagaccacagcctgctggagggctgcttccccggcggcgtgcactgggtgagcgtgggcaagcaggacaagagcggcctgctgatgaagctgcagaacctgtgcaccagactggaccaggacgagagcttcagccagagactgcccctgaacatcgaggaggccaaggacagactgagaatcctgatgctgagaaagcaccccagaagcctgctgatcctggacgacgtgtgggacagctgggtgctgaaggccttcgacagccagtgccagatcctgctgaccaccagagacaagagcgtgaccgacagcgtgatgggccccaagtacgtggtgcccgtggagagcagcctgggcaaggagaagggcctggagatcctgagcctgttcgtgaacatgaagaaggccgacctgcccgagcaggcccacagcatcatcaaggagtgcaagggcagccccctggtggtgagcctgatcggcgccctgctgagagacttccccaacagatgggagtactacctgaagcagctgcagaacaagcagttcaagagaatcagaaagagcagcagctacgactacgaggccctggacgaggccatgagcatcagcgtggagatgctgagagaggacatcaaggactactacaccgacctgagcatcctgcagaaggacgtgaaggtgcccaccaaggtgctgtgcatcctgtgggacatggagaccgaggaggtggaggacatcctgcaggagttcgtgaacaagagcctgctgttctgcgacagaaacggcaagagcttcagatactacctgcacgacctgcaggtggacttcctgaccgagaagaactgcagccagctgcaggacctgcacaagaagatcatcacccagttccagagataccaccagccccacaccctgagccccgaccaggaggactgcatgtactggtacaacttcctggcctaccacatggccagcgccaagatgcacaaggagctgtgcgccctgatgttcagcctggactggatcaaggccaagaccgagctggtgggccccgcccacctgatccacgagttcgtggagtacagacacatcctggacgagaaggactgcgccgtgagcgagaacttccaggagttcctgagcctgaacggccacctgctgggcagacagcccttccccaacatcgtgcagctgggcctgtgcgagcccgagaccagcgaggtgtaccagcaggccaagctgcaggccaagcaggaggtggacaacggcatgctgtacctggagtggatcaacaagaagaacatcaccaacctgagcagactggtggtgagaccccacaccgacgccgtgtaccacgcctgcttcagcgaggacggccagagaatcgccagctgcggcgccgacaagaccctgcaggtgttcaaggccgagaccggcgagaagctgctggagatcaaggcccacgaggacgaggtgctgtgctgcgccttcagcaccgacgacagattcatcgccacctgcagcgtggacaagaaggtgaagatctggaacagcatgaccggcgagctggtgcacacctacgacgagcacagcgagcaggtgaactgctgccacttcaccaacagcagccaccacctgctgctggccaccggcagcagcgactgcttcctgaagctgtgggacctgaaccagaaggagtgcagaaacaccatgttcggccacaccaacagcgtgaaccactgcagattcagccccgacgacaagctgctggccagctgcagcgccgacggcaccctgaagctgtgggacgccaccagcgccaacgagagaaagagcatcaacgtgaagcagttcttcctgaacctggaggacccccaggaggacatggaggtgatcgtgaagtgctgcagctggagcgccgacggcgccagaatcatggtggccgccaagaacaagatcttcctgtggaacaccgacagcagaagcaaggtggccgactgcagaggccacctgagctgggtgcacggcgtgatgttcagccccgacggcagcagcttcctgaccagcagcgacgaccagaccatcagactgtgggagaccaagaaggtgtgcaagaacagcgccgtgatgctgaagcaggaggtggacgtggtgttccaggagaacgaggtgatggtgctggccgtggaccacatcagaagactgcagctgatcaacggcagaaccggccagatcgactacctgaccgaggcccaggtgagctgctgctgcctgagcccccacctgcagtacatcgccttcggcgacgagaacggcgccatcgagatcctggagctggtgaacaacagaatcttccagagcagattccagcacaagaagaccgtgtggcacatccagttcaccgccgacgagaagaccctgatcagcagcagcgacgacgccgagatccaggtgtggaactggcagctggacaagtgcatcttcctgagaggccaccaggagaccgtgaaggacttcagactgctgaagaacagcagactgctgagctggagcttcgacggcaccgtgaaggtgtggaacatcatcaccggcaacaaggagaaggacttcgtgtgccaccagggcaccgtgctgagctgcgacatcagccacgacgccaccaagttcagcagcaccagcgccgacaagaccgccaagatctggagcttcgacctgctgctgcccctgcacgagctgagaggccacaacggctgcgtgagatgcagcgccttcagcgtggacagcaccctgctggccaccggcgacgacaacggcgagatcagaatctggaacgtgagcaacggcgagctgctgcacctgtgcgcccccctgagcgaggagggcgccgccacccacggcggctgggtgaccgacctgtgcttcagccccgacggcaagatgctgatcagcgccggcggctacatcaagtggtggaacgtggtgaccggcgagagcagccagaccttctacaccaacggcaccaacctgaagaagatccacgtgagccccgacttcaagacctacgtgaccgtggacaacctgggcatcctgtacatcctgcagaccctggagtag

SEQ ID NO: 9375 - DNA, 3618 bp, synthetic construct; identical to SEQ ID NO: 9373
  misc_feature 1..3618: note = Description of Artificial Sequence: Synthetic coding sequence
  source 1..3618: mol_type = other DNA

SEQ ID NO: 9376 - DNA, 3492 bp, synthetic construct; identical to SEQ ID NO: 9372
  misc_feature 1..3492: note = Description of Artificial Sequence: Synthetic coding sequence
  source 1..3492: mol_type = other DNA

SEQ ID NO: 9377 - DNA, 3714 bp, synthetic construct
  misc_feature 1..3714: note = Description of Artificial Sequence: Synthetic coding sequence
  source 1..3714: mol_type = other DNA
atggacgccaaggccagaaactgcctgctgcagcacagagaggccctggagaaggacatcaagaccagctacatcatggaccacatgatcagcgacggcttcctgaccatcagcgaggaggagaaggtgagaaacgagcccacccagcagcagagagccgccatgctgatcaagatgatcctgaagaaggacaacgacagctacgtgagcttctacaacgccctgctgcacgagggctacaaggacctggccgccctgctgcacgacggcatccccgtggtgagcagcagcagcgtgagaaccgtgctgtgcgagggcggcgtgccccagagacccgtggtgttcgtgaccagaaagaagctggtgaacgccatccagcagaagctgagcaagctgaagggcgagcccggctgggtgaccatccacggcatggccggctgcggcaagagcgtgctggccgccgaggccgtgagagaccacagcctgctggagggctgcttccccggcggcgtgcactgggtgagcgtgggcaagcaggacaagagcggcctgctgatgaagctgcagaacctgtgcaccagactggaccaggacgagagcttcagccagagactgcccctgaacatcgaggaggccaaggacagactgagaatcctgatgctgagaaagcaccccagaagcctgctgatcctggacgacgtgtgggacagctgggtgctgaaggccttcgacagccagtgccagatcctgctgaccaccagagacaagagcgtgaccgacagcgtgatgggccccaagtacgtggtgcccgtggagagcagcctgggcaaggagaagggcctggagatcctgagcctgttcgtgaacatgaagaaggccgacctgcccgagcaggcccacagcatcatcaaggagtgcaagggcagccccctggtggtgagcctgatcggcgccctgctgagagacttccccaacagatgggagtactacctgaagcagctgcagaacaagcagttcaagagaatcagaaagagcagcagctacgactacgaggccctggacgaggccatgagcatcagcgtggagatgctgagagaggacatcaaggactactacaccgacctgagcatcctgcagaaggacgtgaaggtgcccaccaaggtgctgtgcatcctgtgggacatggagaccgaggaggtggaggacatcctgcaggagttcgtgaacaagagcctgctgttctgcgacagaaacggcaagagcttcagatactacctgcacgacctgcaggtggacttcctgaccgagaagaactgcagccagctgcaggacctgcacaagaagatcatcacccagttccagagataccaccagccccacaccctgagccccgaccaggaggactgcatgtactggtacaacttcctggcctaccacatggccagcgccaagatgcacaaggagctgtgcgccctgatgttcagcctggactggatcaaggccaagaccgagctggtgggccccgcccacctgatccacgagttcgtggagtacagacacatcctggacgagaaggactgcgccgtgagcgagaacttccaggagttcctgagcctgaacggccacctgctgggcagacagcccttccccaacatcgtgcagctgggcctgtgcgagcccgagaccagcgaggtgtaccagcaggccaagctgcaggccaagcaggaggtggacaacggcatgctgtacctggagtggatcaacaagaagaacatcaccaacctgagcagactggtggtgagaccccacaccgacgccgtgtaccacgcctgcttcagcgaggacggccagagaatcgccagctgcggcgccgacaagaccctgcaggtgttcaaggccgagaccggcgagaagctgctggagatcaaggcccacgaggacgaggtgctgtgctgcgccttcagcaccgacgacagattcatcgccacctgcagcgtggacaagaaggtgaagatctggaacagcatgaccggcgagctggtgcacacctacgacgagcacagcgagcaggtgaactgctgccacttcaccaacagcagccaccacctgctgctggccaccggcagcagcgactgcttcctgaagctgtgggacctgaaccagaaggagtgcagaaacaccatgttcggccacaccaacagcgtgaaccactgcagattcagccccgacgacaagctgctggccagctgcagcgccgacggcaccctgaagctgtgggacgccaccagcgccaacgagagaaagagcatcaacgtgaagcagttcttcctgaacctggaggacccccaggaggacatggaggtgatcgtgaagtgctgcagctggagcgccgacggcgccagaatcatggtggccgccaagaacaagatcttcctgttcgacatccacaccagcggcctgctgggcgagatccacaccggccaccacagcaccatccagtactgcgacttcagcccccagaaccacctggccgtggtggccctgagccagtactgcgtggagctgtggaacaccgacagcagaagcaaggtggccgactgcagaggccacctgagctgggtgcacggcgtgatgttcagccccgacggcagcagcttcctgaccagcagcgacgaccagaccatcagactgtgggagaccaagaaggtgtgcaagaacagcgccgtgatgctgaagcaggaggtggacgtggtgttccaggagaacgaggtgatggtgctggccgtggaccacatcagaagactgcagctgatcaacggcagaaccggccagatcgactacctgaccgaggcccaggtgagctgctgctgcctgagcccccacctgcagtacatcgccttcggcgacgagaacggcgccatcgagatcctggagctggtgaacaacagaatcttccagagcagattccagcacaagaagaccgtgtggcacatccagttcaccgccgacgagaagaccctgatcagcagcagcgacgacgccgagatccaggtgtggaactggcagctggacaagtgcatcttcctgagaggccaccaggagaccgtgaaggacttcagactgctgaagaacagcagactgctgagctggagcttcgacggcaccgtgaaggtgtggaacatcatcaccggcaacaaggagaaggacttcgtgtgccaccagggcaccgtgctgagctgcgacatcagccacgacgccaccaagttcagcagcaccagcgccgacaagaccgccaagatctggagcttcgacctgctgctgcccctgcacgagctgagaggccacaacggctgcgtgagatgcagcgccttcagcgtggacagcaccctgctggccaccggcgacgacaacggcgagatcagaatctggaacgtgagcaacggcgagctgctgcacctgtgcgcccccctgagcgaggagggcgccgccacccacggcggctgggtgaccgacctgtgcttcagccccgacggcaagatgctgatcagcgccggcggctacatcaagtggtggaacgtggtgaccggcgagagcagccagaccttctacaccaacggcaccaacctgaagaagatccacgtgagccccgacttcaagacctacgtgaccgtggacaacctgggcatcctgtacatcctgcagaccctggagtag

SEQ ID NO: 9378 - DNA, 3747 bp, synthetic construct
  misc_feature 1..3747: note = Description of Artificial Sequence: Synthetic coding sequence
  source 1..3747: mol_type = other DNA
atggacgccaaggccagaaactgcctgctgcagcacagagaggccctggagaaggacatcaagaccagctacatcatggaccacatgatcagcgacggcttcctgaccatcagcgaggaggagaaggtgagaaacgagcccacccagcagcagagagccgccatgctgatcaagatgatcctgaagaaggacaacgacagctacgtgagcttctacaacgccctgctgcacgagggctacaaggacctggccgccctgctgcacgacggcatccccgtggtgagcagcagcagcggcaaggacagcgtgagcggcatcaccagctacgtgagaaccgtgctgtgcgagggcggcgtgccccagagacccgtggtgttcgtgaccagaaagaagctggtgaacgccatccagcagaagctgagcaagctgaagggcgagcccggctgggtgaccatccacggcatggccggctgcggcaagagcgtgctggccgccgaggccgtgagagaccacagcctgctggagggctgcttccccggcggcgtgcactgggtgagcgtgggcaagcaggacaagagcggcctgctgatgaagctgcagaacctgtgcaccagactggaccaggacgagagcttcagccagagactgcccctgaacatcgaggaggccaaggacagactgagaatcctgatgctgagaaagcaccccagaagcctgctgatcctggacgacgtgtgggacagctgggtgctgaaggccttcgacagccagtgccagatcctgctgaccaccagagacaagagcgtgaccgacagcgtgatgggccccaagtacgtggtgcccgtggagagcagcctgggcaaggagaagggcctggagatcctgagcctgttcgtgaacatgaagaaggccgacctgcccgagcaggcccacagcatcatcaaggagtgcaagggcagccccctggtggtgagcctgatcggcgccctgctgagagacttccccaacagatgggagtactacctgaagcagctgcagaacaagcagttcaagagaatcagaaagagcagcagctacgactacgaggccctggacgaggccatgagcatcagcgtggagatgctgagagaggacatcaaggactactacaccgacctgagcatcctgcagaaggacgtgaaggtgcccaccaaggtgctgtgcatcctgtgggacatggagaccgaggaggtggaggacatcctgcaggagttcgtgaacaagagcctgctgttctgcgacagaaacggcaagagcttcagatactacctgcacgacctgcaggtggacttcctgaccgagaagaactgcagccagctgcaggacctgcacaagaagatcatcacccagttccagagataccaccagccccacaccctgagccccgaccaggaggactgcatgtactggtacaacttcctggcctaccacatggccagcgccaagatgcacaaggagctgtgcgccctgatgttcagcctggactggatcaaggccaagaccgagctggtgggccccgcccacctgatccacgagttcgtggagtacagacacatcctggacgagaaggactgcgccgtgagcgagaacttccaggagttcctgagcctgaacggccacctgctgggcagacagcccttccccaacatcgtgcagctgggcctgtgcgagcccgagaccagcgaggtgtaccagcaggccaagctgcaggccaagcaggaggtggacaacggcatgctgtacctggagtggatcaacaagaagaacatcaccaacctgagcagactggtggtgagaccccacaccgacgccgtgtaccacgcctgcttcagcgaggacggccagagaatcgccagctgcggcgccgacaagaccctgcaggtgttcaaggccgagaccggcgagaagctgctggagatcaaggcccacgaggacgaggtgctgtgctgcgccttcagcaccgacgacagattcatcgccacctgcagcgtggacaagaaggtgaagatctggaacagcatgaccggcgagctggtgcacacctacgacgagcacagcgagcaggtgaactgctgccacttcaccaacagcagccaccacctgctgctggccaccggcagcagcgactgcttcctgaagctgtgggacctgaaccagaaggagtgcagaaacaccatgttcggccacaccaacagcgtgaaccactgcagattcagccccgacgacaagctgctggccagctgcagcgccgacggcaccctgaagctgtgggacgccaccagcgccaacgagagaaagagcatcaacgtgaagcagttcttcctgaacctggaggacccccaggaggacatggaggtgatcgtgaagtgctgcagctggagcgccgacggcgccagaatcatggtggccgccaagaacaagatcttcctgttcgacatccacaccagcggcctgctgggcgagatccacaccggccaccacagcaccatccagtactgcgacttcagcccccagaaccacctggccgtggtggccctgagccagtactgcgtggagctgtggaacaccgacagcagaagcaaggtggccgactgcagaggccacctgagctgggtgcacggcgtgatgttcagccccgacggcagcagcttcctgaccagcagcgacgaccagaccatcagactgtgggagaccaagaaggtgtgcaagaacagcgccgtgatgctgaagcaggaggtggacgtggtgttccaggagaacgaggtgatggtgctggccgtggaccacatcagaagactgcagctgatcaacggcagaaccggccagatcgactacctgaccgaggcccaggtgagctgctgctgcctgagcccccacctgcagtacatcgccttcggcgacgagaacggcgccatcgagatcctggagctggtgaacaacagaatcttccagagcagattccagcacaagaagaccgtgtggcacatccagttcaccgccgacgagaagaccctgatcagcagcagcgacgacgccgagatccaggtgtggaactggcagctggacaagtgcatcttcctgagaggccaccaggagaccgtgaaggacttcagactgctgaagaacagcagactgctgagctggagcttcgacggcaccgtgaaggtgtggaacatcatcaccggcaacaaggagaaggacttcgtgtgccaccagggcaccgtgctgagctgcgacatcagccacgacgccaccaagttcagcagcaccagcgccgacaagaccgccaagatctggagcttcgacctgctgctgcccctgcacgagctgagaggccacaacggctgcgtgagatgcagcgccttcagcgtggacagcaccctgctggccaccggcgacgacaacggcgagatcagaatctggaacgtgagcaacggcgagctgctgcacctgtgcgcccccctgagcgaggagggcgccgccacccacggcggctgggtgaccgacctgtgcttcagccccgacggcaagatgctgatcagcgccggcggctacatcaagtggtggaacgtggtgaccggcgagagcagccagaccttctacaccaacggcaccaacctgaagaagatccacgtgagccccgacttcaagacctacgtgaccgtggacaacctgggcatcctgtacatcctgcagaccctggagtag

SEQ ID NO: 9379 - DNA, 1017 bp, synthetic construct; identical to SEQ ID NO: 9371
  misc_feature 1..1017: note = Description of Artificial Sequence: Synthetic coding sequence
  source 1..1017: mol_type = other DNA

SEQ ID NO: 9380 - DNA, 2025 bp, synthetic construct
  misc_feature 1..2025: note = Description of Artificial Sequence: Synthetic coding sequence
  source 1..2025: mol_type = other DNA
atgcccagctacaccgtgaccgtggccaccggcagccagtggttcgccggcaccgacgactacatctacctgagcctggtgggcagcgccggctgcagcgagaagcacctgctggacaagcccttctacaacgacttcgagagaggcgccgtggacagctacgacgtgaccgtggacgaggagctgggcgagatccagctggtgagaatcgagaagagaaagtactggctgaacgacgactggtacctgaagtacatcaccctgaagaccccccacggcgactacatcgagttcccctgctacagatggatcaccggcgacgtggaggtggtgctgagagacggcagagccaagctggccagagacgaccagatccacatcctgaagcagcacagaagaaaggagctggagaccagacagaagcagtacagatggatggagtggaaccccggcttccccctgagcatcgacgccaagtgccacaaggacctgcccagagacatccagttcgacagcgagaagggcgtggacttcgtgctgaactacagcaaggccatggagaacctgttcatcaacagattcatgcacatgttccagagcagctggaacgacttcgccgacttcgagaagatcttcgtgaagatcagcaacaccatcagcgagagagtgatgaaccactggcaggaggacctgatgttcggctaccagttcctgaacggctgcaaccccgtgctgatcagaagatgcaccgagctgcccgagaagctgcccgtgaccaccgagatggtggagtgcagcctggagagacagctgagcctggagcaggaggtgcagcagggcaacatcttcatcgtggacttcgagctgctggacggcatcgacgccaacaagaccgacccctgcaccctgcagttcctggccgcccccatctgcctgctgtacaagaacctggccaacaagatcgtgcccatcgccatccagctgaaccagatccccggcgacgagaaccccatcttcctgcccagcgacgccaagtacgactggctgctggccaagatctgggtgagaagcagcgacttccacgtgcaccagaccatcacccacctgctgagaacccacctggtgagcgaggtgttcggcatcgccatgtacagacagctgcccgccgtgcaccccatcttcaagctgctggtggcccacgtgagattcaccatcgccatcaacaccaaggccagagagcagctgatctgcgagtgcggcctgttcgacaaggccaacgccaccggcggcggcggccacgtgcagatggtgcagagagccatgaaggacctgacctacgccagcctgtgcttccccgaggccatcaaggccagaggcatggagagcaaggaggacatcccctactacttctacagagacgacggcctgctggtgtgggaggccatcagaaccttcaccgccgaggtggtggacatctactacgagggcgaccaggtggtggaggaggaccccgagctgcaggacttcgtgaacgacgtgtacgtgtacggcatgagaggcagaaagagcagcggcttccccaagagcgtgaagagcagagagcagctgagcgagtacctgaccgtggtgatcttcaccgccagcgcccagcacgccgccgtgaacttcggccagtacgactggtgcagctggatccccaacgccccccccaccatgagagcccccccccccaccgccaagggcgtggtgaccatcgagcagatcgtggacaccctgcccgacagaggcagaagctgctggcacctgggcgccgtgtgggccctgagccagttccaggagaacgagctgttcctgggcatgtaccccgaggagcacttcatcgagaagcccgtgaaggaggccatggccagattcagaaagaacctggaggccatcgtgagcgtgatcgccgagagaaacaagaagaagcagctgccctactactacctgagccccgacagaatccccaacagcgtggccatctag

SEQ ID NO: 9381 - DNA, 1854 bp, synthetic construct
  misc_feature 1..1854: note = Description of Artificial Sequence: Synthetic coding sequence
  source 1..1854: mol_type = other DNA
atgcccagctacaccgtgaccgtggccaccggcagccagtggttcgccggcaccgacgactacatctacctgagcctggtgggcagcgccggctgcagcgagaagcacctgctggacaagcccttctacaacgacttcgagagaggcgccgtggacagctacgacgtgaccgtggacgaggagctgggcgagatccagctggtgagaatcgagaagagaaagtactggctgaacgacgactggtacctgaagtacatcaccctgaagaccccccacggcgactacatcgagttcccctgctacagatggatcaccggcgacgtggaggtggtgctgagagacggcagagccaagctggccagagacgaccagatccacatcctgaagcagcacagaagaaaggagctggagaccagacagaagcagtacagatggatggagtggaaccccggcttccccctgagcatcgacgccaagtgccacaaggacctgcccagagacatccagttcgacagcgagaagggcgtggacttcgtgctgaactacagcaaggccatggagaacctgttcatcaacagattcatgcacatgttccagagcagctggaacgacttcgccgacttcgagaagatcttcgtgaagatcagcaacaccatcagcgagagagtgatgaaccactggcaggaggacctgatgttcggctaccagttcctgaacggctgcaaccccgtgctgatcagaagatgcaccgagctgcccgagaagctgcccgtgaccaccgagatggtggagtgcagcctggagagacagctgagcctggagcaggaggtgcagcagggcaacatcttcatcgtggacttcgagctgctggacggcatcgacgccaacaagaccgacccctgcaccctgcagttcctggccgcccccatctgcctgctgtacaagaacctggccaacaagatcgtgcccatcgccatccagctgaaccagatccccggcgacgagaaccccatcttcctgcccagcgacgccaagtacgactggctgctggccaagatctgggtgagaagcagcgacttccacgtgcaccagaccatcacccacctgctgagaacccacctggtgagcgaggtgttcggcatcgccatgtacagacagctgcccgccgtgcaccccatcttcaagctgctggtggcccacgtgagattcaccatcgccatcaacaccaaggccagagagcagctgatctgcgagtgcggcctgttcgacaaggccaacgccaccggcggcggcggccacgtgcagatggtgcagagagccatgaaggacctgacctacgccagcctgtgcttccccgaggccatcaaggccagaggcatggagagcaaggaggacatcccctactacttctacagagacgacggcctgctggtgtgggaggccatcagaaccttcaccgccgaggtggtggacatctactacgagggcgaccaggtggtggaggaggaccccgagctgcaggacttcgtgaacgacgtgtacgtgtacggcatgagaggcagaaagagcagcggcttccccaagagcgtgaagagcagagagcagctgagcgagtacctgaccgtggtgatcttcaccgccagcgcccagcacgccgccgtgaacttcggccagctgttcctgggcatgtaccccgaggagcacttcatcgagaagcccgtgaaggaggccatggccagattcagaaagaacctggaggccatcgtgagcgtgatcgccgagagaaacaagaagaagcagctgccctactactacctgagccccgacagaatccccaacagcgtggccatctag

SEQ ID NO: 9382 - DNA, 2511 bp, synthetic construct
  misc_feature 1..2511: note = Description of Artificial Sequence: Synthetic coding sequence
  source 1..2511: mol_type = other DNA
atgcacgcccagagacagttcgtggtggccgccgtgagagccgaggtgagaagacacgaggtggccaagcaggccctgaacagactgagaaagctggccgagagagtggacgaccccgagctgcaggacagcatccaggccagcctggacagcatcagagaggccgtgatcaacagccaggagtggaccctgagcagaagcatccccgagctgagactgggcgtgctgggcgacgccagaagcggcaagagcagcctgatccacagattcctgaccggcagctaccaggtgctggagaagaccgagagcgagcagtacaagaaggagatgctggtggacggccagacccacctggtgctgatcagagaggaggccggcgcccccgacgccaagttcagcggctgggccgacgccgtgatcttcgtgttcagcctggaggacgagaacagcttccaggccgtgagcagactgcacggccagctgagcagcctgagaggcgagggcagaggcggcctggccctggccctggtgggcacccaggacagaatcagcgccagcagccccagagtggtgggcgacgccagagccagagccctgtgcgccgacatgaagagatgcagctactacgagacctgcgccacctacggcctgaacgtggacagagtgttccaggaggtggcccagaaggtggtgaccctgagaaagcagcagcagctgctggccgcctgcaagagcctgcccagcagccccagccacagcgccgccagcacccccgtggccggccaggccagcaacggcggccacaccagcgactacagcagcagcctgcccagcagccccaacgtgggccacagagagctgagagccgaggccgccgccgtggccggcctgagcacccccggcagcctgcacagagccgccaagagaagaaccagcctgttcgccaacagaagaggcagcgacagcgagaagagaagcctggacagcagaggcgagaccaccggcagcggcagagccatccccatcaagcagagcttcctgctgaagagaagcggcaacagcctgaacaaggagtggaagaagaagtacgtgaccctgagcagcaacggcttcctgctgtaccaccccagcatcaacgactacatccacagcacccacggcaaggagatggacctgctgagaaccaccgtgaaggtgcccggcaagagaccccccagagccatcagcgccttcggccccagcgccagcatcaacggcctggtgaaggacatgagcaccgtgcagatgggcgagggcctggaggccaccacccccatgcccagccccagccccagccccagcagcctgcagcccccccccgaccagaccagcaagcacctgctgaagcccgacagaaacctggccagagccctgagcaccgactgcacccccagcggcgacctgagccccctgagcagagagcccccccccagccccatggtgaagaagcagagaagaaagaagctgaccacccccagcaagaccgagggcagcgccggccaggccgaggaggagaacttcgagttcctgatcgtgagcagcaccggccagacctggcacttcgaggccgccagcttcgaggagagagacgcctgggtgcaggccatcgagagccagatcctggccagcctgcagtgctgcgagagcagcaaggtgaagctgagaaccgacagccagagcgaggccgtggccatccaggccatcagaaacgccaagggcaacagcatctgcgtggactgcggcgcccccaaccccacctgggccagcctgaacctgggcgccctgatctgcatcgagtgcagcggcatccacagaaacctgggcacccacctgagcagagtgagaagcctggacctggacgactggcccagagagctgaccctggtgctgaccgccatcggcaacgacaccgccaacagagtgtgggagagcgacaccagaggcagagccaagcccagcagagacagcagcagagaggagagagagagctggatcagagccaagtacgagcagctgctgttcctggcccccctgagcaccagcgaggagcccctgggcagacagctgtgggccgccgtgcaggcccaggacgtggccaccgtgctgctgctgctggcccacgccagacacggccccctggacaccagcgtggaggacccccagctgagaagccccctgcacctggccgccgagctggcccacgtggtgatcacccagctgctgctgtggtacggcgccgacgtggccgccagagacgcccagggcagaaccgccctgttctacgccagacaggccggcagccagctgtgcgccgacatcctgctgcagcacggctgccccggcgagggcggcagcgccgccaccacccccagcgccgccaccacccccagcatcaccgccacccccagccccagaagaagaagcagcgccgccagcgtgggcagagccgacgcccccgtggccctggtgtag

SEQ ID NO: 9383 - DNA, 3579 bp, synthetic construct
  misc_feature 1..3579: note = Description of Artificial Sequence: Synthetic coding sequence
  source 1..3579: mol_type = other DNA
atgagcagaggcgccggcgccctgcagagaagaaccaccacctacctgatcagcctgaccctggtgaagctggagagcgtgcccccccccccccccagccccagcgccgccgccgccggcgccgccggcgccagaggcagcgagaccggcgaccccggcagccccagaggcgccgaggagcccggcaagaagagacacgagagactgttccacagacaggacgccctgtggatcagcaccagcagcgccggcaccggcggcgccgagccccccgccctgagccccgcccccgccagccccgccagacccgtgagccccgcccccggcagaagactgagcctgtgggccgtgccccccggcccccccctgagcggcggcctgagccccgaccccaagcccggcggcgcccccaccagcagcagaagacccctgctgagcagccccagctggggcggccccgagcccgagggcagagccggcggcggcatccccggcagcagcagcccccaccccggcaccggcagcagaagactgaaggtggccccccccccccccgcccccaagccctgcaagaccgtgaccaccagcggcgccaaggccggcggcggcaagggcgccggcagcagactgagctggcccgagagcgagggcaagcccagagtgaagggcagcaagagcagcgccggcaccggcgccagcgtgagcgccgccgccaccgccgccgccgccggcggcggcggcagcaccgccagcaccagcggcggcgtgggcgccggcgccggcgccagaggcaagctgagccccagaaagggcaagagcaagaccctggacaacagcgacctgcaccccggcccccccgccggcagccccccccccctgaccctgccccccacccccagccccgccaccgccgtgaccgccgccagcgcccagccccccggccccgccccccccatcaccctggagccccccgcccccggcctgaagagaggcagagagggcggcagagccagcaccagagacagaaagatgctgaagttcatcagcggcatcttcaccaagagcaccggcggcccccccggcagcggccccctgcccggcccccccagcctgagcagcggcagcggcagcagagagctgctgggcgccgagctgagagccagccccaaggccgtgatcaacagccaggagtggaccctgagcagaagcatccccgagctgagactgggcgtgctgggcgacgccagaagcggcaagagcagcctgatccacagattcctgaccggcagctaccaggtgctggagaagaccgagagcgagcagtacaagaaggagatgctggtggacggccagacccacctggtgctgatcagagaggaggccggcgcccccgacgccaagttcagcggctgggccgacgccgtgatcttcgtgttcagcctggaggacgagaacagcttccaggccgtgagcagactgcacggccagctgagcagcctgagaggcgagggcagaggcggcctggccctggccctggtgggcacccaggacagaatcagcgccagcagccccagagtggtgggcgacgccagagccagagccctgtgcgccgacatgaagagatgcagctactacgagacctgcgccacctacggcctgaacgtggacagagtgttccaggaggtggcccagaaggtggtgaccctgagaaagcagcagcagctgctggccgcctgcaagagcctgcccagcagccccagccacagcgccgccagcacccccgtggccggccaggccagcaacggcggccacaccagcgactacagcagcagcctgcccagcagccccaacgtgggccacagagagctgagagccgaggccgccgccgtggccggcctgagcacccccggcagcctgcacagagccgccaagagaagaaccagcctgttcgccaacagaagaggcagcgacagcgagaagagaagcctggacagcagaggcgagaccaccggcagcggcagagccatccccatcaagcagagcttcctgctgaagagaagcggcaacagcctgaacaaggagtggaagaagaagtacgtgaccctgagcagcaacggcttcctgctgtaccaccccagcatcaacgactacatccacagcacccacggcaaggagatggacctgctgagaaccaccgtgaaggtgcccggcaagagaccccccagagccatcagcgccttcggccccagcgccagcatcaacggcctggtgaaggacatgagcaccgtgcagatgggcgagggcctggaggccaccacccccatgcccagccccagccccagccccagcagcctgcagcccccccccgaccagaccagcaagcacctgctgaagcccgacagaaacctggccagagccctgagcaccgactgcacccccagcggcgacctgagccccctgagcagagagcccccccccagccccatggtgaagaagcagagaagaaagaagctgaccacccccagcaagaccgagggcagcgccggccaggccgaggccaagagaaagatgtggaagctgaagagcttcggcagcctgagaaacatctacaaggccgaggagaacttcgagttcctgatcgtgagcagcaccggccagacctggcacttcgaggccgccagcttcgaggagagagacgcctgggtgcaggccatcgagagccagatcctggccagcctgcagtgctgcgagagcagcaaggtgaagctgagaaccgacagccagagcgaggccgtggccatccaggccatcagaaacgccaagggcaacagcatctgcgtggactgcggcgcccccaaccccacctgggccagcctgaacctgggcgccctgatctgcatcgagtgcagcggcatccacagaaacctgggcacccacctgagcagagtgagaagcctggacctggacgactggcccagagagctgaccctggtgctgaccgccatcggcaacgacaccgccaacagagtgtgggagagcgacaccagaggcagagccaagcccagcagagacagcagcagagaggagagagagagctggatcagagccaagtacgagcagctgctgttcctggcccccctgagcaccagcgaggagcccctgggcagacagctgtgggccgccgtgcaggcccaggacgtggccaccgtgctgctgctgctggcccacgccagacacggccccctggacaccagcgtggaggacccccagctgagaagccccctgcacctggccgccgagctggcccacgtggtgatcacccagctgctgctgtggtacggcgccgacgtggccgccagagacgcccagggcagaaccgccctgttctacgccagacaggccggcagccagctgtgcgccgacatcctgctgcagcacggctgccccggcgagggcggcagcgccgccaccacccccagcgccgccaccacccccagcatcaccgccacccccagccccagaagaagaagcagcgccgccagcgtgggcagagccgacgcccccgtggccctggtgtag

SEQ ID NO: 9384 - DNA, 1185 bp, synthetic construct
  misc_feature 1..1185: note = Description of Artificial Sequence: Synthetic coding sequence
  source 1..1185: mol_type = other DNA
atggacagccagggcagaaaggtggtggtgtgcgacaacggcaccggcttcgtgaagtgcggctacgccggcagcaacttccccgagcacatcttccccgccctggtgggcagacccatcatcagaagcaccaccaaggtgggcaacatcgagatcaaggacctgatggtgggcgacgaggccagcgagctgagaagcatgctggaggtgaactaccccatggagaacggcatcgtgagaaactgggacgacatgaagcacctgtgggactacaccttcggccccgagaagctgaacatcgacaccagaaactgcaagatcctgctgaccgagccccccatgaaccccaccaagaacagagagaagatcgtggaggtgatgttcgagacctaccagttcagcggcgtgtacgtggccatccaggccgtgctgaccctgtacgcccagggcctgctgaccggcgtggtggtggacagcggcgacggcgtgacccacatctgccccgtgtacgagggcttcagcctgccccacctgaccagaagactggacatcgccggcagagacatcaccagatacctgatcaagctgctgctgctgagaggctacgccttcaaccacagcgccgacttcgagaccgtgagaatgatcaaggagaagctgtgctacgtgggctacaacatcgagcaggagcagaagctggccctggagaccaccgtgctggtggagagctacaccctgcccgacggcagaatcatcaaggtgggcggcgagagattcgaggcccccgaggccctgttccagccccacctgatcaacgtggagggcgtgggcgtggccgagctgctgttcaacaccatccaggccgccgacatcgacaccagaagcgagttctacaagcacatcgtgctgagcggcggcagcaccatgtaccccggcctgcccagcagactggagagagagctgaagcagctgtacctggagagagtgctgaagggcgacgtggagaagctgagcaagttcaagatcagaatcgaggacccccccagaagaaagcacatggtgttcctgggcggcgccgtgctggccgacatcatgaaggacaaggacaacttctggatgaccagacaggagtaccaggagaagggcgtgagagtgctggagaagctgggcgtgaccgtgagatag

SEQ ID NO: 9385 - DNA, 1200 bp, synthetic construct
  misc_feature 1..1200: note = Description of Artificial Sequence: Synthetic coding sequence
  source 1..1200: mol_type = other DNA
atggacagccagggcagaaaggtggtggtgtgcgacaacggcaccggcttcgtgaagtgcggctacgccggcagcaacttccccgagcacatcttccccgccctggtgggcagacccatcatcagaagcaccaccaaggtgggcaacatcgagatcaagaacaacaagaagatggacctgatggtgggcgacgaggccagcgagctgagaagcatgctggaggtgaactaccccatggagaacggcatcgtgagaaactgggacgacatgaagcacctgtgggactacaccttcggccccgagaagctgaacatcgacaccagaaactgcaagatcctgctgaccgagccccccatgaaccccaccaagaacagagagaagatcgtggaggtgatgttcgagacctaccagttcagcggcgtgtacgtggccatccaggccgtgctgaccctgtacgcccagggcctgctgaccggcgtggtggtggacagcggcgacggcgtgacccacatctgccccgtgtacgagggcttcagcctgccccacctgaccagaagactggacatcgccggcagagacatcaccagatacctgatcaagctgctgctgctgagaggctacgccttcaaccacagcgccgacttcgagaccgtgagaatgatcaaggagaagctgtgctacgtgggctacaacatcgagcaggagcagaagctggccctggagaccaccgtgctggtggagagctacaccctgcccgacggcagaatcatcaaggtgggcggcgagagattcgaggcccccgaggccctgttccagccccacctgatcaacgtggagggcgtgggcgtggccgagctgctgttcaacaccatccaggccgccgacatcgacaccagaagcgagttctacaagcacatcgtgctgagcggcggcagcaccatgtaccccggcctgcccagcagactggagagagagctgaagcagctgtacctggagagagtgctgaagggcgacgtggagaagctgagcaagttcaagatcagaatcgaggacccccccagaagaaagcacatggtgttcctgggcggcgccgtgctggccgacatcatgaaggacaaggacaacttctggatgaccagacaggagtaccaggagaagggcgtgagagtgctggagaagctgggcgtgaccgtgagatag

SEQ ID NO: 9386 - DNA, 1020 bp, synthetic construct
  misc_feature 1..1020: note = Description of Artificial Sequence: Synthetic coding sequence
  source 1..1020: mol_type = other DNA
atggtgggcgacgaggccagcgagctgagaagcatgctggaggtgaactaccccatggagaacggcatcgtgagaaactgggacgacatgaagcacctgtgggactacaccttcggccccgagaagctgaacatcgacaccagaaactgcaagatcctgctgaccgagccccccatgaaccccaccaagaacagagagaagatcgtggaggtgatgttcgagacctaccagttcagcggcgtgtacgtggccatccaggccgtgctgaccctgtacgcccagggcctgctgaccggcgtggtggtggacagcggcgacggcgtgacccacatctgccccgtgtacgagggcttcagcctgccccacctgaccagaagactggacatcgccggcagagacatcaccagatacctgatcaagctgctgctgctgagaggctacgccttcaaccacagcgccgacttcgagaccgtgagaatgatcaaggagaagctgtgctacgtgggctacaacatcgagcaggagcagaagctggccctggagaccaccgtgctggtggagagctacaccctgcccgacggcagaatcatcaaggtgggcggcgagagattcgaggcccccgaggccctgttccagccccacctgatcaacgtggagggcgtgggcgtggccgagctgctgttcaacaccatccaggccgccgacatcgacaccagaagcgagttctacaagcacatcgtgctgagcggcggcagcaccatgtaccccggcctgcccagcagactggagagagagctgaagcagctgtacctggagagagtgctgaagggcgacgtggagaagctgagcaagttcaagatcagaatcgaggacccccccagaagaaagcacatggtgttcctgggcggcgccgtgctggccgacatcatgaaggacaaggacaacttctggatgaccagacaggagtaccaggagaagggcgtgagagtgctggagaagctgggcgtgaccgtgagatag

SEQ ID NO: 9387 - DNA, 918 bp, synthetic construct
  misc_feature 1..918: note = Description of Artificial Sequence: Synthetic coding sequence
  source 1..918: mol_type = other DNA
atggtgggcgacgaggccagcgagctgagaagcatgctggaggtgaactaccccatggagaacggcatcgtgagaaactgggacgacatgaagcacctgtgggactacaccttcggccccgagaagctgaacatcgacaccagaaactgcaagatcctgctgaccgagccccccatgaaccccaccaagaacagagagaagatcgtggaggtgatgttcgagacctaccagttcagcggcgtgtacgtggccatccaggccgtgctgaccctgtacgcccagggcctgctgaccggcgtggtggtggacagcggcgacggcgtgacccacatctgccccgtgtacgagggcttcagcctgccccacctgaccagaagactggacatcgccggcagagacatcaccagatacctgatcaagctgctgctgctgagaggctacgccttcaaccacagcgccgacttcgagaccgtgagaatgatcaaggagaagctgtgctacgtgggctacaacatcgagcaggagcagaagctggccctggagaccaccgtgctggtggagagctacaccctgcccgacggcagaatcatcaaggtgggcggcgagagattcgaggcccccgaggccctgttccagccccacctgatcaacgtggagggcgtgggcgtggccgagctgctgttcaacaccatccaggccgccgacatcgacaccagaagcgagttctacaagcacatcgtgctgagcggcggcagcaccatgtaccccggcctgcccagcagactggagagagagctgaagcagctgtacctggagagagtgctgaagggcgacgtggagaagctgagcgtgagcatcagcaagagcaccatcaccaacatcctgctgaagggctacaccgtggtgtgcgagagctag

SEQ ID NO: 9388 - DNA, 1257 bp, synthetic construct
  misc_feature 1..1257: note = Description of Artificial Sequence: Synthetic coding sequence
  source 1..1257: mol_type = other DNA
atggccggcagactgcccgcctgcgtggtggactgcggcaccggctacaccaagctgggctacgccggcaacaccgagccccagttcatcatccccagctgcatcgccatcaaggagagcgccaaggtgggcgaccaggcccagagaagagtgatgaagggcgtggacgacctggacttcttcatcggcgacgaggccatcgagaagcccacctacgccaccaagtggcccatcagacacggcatcgtggaggactgggacctgatggagagattcatggagcaggtgatcttcaagtacctgagagccgagcccgaggaccactacttcctgctgaccgagccccccctgaacacccccgagaacagagagtacaccgccgagatcatgttcgagagcttcaacgtgcccggcctgtacatcgccgtgcaggccgtgctggccctggccgccagctggaccagcagacaggtgggcgagagaaccctgaccggcaccgtgatcgacagcggcgacggcgtgacccacgtgatccccgtggccgagggctacgtgatcggcagctgcatcaagcacatccccatcgccggcagagacatcacctacttcatccagcagctgctgagagacagagaggtgggcatcccccccgagcagagcctggagaccgccaaggccgtgaaggagagatacagctacgtgtgccccgacctggtgaaggagttcaacaagtacgacaccgacggcagcaagtggatcaagcagtacaccggcatcaacgccatcagcaagaaggagttcagcatcgacgtgggctacgagagattcctgggccccgagatcttcttccaccccgagttcgccaaccccgacttcacccagcccatcagcgaggtggtggacgaggtgatccagaactgccccatcgacgtgagaagacccctgtacaagaacatcgtgctgagcggcggcagcaccatgttcagagacttcggcagaagactgcagagagacctgaagagaaccgtggacgccagactgaagctgagcgaggagctgagcggcggcagactgaagcccaagcccatcgacgtgcaggtgatcacccaccacatgcagagatacgccgtgtggttcggcggcagcatgctggccagcacccccgagttctaccaggtgtgccacaccaagaaggactacgaggagatcggccccagcatctgcagacacaaccccgtgttcggcgtgatgagctag

SEQ ID NO: 9389 - DNA, 1104 bp, synthetic construct
  misc_feature 1..1104: note = Description of Artificial Sequence: Synthetic coding sequence
  source 1..1104: mol_type = other DNA
atgaagggcgtggacgacctggacttcttcatcggcgacgaggccatcgagaagcccacctacgccaccaagtggcccatcagacacggcatcgtggaggactgggacctgatggagagattcatggagcaggtgatcttcaagtacctgagagccgagcccgaggaccactacttcctgctgaccgagccccccctgaacacccccgagaacagagagtacaccgccgagatcatgttcgagagcttcaacgtgcccggcctgtacatcgccgtgcaggccgtgctggccctggccgccagctggaccagcagacaggtgggcgagagaaccctgaccggcaccgtgatcgacagcggcgacggcgtgacccacgtgatccccgtggccgagggctacgtgatcggcagctgcatcaagcacatccccatcgccggcagagacatcacctacttcatccagcagctgctgagagacagagaggtgggcatcccccccgagcagagcctggagaccgccaaggccgtgaaggagagatacagctacgtgtgccccgacctggtgaaggagttcaacaagtacgacaccgacggcagcaagtggatcaagcagtacaccggcatcaacgccatcagcaagaaggagttcagcatcgacgtgggctacgagagattcctgggccccgagatcttcttccaccccgagttcgccaaccccgacttcacccagcccatcagcgaggtggtggacgaggtgatccagaactgccccatcgacgtgagaagacccctgtacaagaacatcgtgctgagcggcggcagcaccatgttcagagacttcggcagaagactgcagagagacctgaagagaaccgtggacgccagactgaagctgagcgaggagctgagcggcggcagactgaagcccaagcccatcgacgtgcaggtgatcacccaccacatgcagagatacgccgtgtggttcggcggcagcatgctggccagcacccccgagttctaccaggtgtgccacaccaagaaggactacgaggagatcggccccagcatctgcagacacaaccccgtgttcggcgtgatgagctag

SEQ ID NO: 9390 - DNA, 1071 bp, synthetic construct
  misc_feature 1..1071: note = Description of Artificial Sequence: Synthetic coding sequence
  source 1..1071: mol_type = other DNA
atgctggagatccagaaccacagcctgagcagcctgccctggcccatcagacacggcatcgtggaggactgggacctgatggagagattcatggagcaggtgatcttcaagtacctgagagccgagcccgaggaccactacttcctgctgaccgagccccccctgaacacccccgagaacagagagtacaccgccgagatcatgttcgagagcttcaacgtgcccggcctgtacatcgccgtgcaggccgtgctggccctggccgccagctggaccagcagacaggtgggcgagagaaccctgaccggcaccgtgatcgacagcggcgacggcgtgacccacgtgatccccgtggccgagggctacgtgatcggcagctgcatcaagcacatccccatcgccggcagagacatcacctacttcatccagcagctgctgagagacagagaggtgggcatcccccccgagcagagcctggagaccgccaaggccgtgaaggagagatacagctacgtgtgccccgacctggtgaaggagttcaacaagtacgacaccgacggcagcaagtggatcaagcagtacaccggcatcaacgccatcagcaagaaggagttcagcatcgacgtgggctacgagagattcctgggccccgagatcttcttccaccccgagttcgccaaccccgacttcacccagcccatcagcgaggtggtggacgaggtgatccagaactgccccatcgacgtgagaagacccctgtacaagaacatcgtgctgagcggcggcagcaccatgttcagagacttcggcagaagactgcagagagacctgaagagaaccgtggacgccagactgaagctgagcgaggagctgagcggcggcagactgaagcccaagcccatcgacgtgcaggtgatcacccaccacatgcagagatacgccgtgtggttcggcggcagcatgctggccagcacccccgagttctaccaggtgtgccacaccaagaaggactacgaggagatcggccccagcatctgcagacacaaccccgtgttcggcgtgatgagctag

SEQ ID NO: 9391 - DNA, 870 bp, synthetic construct
  misc_feature 1..870: note = Description of Artificial Sequence: Synthetic coding sequence
  source 1..870: mol_type = other DNA
atgttcgagagcttcaacgtgcccggcctgtacatcgccgtgcaggccgtgctggccctggccgccagctggaccagcagacaggtgggcgagagaaccctgaccggcaccgtgatcgacagcggcgacggcgtgacccacgtgatccccgtggccgagggctacgtgatcggcagctgcatcaagcacatccccatcgccggcagagacatcacctacttcatccagcagctgctgagagacagagaggtgggcatcccccccgagcagagcctggagaccgccaaggccgtgaaggagagatacagctacgtgtgccccgacctggtgaaggagttcaacaagtacgacaccgacggcagcaagtggatcaagcagtacaccggcatcaacgccatcagcaagaaggagttcagcatcgacgtgggctacgagagattcctgggccccgagatcttcttccaccccgagttcgccaaccccgacttcacccagcccatcagcgaggtggtggacgaggtgatccagaactgccccatcgacgtgagaagacccctgtacaagaacatcgtgctgagcggcggcagcaccatgttcagagacttcggcagaagactgcagagagacctgaagagaaccgtggacgccagactgaagctgagcgaggagctgagcggcggcagactgaagcccaagcccatcgacgtgcaggtgatcacccaccacatgcagagatacgccgtgtggttcggcggcagcatgctggccagcacccccgagttctaccaggtgtgccacaccaagaaggactacgaggagatcggccccagcatctgcagacacaaccccgtgttcggcgtgatgagctag

SEQ ID NO: 9392 - DNA, 1749 bp, synthetic construct
  misc_feature 1..1749: note = Description of Artificial Sequence: Synthetic coding sequence
  source 1..1749: mol_type = other DNA
atcgacatcgagagcatggacaccgacaaggacgacccccacggcagactggagtacaccgagcaccagggcagaatcaagaacgccagagaggcccacagccagatcgagaagagaagaagagacaagatgaacagcttcatcgacgagctggccagcctggtgcccacctgcaacgccatgagcagaaagctggacaagctgaccgtgctgagaatggccgtgcagcacatgaagaccctgagaggcgccaccaacccctacaccgaggccaactacaagcccaccttcctgagcgacgacgagctgaagcacctgatcctgagagccgccgacggcttcctgttcgtggtgggctgcgacagaggcaagatcctgttcgtgagcgagagcgtgttcaagatcctgaactacagccagaacgacctgatcggccagagcctgttcgactacctgcaccccaaggacatcgccaaggtgaaggagcagctgagcagcagcgacaccgcccccagagagagactgatcgacgccaagaccggcctgcccgtgaagaccgacatcacccccggccccagcagactgtgcagcggcgccagaagaagcttcttctgcagaatgaagtgcaacagacccagcgtgaaggtggaggacaaggacttccccagcacctgcagcaagaagaaggccgacagaaagagcttctgcaccatccacagcaccggctacctgaagagctggccccccaccaagatgggcctggacgaggacaacgagcccgacaacgagggctgcaacctgagctgcctggtggccatcggcagactgcacagccacgtggtgccccagcccgtgaacggcgagatcagagtgaagagcatggagtacgtgagcagacacgccatcgacggcaagttcgtgttcgtggaccagagagccaccgccatcctggcctacctgccccaggagctgctgggcaccagctgctacgagtacttccaccaggacgacatcggccacctggccgagtgccacagacaggtgctgcagaccagagagaagatcaccaccaactgctacaagttcaagatcaaggacggcagcttcatcaccctgagaagcagatggttcagcttcatgaacccctggaccaaggaggtggagtacatcgtgagcaccaacaccgtggtgctggccaacgtgctggagggcggcgaccccaccttcccccagctgaccgccagcccccacagcatggacagcatgctgcccagcggcgagggcggccccaagagaacccaccccaccgtgcccggcatccccggcggcaccagagccggcgccggcaagatcggcagaatgatcgccgaggagatcatggagatccacagaatcagaggcagcagccccagcagctgcggcagcagccccctgaacatcaccagcacccccccccccgacgccagcagccccggcggcaagaagatcctgaacggcggcacccccgacatccccagcagcggcctgctgagcggccaggcccaggagaaccccggctacccctacagcgacagcagcagcatcctgggcgagaacccccacatcggcatcgacatgatcgacaacgaccagggcagcagcagccccagcaacgacgaggccgccatggccgtgatcatgagcctgctggaggccgacgccggcctgggcggccccgtggacttcagcgacctgccctggcccctgtag

SEQ ID NO: 9393 - DNA, 1527 bp, synthetic construct
  misc_feature 1..1527: note = Description of Artificial Sequence: Synthetic coding sequence
  source 1..1527: mol_type = other DNA
atggccgaccagagaatggacatcagcagcaccatcagcgacttcatgagccccggccccaccgacctgctgagcagcagcctgggcaccagcggcgtggactgcaacagaaagagaaagggcagcagcaccgactaccaggagagcatggacaccgacaaggacgacccccacggcagactggagtacaccgagcaccagggcagaatcaagaacgccagagaggcccacagccagatcgagaagagaagaagagacaagatgaacagcttcatcgacgagctggccagcctggtgcccacctgcaacgccatgagcagaaagctggacaagctgaccgtgctgagaatggccgtgcagcacatgaagaccctgagaggcgccaccaacccctacaccgaggccaactacaagcccaccttcctgagcgacgacgagctgaagcacctgatcctgagagccgccgacggcttcctgttcgtggtgggctgcgacagaggcaagatcctgttcgtgagcgagagcgtgttcaagatcctgaactacagccagaacgacctgatcggccagagcctgttcgactacctgcaccccaaggacatcgccaaggtgaaggagcagctgagcagcagcgacaccgcccccagagagagactgatcgacgccaagaccggcctgcccgtgaagaccgacatcacccccggccccagcagactgtgcagcggcgccagaagaagcttcttctgcagaatgaagtgcaacagacccagcgtgaaggtggaggacaaggacttccccagcacctgcagcaagaagaaggtgctgcagaccagagagaagatcaccaccaactgctacaagttcaagatcaaggacggcagcttcatcaccctgagaagcagatggttcagcttcatgaacccctggaccaaggaggtggagtacatcgtgagcaccaacaccgtggtgctggccaacgtgctggagggcggcgaccccaccttcccccagctgaccgccagcccccacagcatggacagcatgctgcccagcggcgagggcggccccaagagaacccaccccaccgtgcccggcatccccggcggcaccagagccggcgccggcaagatcggcagaatgatcgccgaggagatcatggagatccacagaatcagaggcagcagccccagcagctgcggcagcagccccctgaacatcaccagcacccccccccccgacgccagcagccccggcggcaagaagatcctgaacggcggcacccccgacatccccagcagcggcctgctgagcggccaggcccaggagaaccccggctacccctacagcgacagcagcagcatcctgggcgagaacccccacatcggcatcgacatgatcgacaacgaccagggcagcagcagccccagcaacgacgaggccgccatggccgtgatcatgagcctgctggaggccgacgccggcctgggcggccccgtggacttcagcgacctgccctggcccctgtag

SEQ ID NO: 9394 - DNA, 1878 bp, synthetic construct
  misc_feature 1..1878: note = Description of Artificial Sequence: Synthetic coding sequence
  source 1..1878: mol_type = other DNA
atggccgaccagagaatggacatcagcagcaccatcagcgacttcatgagccccggccccaccgacctgctgagcagcagcctgggcaccagcggcgtggactgcaacagaaagagaaagggcagcagcaccgactaccaggagagcatggacaccgacaaggacgacccccacggcagactggagtacaccgagcaccagggcagaatcaagaacgccagagaggcccacagccagatcgagaagagaagaagagacaagatgaacagcttcatcgacgagctggccagcctggtgcccacctgcaacgccatgagcagaaagctggacaagctgaccgtgctgagaatggccgtgcagcacatgaagaccctgagaggcgccaccaacccctacaccgaggccaactacaagcccaccttcctgagcgacgacgagctgaagcacctgatcctgagagccgccgacggcttcctgttcgtggtgggctgcgacagaggcaagatcctgttcgtgagcgagagcgtgttcaagatcctgaactacagccagaacgacctgatcggccagagcctgttcgactacctgcaccccaaggacatcgccaaggtgaaggagcagctgagcagcagcgacaccgcccccagagagagactgatcgacgccaagaccggcctgcccgtgaagaccgacatcacccccggccccagcagactgtgcagcggcgccagaagaagcttcttctgcagaatgaagtgcaacagacccagcgtgaaggtggaggacaaggacttccccagcacctgcagcaagaagaaggacagaaagagcttctgcaccatccacagcaccggctacctgaagagctggccccccaccaagatgggcctggacgaggacaacgagcccgacaacgagggctgcaacctgagctgcctggtggccatcggcagactgcacagccacgtggtgccccagcccgtgaacggcgagatcagagtgaagagcatggagtacgtgagcagacacgccatcgacggcaagttcgtgttcgtggaccagagagccaccgccatcctggcctacctgccccaggagctgctgggcaccagctgctacgagtacttccaccaggacgacatcggccacctggccgagtgccacagacaggtgctgcagaccagagagaagatcaccaccaactgctacaagttcaagatcaaggacggcagcttcatcaccctgagaagcagatggttcagcttcatgaacccctggaccaaggaggtggagtacatcgtgagcaccaacaccgtggtgctggccaacgtgctggagggcggcgaccccaccttcccccagctgaccgccagcccccacagcatggacagcatgctgcccagcggcgagggcggccccaagagaacccaccccaccgtgcccggcatccccggcggcaccagagccggcgccggcaagatcggcagaatgatcgccgaggagatcatggagatccacagaatcagaggcagcagccccagcagctgcggcagcagccccctgaacatcaccagcacccccccccccgacgccagcagccccggcggcaagaagatcctgaacggcggcacccccgacatccccagcagcggcctgctgagcggccaggcccaggagaaccccggctacccctacagcgacagcagcagcatcctgggcgagaacccccacatcggcatcgacatgatcgacaacgaccagggcagcagcagccccagcaacgacgaggccgccatggccgtgatcatgagcctgctggaggccgacgccggcctgggcggccccgtggacttcagcgacctgccctggcccctgtag

SEQ ID NO: 9395 - DNA, 1581 bp, synthetic construct
  misc_feature 1..1581: note = Description of Artificial Sequence: Synthetic coding sequence
  source 1..1581: mol_type = other DNA
atggccgaccagagaatggacatcagcagcaccatcagcgacttcatgagccccggccccaccgacctgctgagcagcagcctgggcaccagcggcgtggactgcaacagaaagagaaagggcagcagcaccgactaccaggagagcatggacaccgacaaggacgacccccacggcagactggagtacaccgagcaccagggcagaatcaagaacgccagagaggcccacagccagatcgagaagagaagaagagacaagatgaacagcttcatcgacgagctggccagcctggtgcccacctgcaacgccatgagcagaaagctggacaagctgaccgtgctgagaatggccgtgcagcacatgaagaccctgagaggcgccaccaacccctacaccgaggccaactacaagcccaccttcctgagcgacgacgagctgaagcacctgatcctgagagccgccgacggcttcctgttcgtggtgggctgcgacagaggcaagatcctgttcgtgagcgagagcgtgttcaagatcctgaactacagccagaacgacctgatcggccagagcctgttcgactacctgcaccccaaggacatcgccaaggtgaaggagcagctgagcagcagcgacaccgcccccagagagagactgatcgacgccaagaccggcctgcccgtgaagaccgacatcacccccggccccagcagactgtgcagcggcgccagaagaagcttcttctgcagaatgaagtgcaacagacccagcgtgaaggtggaggacaaggacttccccagcacctgcagcaagaagaaggccgacagaaagagcttctgcaccatccacagcaccggctacctgaagagctggccccccaccaagatgggcctggacgaggacaacgagcccgacaacgagggctgcaacctgagctgcctggtggccatcggcagactgcacagccacgtggtgccccagcccgtgaacggcgagatcagagtgaagagcatggagtacgtgagcagacacgccatcgacggcaagttcgtgttcgtggaccagagagccaccgccatcctggcctacctgccccaggagctgctgggcaccagctgctacgagtacttccaccaggacgacatcggccacctggccgagtgccacagacaggtgctgcagaccagagagaagatcaccaccaactgctacaagttcaagatcaaggacggcagcttcatcaccctgagaagcagatggttcagcttcatgaacccctggaccaaggaggtggagtacatcgtgagcaccaacaccgtggtgctgagcagagtggacaccggccacctgggccaggtggagtggtgcaccgtgctgagcagacccgacagcagattcctgatcgccggcatgttcaccgagcccaccagctggaaggccggcacccagcccagccacagcagccagcacccccccaccgcctggaccgcctgctgccccctggagaaggtggcccagagaggccccacccccctgttccagggcttccagggcgagcccggcctgggccaggagaagtag

SEQ ID NO: 9396 - DNA, 1878 bp, synthetic construct; identical to SEQ ID NO: 9394
  misc_feature 1..1878: note = Description of Artificial Sequence: Synthetic coding sequence
  source 1..1878: mol_type = other DNA

SEQ ID NO: 9397 - DNA, 1752 bp, synthetic construct
  misc_feature 1..1752: note = Description of Artificial Sequence: Synthetic coding sequence
  source 1..1752: mol_type = other DNA
atgatcaacatcgagagcatggacaccgacaaggacgacccccacggcagactggagtacaccgagcaccagggcagaatcaagaacgccagagaggcccacagccagatcgagaagagaagaagagacaagatgaacagcttcatcgacgagctggccagcctggtgcccacctgcaacgccatgagcagaaagctggacaagctgaccgtgctgagaatggccgtgcagcacatgaagaccctgagaggcgccaccaacccctacaccgaggccaactacaagcccaccttcctgagcgacgacgagctgaagcacctgatcctgagagccgccgacggcttcctgttcgtggtgggctgcgacagaggcaagatcctgttcgtgagcgagagcgtgttcaagatcctgaactacagccagaacgacctgatcggccagagcctgttcgactacctgcaccccaaggacatcgccaaggtgaaggagcagctgagcagcagcgacaccgcccccagagagagactgatcgacgccaagaccggcctgcccgtgaagaccgacatcacccccggccccagcagactgtgcagcggcgccagaagaagcttcttctgcagaatgaagtgcaacagacccagcgtgaaggtggaggacaaggacttccccagcacctgcagcaagaagaaggccgacagaaagagcttctgcaccatccacagcaccggctacctgaagagctggccccccaccaagatgggcctggacgaggacaacgagcccgacaacgagggctgcaacctgagctgcctggtggccatcggcagactgcacagccacgtggtgccccagcccgtgaacggcgagatcagagtgaagagcatggagtacgtgagcagacacgccatcgacggcaagttcgtgttcgtggaccagagagccaccgccatcctggcctacctgccccaggagctgctgggcaccagctgctacgagtacttccaccaggacgacatcggccacctggccgagtgccacagacaggtgctgcagaccagagagaagatcaccaccaactgctacaagttcaagatcaaggacggcagcttcatcaccctgagaagcagatggttcagcttcatgaacccctggaccaaggaggtggagtacatcgtgagcaccaacaccgtggtgctggccaacgtgctggagggcggcgaccccaccttcccccagctgaccgccagcccccacagcatggacagcatgctgcccagcggcgagggcggccccaagagaacccaccccaccgtgcccggcatccccggcggcaccagagccggcgccggcaagatcggcagaatgatcgccgaggagatcatggagatccacagaatcagaggcagcagccccagcagctgcggcagcagccccctgaacatcaccagcacccccccccccgacgccagcagccccggcggcaagaagatcctgaacggcggcacccccgacatccccagcagcggcctgctgagcggccaggcccaggagaaccccggctacccctacagcgacagcagcagcatcctgggcgagaacccccacatcggcatcgacatgatcgacaacgaccagggcagcagcagccccagcaacgacgaggccgccatggccgtgatcatgagcctgctggaggccgacgccggcctgggcggccccgtggacttcagcgacctgccctggcccctgtag

SEQ ID NO: 9398 - DNA, 1881 bp, synthetic construct
  misc_feature 1..1881: note = Description of Artificial Sequence: Synthetic coding sequence
  source 1..1881: mol_type = other DNA
atggccgaccagagaatggacatcagcagcaccatcagcgacttcatgagccccggccccaccgacctgctgagcagcagcctgggcaccagcggcgtggactgcaacagaaagagaaagggcagcagcaccgactaccaggagagcatggacaccgacaaggacgacccccacggcagactggagtacaccgagcaccagggcagaatcaagaacgccagagaggcccacagccagatcgagaagagaagaagagacaagatgaacagcttcatcgacgagctggccagcctggtgcccacctgcaacgccatgagcagaaagctggacaagctgaccgtgctgagaatggccgtgcagcacatgaagaccctgagaggcgccaccaacccctacaccgaggccaactacaagcccaccttcctgagcgacgacgagctgaagcacctgatcctgagagccgccgacggcttcctgttcgtggtgggctgcgacagaggcaagatcctgttcgtgagcgagagcgtgttcaagatcctgaactacagccagaacgacctgatcggccagagcctgttcgactacctgcaccccaaggacatcgccaaggtgaaggagcagctgagcagcagcgacaccgcccccagagagagactgatcgacgccaagaccggcctgcccgtgaagaccgacatcacccccggccccagcagactgtgcagcggcgccagaagaagcttcttctgcagaatgaagtgcaacagacccagcgtgaaggtggaggacaaggacttccccagcacctgcagcaagaagaaggccgacagaaagagcttctgcaccatccacagcaccggctacctgaagagctggccccccaccaagatgggcctggacgaggacaacgagcccgacaacgagggctgcaacctgagctgcctggtggccatcggcagactgcacagccacgtggtgccccagcccgtgaacggcgagatcagagtgaagagcatggagtacgtgagcagacacgccatcgacggcaagttcgtgttcgtggaccagagagccaccgccatcctggcctacctgccccaggagctgctgggcaccagctgctacgagtacttccaccaggacgacatcggccacctggccgagtgccacagacaggtgctgcagaccagagagaagatcaccaccaactgctacaagttcaagatcaaggacggcagcttcatcaccctgagaagcagatggttcagcttcatgaacccctggaccaaggaggtggagtacatcgtgagcaccaacaccgtggtgctggccaacgtgctggagggcggcgaccccaccttcccccagctgaccgccagcccccacagcatggacagcatgctgcccagcggcgagggcggccccaagagaacccaccccaccgtgcccggcatccccggcggcaccagagccggcgccggcaagatcggcagaatgatcgccgaggagatcatggagatccacagaatcagaggcagcagccccagcagctgcggcagcagccccctgaacatcaccagcacccccccccccgacgccagcagccccggcggcaagaagatcctgaacggcggcacccccgacatccccagcagcggcctgctgagcggccaggcccaggagaaccccggctacccctacagcgacagcagcagcatcctgggcgagaacccccacatcggcatcgacatgatcgacaacgaccagggcagcagcagccccagcaacgacgaggccgccatggccgtgatcatgagcctgctggaggccgacgccggcctgggcggccccgtggacttcagcgacctgccctggcccctgtag

SEQ ID NO: 9399 - DNA, 1749 bp, synthetic construct
  misc_feature 1..1749: note = Description of Artificial Sequence: Synthetic coding sequence
  source 1..1749: mol_type = other DNA
atgatcaacatcgagagcatggacaccgacaaggacgacccccacggcagactggagtacaccgagcaccagggcagaatcaagaacgccagagaggcccacagccagatcgagaagagaagaagagacaagatgaacagcttcatcgacgagctggccagcctggtgcccacctgcaacgccatgagcagaaagctggacaagctgaccgtgctgagaatggccgtgcagcacatgaagaccctgagaggcgccaccaacccctacaccgaggccaactacaagcccaccttcctgagcgacgacgagctgaagcacctgatcctgagagccgccgacggcttcctgttcgtggtgggctgcgacagaggcaagatcctgttcgtgagcgagagcgtgttcaagatcctgaactacagccagaacgacctgatcggccagagcctgttcgactacctgcaccccaaggacatcgccaaggtgaaggagcagctgagcagcagcgacaccgcccccagagagagactgatcgacgccaagaccggcctgcccgtgaagaccgacatcacccccggccccagcagactgtgcagcggcgccagaagaagcttcttctgcagaatgaagtgcaacagacccagcgtgaaggtggaggacaaggacttccccagcacctgcagcaagaagaaggacagaaagagcttctgcaccatccacagcaccggctacctgaagagctggccccccaccaagatgggcctggacgaggacaacgagcccgacaacgagggctgcaacctgagctgcctggtggccatcggcagactgcacagccacgtggtgccccagcccgtgaacggcgagatcagagtgaagagcatggagtacgtgagcagacacgccatcgacggcaagttcgtgttcgtggaccagagagccaccgccatcctggcctacctgccccaggagctgctgggcaccagctgctacgagtacttccaccaggacgacatcggccacctggccgagtgccacagacaggtgctgcagaccagagagaagatcaccaccaactgctacaagttcaagatcaaggacggcagcttcatcaccctgagaagcagatggttcagcttcatgaacccctggaccaaggaggtggagtacatcgtgagcaccaacaccgtggtgctggccaacgtgctggagggcggcgaccccaccttcccccagctgaccgccagcccccacagcatggacagcatgctgcccagcggcgagggcggccccaagagaacccaccccaccgtgcccggcatccccggcggcaccagagccggcgccggcaagatcggcagaatgatcgccgaggagatcatggagatccacagaatcagaggcagcagccccagcagctgcggcagcagccccctgaacatcaccagcacccccccccccgacgccagcagccccggcggcaagaagatcctgaacggcggcacccccgacatccccagcagcggcctgctgagcggccaggcccaggagaaccccggctacccctacagcgacagcagcagcatcctgggcgagaacccccacatcggcatcgacatgatcgacaacgaccagggcagcagcagccccagcaacgacgaggccgccatggccgtgatcatgagcctgctggaggccgacgccggcctgggcggccccgtggacttcagcgacctgccctggcccctgtag

SEQ ID NO: 9400 - DNA, 219 bp, synthetic construct
  misc_feature 1..219: note = Description of Artificial Sequence: Synthetic coding sequence
  source 1..219: mol_type = other DNA
atgatcaacatcgagagcatggacaccgacaaggacgacccccacggcagactggagtacaccgagcaccagggcagaatcaagaacgccagagaggcccacagccagatcgagaagagaagaagagacaagatgaacagcttcatcgacgagctggccagcctggtgcccacctgcaacgccatgagcagaaagctggacaagctgaccgtgctgtag

SEQ ID NO: 9401 - DNA, 231 bp, synthetic construct
  misc_feature 1..231: note = Description of Artificial Sequence: Synthetic coding sequence
  source 1..231: mol_type = other DNA
atggccgaccagagaatggacatcagcagcaccatcagcgacttcatgagccccggccccaccgacctgctgagcagcagcctgggcaccagcggcgtggactgcaacagaaagagaaagggcagcagcaccgactaccaggagagcatggacaccgacaaggacgacccccacggcagactggagtacaccgagcaccagggcagaatcaagaacgccagagaggcctag

SEQ ID NO: 9402 - DNA, 72 bp, synthetic construct
  misc_feature 1..72: note = Description of Artificial Sequence: Synthetic coding sequence
  source 1..72: mol_type = other DNA
atggccgaccagagaatggacatcagcagcaccatcagcgacttcatgagccccggccccaccgacctgtag

SEQ ID NO: 9403 - DNA, 408 bp, synthetic construct
  misc_feature 1..408: note = Description of Artificial Sequence: Synthetic coding sequence
  source 1..408: mol_type = other DNA
atggccgaccagagaatggacatcagcagcaccatcagcgacttcatgagccccggccccaccgacctgctgagcagcagcctgggcaccagcggcgtggactgcaacagaaagagaaagggcagcagcaccgactaccaggagagcatggacaccgacaaggacgacccccacggcagactggagtacaccgagcaccagggcagaatcaagaacgccagagaggcccacagccagatcgagaagagaagaagagacaagatgaacagcttcatcgacgagctggccagcctggtgcccacctgcaacgccatgagcagaaagctggacaagctgaccgtgctgagaatggccgtgcagcacatgaagaccctgagaggcgccaccaacccctacaccgaggcctag

SEQ ID NO: 9404 - DNA, 141 bp, synthetic construct
  misc_feature 1..141: note = Description of Artificial Sequence: Synthetic coding sequence
  source 1..141: mol_type = other DNA
atgatcaacatcgagagcatggacaccgacaaggacgacccccacggcagactggagtacaccgagcaccagggcagaatcaagaacgccagagaggcccacagccagatcgagaagagaagaagagacaagatgaactag

SEQ ID NO: 9405 - DNA, 426 bp, synthetic construct
  misc_feature 1..426: note = Description of Artificial Sequence: Synthetic coding sequence
  source 1..426: mol_type = other DNA
atgatcaacatcgagagcatggacaccgacaaggacgacccccacggcagactggagtacaccgagcaccagggcagaatcaagaacgccagagaggcccacagccagatcgagaagagaagaagagacaagatgaacagcttcatcgacgagctggccagcctggtgcccacctgcaacgccatgagcagaaagctggacaagctgaccgtgctgagaatggccgtgcagcacatgaagaccctgagaggcgccaccaacccctacaccgaggccaactacaagcccaccttcctgagcgacgacgagctgaagcacctgatcctgagagccgccgacggcttcctgttcgtggtgggctgcgacagaggcaagatcctgttcgtgagcgagagcgtgttcaagatcctgaactacagccagtag

SEQ ID NO: 9406 - DNA, 306 bp, synthetic construct
  misc_feature 1..306: note = Description of Artificial Sequence: Synthetic coding sequence
  source 1..306: mol_type = other DNA
atggccgaccagagaatggacatcagcagcaccatcagcgacttcatgagccccggccccaccgacctgctgagcagcagcctgggcaccagcggcgtggactgcaacagaaagagaaagggcagcagcaccgactaccaggagagcatggacaccgacaaggacgacccccacggcagactggagtacaccgagcaccagggcagaatcaagaacgccagagaggcccacagccagatcgagaagagaagaagagacaagatgaacagcttcatcgacgagctggccagcctggtgcccacctag

SEQ ID NO: 9407 - DNA, 180 bp, synthetic construct
  misc_feature 1..180: note = Description of Artificial Sequence: Synthetic coding sequence
  source 1..180: mol_type = other DNA
atggccgaccagagaatggacatcagcagcaccatcagcgacttcatgagccccggccccaccgacctgctgagcagcagcctgggcaccagcggcgtggactgcaacagaaagagaaagggcagcagcaccgactaccaggagagcatggacaccgacaaggacgacccccacggctag

SEQ ID NO: 9408 - DNA, 1683 bp, synthetic construct
  misc_feature 1..1683: note = Description of Artificial Sequence: Synthetic coding sequence
  source 1..1683: mol_type = other DNA
atggagcccctgcagcagcagcagcagcagcagcagcagcagcagaagcagccccacctggcccccctgcagatggacgccagagagaagcagggccagcagatgagagaggcccagttcctgtacgcccagaagctggtgacccagcccaccctgctgagcgccaccgccggcagacccagcggcagcacccccctgggccccctggccagagtgccccccaccgccgccgtggcccaggtgttcgagagaggcaacatgaacagcgagcccgaggaggaggacggcggcctggaggacgaggacggcgacgacgaggtggccgaggtggccgagaaggagacccaggccgccagcaagtacttccacgtgcagaaggtggccagacaggaccccagagtggcccccatgagcaacctgctgcccgcccccggcctgcccccccacggccagcaggccaaggaggaccacaccaaggacgccagcaaggccagccccagcgtgagcaccgccggccagcccaactggaacctggacgagcagctgaagcagaacggcggcctggcctggagcgacgacgccgacggcggcagaggcagagagatcagcagagacttcgccaagctgtacgagctggacggcgaccccgagagaaaggagttcctggacgacctgttcgtgttcatgcagaagagaggcacccccatcaacagaatccccatcatggccaagcagatcctggacctgtacatgctgtacaagctggtgaccgagaagggcggcctggtggagatcatcaacaagaagatctggagagagatcaccaagggcctgaacctgcccaccagcatcaccagcgccgccttcaccctgagaacccagtacatgaagtacctgtacgcctacgagtgcgagaagaaggccctgagcagccccgccgagctgcaggccgccatcgacggcaacagaagagagggcagaagacccagctacagcagcagcctgttcggctacagccccgccgccgccaccgccgccgccgccgccggcgcccccgccctgctgagcccccccaagatcagattccccatcctgggcctgggcagcagcagcggcaccaacaccagcagccccagaatcagccccgccaccaccctgagaaagggcgacggcgcccccgtgaccaccgtgcccgtgcccaacagactggccgtgcccgtgaccctggccagccagcaggccggcaccagaaccgccgccctggagcagctgagagagagactggagagcggcgagcccgccgagaagaaggccagcagactgagcgaggaggagcagagactggtgcagcaggccttccagagaaacttcttcagcatggccagacagctgcccatgaagatcagaatcaacggcagagaggacagagccgaggccagcgccgccgccctgaacctgaccaccagcagcatcggcagcatcaacatgagcgtggacatcgacggcaccacctacgccggcgtgctgttcgcccagaagcccgtggtgcacctgatcaccggcagcgccccccagagcctgggcagcagcgccagcagcagcagcagcagccactgcagccccagccccaccagcagcagaggcacccccagcgccgagcccagcaccagctggagcctgtag

SEQ ID NO: 9409 - DNA, 1335 bp, synthetic construct
  misc_feature 1..1335: note = Description of Artificial Sequence: Synthetic coding sequence
  source 1..1335: mol_type = other DNA
atggagcccctgcagcagcagcagcagcagcagcagcagcagcagaagcagccccacctggcccccctgcagatggacgccagagagaagcagggccagcagatgagagaggcccagttcctgtacgcccagaagctggtgacccagcccaccctgctgagcgccaccgccggcagacccagcggcagcacccccctgggccccctggccagagtgccccccaccgccgccgtggcccaggtgttcgagagaggcaacatgaacagcgagcccgaggaggaggacggcggcctggaggacgaggacggcgacgacgaggtggccgaggtggccgagaaggagacccaggccgccagcaagtacttccacgtgcagaaggtggccagacaggaccccagagtggcccccatgagcaacctgctgcccgcccccggcctgcccccccacggccagcaggccaaggaggaccacaccaaggacgccagcaaggccagccccagcgtgagcaccgccggccagcccaactggaacctggacgagcagctgaagcagaacggcggcctggcctggagcgacgacgccgacggcggcagaggcagagagatcagcagagacttcgccaagctgtacgagctggacggcgaccccgagagaaaggagttcctggacgacctgttcgtgttcatgcagaagagaggcacccccatcaacagaatccccatcatggccaagcagatcctggacctgtacatgctgtacaagctggtgaccgagaagggcggcctggtggagatcatcaacaagaagatctggagagagatcaccaagggcctgaacctgcccaccagcatcaccagcgccgccttcaccctgagaacccagtacatgaagtacctgtacgcctacgagtgcgagaagaaggccctgagcagccccgccgagctgcaggccgccatcgacggcaacagaagagagggcagaagacccagctacagcagcagcctgttcggctacagccccgccgccgccaccgccgccgccgccgccggcgcccccgccctgctgagcccccccaagatcagattccccatcctgggcctgggcagcagcagcggcaccaacaccagcagccccagaatcagccccgccaccaccctgagaaagggcgacggcgcccccgtgaccaccgtgcccgtgcccaacagactggccgtgcccgtgaccctggccagccagcaggccggcaccagaaccgccgccctggagcagctgagagagagactggagagcggcgagcccgccgagaagaaggccagcggcacctggtgccagtag

SEQ ID NO: 9410 - DNA, 1413 bp, synthetic construct
  misc_feature 1..1413: note = Description of Artificial Sequence: Synthetic coding sequence
  source 1..1413: mol_type = other DNA
atggagcccctgcagcagcagcagcagcagcagcagcagcagcagaagcagccccacctggcccccctgcagatggacgccagagagaagcagggccagcagatgagagaggcccagttcctgtacgcccagaagctggtgacccagcccaccctgctgagcgccaccgccggcagacccagcggcagcacccccctgggccccctggccagagtgccccccaccgccgccgtggcccaggtgttcgagagaggcaacatgaacagcgagcccgaggaggaggacggcggcctggaggacgaggacggcgacgacgaggtggccgaggtggccgagaaggagacccaggccgccagcaagtacttccacgtgcagaaggtggccagacaggaccccagagtggcccccatgagcaacctgctgcccgcccccggcctgcccccccacggccagcaggccaaggaggaccacaccaaggacgccagcaaggccagccccagcgtgagcaccgccggccagcccaactggaacctggacgagcagctgaagcagaacggcggcctggcctggagcgacgacgccgacggcggcagaggcagagagatcagcagagacttcgccaagctgtacgagctggacggcgaccccgagagaaaggagttcctggacgacctgttcgtgttcatgcagaagagaggcacccccatcaacagaatccccatcatggccaagcagatcctggacctgtacatgctgtacaagctggtgaccgagaagggcggcctggtggagatcatcaacaagaagatctggagagagatcaccaagggcctgaacctgcccaccagcatcaccagcgccgccttcaccctgagaacccagtacatgaagtacctgtacgcctacgagtgcgagaagaaggccctgagcagccccgccgagctgcaggccgccatcgacggcaacagaagagagggcagaagacccagctacagcagcagcctgttcggctacagccccgccgccgccaccgccgccgccgccgccggcgcccccgccctgctgagcccccccaagatcagattccccatcctgggcctgggcagcagcagcggcaccaacaccagcagccccagaatcagccccgccaccaccctgagaaagggcgacggcgcccccgtgaccaccgtgcccgtgcccaacagactggccgtgcccgtgaccctggccagccagcaggccggcaccagaaccgccgccctggagcagctgagagagagactggagagcggcgagcccgccgagaagaaggccagcagactgagcgaggaggagcagagactggtgcagcaggccttccagagaaacttcttcagcatggccagacagctgagcatcctgtacgtgttctag

SEQ ID NO: 9411 - DNA, 7935 bp, synthetic construct
  misc_feature 1..7935: note = Description of Artificial Sequence: Synthetic coding sequence
  source 1..7935: mol_type = other DNA
atgggcgagcacggcctggagctggccagcatgatccccgccctgagagagctgggcagcgccacccccgaggagtacaacaccgtggtgcagaagcccagacagatcctgtgccagttcatcgacagaatcctgaccgacgtgaacgtggtggccgtggagctggtgaagaagaccgacagccagcccaccagcgtgatgctgctggacttcatccagcacatcatgaagagcagccccctgatgttcgtgaacgtgagcggcagccacgaggccaagggcagctgcatcgagttcagcaactggatcatcaccagactgctgagaatcgccgccacccccagctgccacctgctgcacaagaagatctgcgaggtgatctgcagcctgctgttcctgttcaagagcaagagccccgccatcttcggcgtgctgaccaaggagctgctgcagctgttcgaggacctggtgtacctgcacagaagaaacgtgatgggccacgccgtggagtggcccgtggtgatgagcagattcctgagccagctggacgagcacatgggctacctgcagagcgcccccctgcagctgatgagcatgcagaacctggagttcatcgaggtgaccctgctgatggtgctgaccagaatcatcgccatcgtgttcttcagaagacaggagctgctgctgtggcagatcggctgcgtgctgctggagtacggcagccccaagatcaagagcctggccatcagcttcctgaccgagctgttccagctgggcggcctgcccgcccagcccgccagcaccttcttcagcagcttcctggagctgctgaagcacctggtggagatggacaccgaccagctgaagctgtacgaggagcccctgagcaagctgatcaagaccctgttccccttcgaggccgaggcctacagaaacatcgagcccgtgtacctgaacatgctgctggagaagctgtgcgtgatgttcgaggacggcgtgctgatgagactgaagagcgacctgctgaaggccgccctgtgccacctgctgcagtacttcctgaagttcgtgcccgccggctacgagagcgccctgcaggtgagaaaggtgtacgtgagaaacatctgcaaggccctgctggacgtgctgggcatcgaggtggacgccgagtacctgctgggccccctgtacgccgccctgaagatggagagcatggagatcatcgaggagatccagtgccagacccagcaggagaacctgagcagcaacagcgacggcatcagccccaagagaagaagactgagcagcagcctgaaccccagcaagagagcccccaagcagaccgaggagatcaagcacgtggacatgaaccagaagagcatcctgtggagcgccctgaagcagaaggccgagagcctgcagatcagcctggagtacagcggcctgaagaaccccgtgatcgagatgctggagggcatcgccgtggtgctgcagctgaccgccctgtgcaccgtgcactgcagccaccagaacatgaactgcagaaccttcaaggactgccagcacaagagcaagaagaagcccagcgtggtgatcacctggatgagcctggacttctacaccaaggtgctgaagagctgcagaagcctgctggagagcgtgcagaagctggacctggaggccaccatcgacaaggtggtgaagatctacgacgccctgatctacatgcaggtgaacagcagcttcgaggaccacatcctggaggacctgtgcggcatgctgagcctgccctggatctacagccacagcgacgacggctgcctgaagctgaccaccttcgccgccaacctgctgaccctgagctgcagaatcagcgacagctacagcccccaggcccagagcagatgcgtgttcctgctgaccctgttccccagaagaatcttcctggagtggagaaccgccgtgtacaactgggccctgcagagcagccacgaggtgatcagagccagctgcgtgagcggcttcttcatcctgctgcagcagcagaacagctgcaacagagtgcccaagatcctgatcgacaaggtgaaggacgacagcgacatcgtgaagaaggagttcgccagcatcctgggccagctggtgtgcaccctgcacggcatgttctacctgaccagcagcctgaccgagcccttcagcgagcacggccacgtggacctgttctgcagaaacctgaaggccaccagccagcacgagtgcagcagcagccagctgaaggccagcgtgtgcaagcccttcctgttcctgctgaagaagaagatccccagccccgtgaagctggccttcatcgacaacctgcaccacctgtgcaagcacctggacttcagagaggacgagaccgacgtgaaggccgtgctgggcaccctgctgaacctgatggaggaccccgacaaggacgtgagagtggccttcagcggcaacatcaagcacatcctggagagcctggacagcgaggacggcttcatcaaggagctgttcgtgctgagaatgaaggaggcctacacccacgcccagatcagcagaaacaacgagctgaaggacaccctgatcctgaccaccggcgacatcggcagagccgccaagggcgacctggtgcccttcgccctgctgcacctgctgcactgcctgctgagcaagagcgccagcgtgagcggcgccgcctacaccgagatcagagccctggtggccgccaagagcgtgaagctgcagagcttcttcagccagtacaagaagcccatctgccagttcctggtggagagcctgcacagcagccagatgaccgccctgcccaacaccccctgccagaacgccgacgtgagaaagcaggacgtggcccaccagagagagatggccctgaacaccctgagcgagatcgccaacgtgttcgacttccccgacctgaacagattcctgaccagaaccctgcaggtgctgctgcccgacctggccgccaaggccagccccgccgccagcgccctgatcagaaccctgggcaagcagctgaacgtgaacagaagagagatcctgatcaacaacttcaagtacatcttcagccacctggtgtgcagctgcagcaaggacgagctggagagagccctgcactacctgaagaacgagaccgagatcgagctgggcagcctgctgagacaggacttccagggcctgcacaacgagctgctgctgagaatcggcgagcactaccagcaggtgttcaacggcctgagcatcctggccagcttcgccagcagcgacgacccctaccagggccccagagacatcatcagccccgagctgatggccgactacctgcagcccaagctgctgggcatcctggccttcttcaacatgcagctgctgagcagcagcgtgggcatcgaggacaagaagatggccctgaacagcctgatgagcctgatgaagctgatgggccccaagcacgtgagcagcgtgagagtgaagatgatgaccaccctgagaaccggcctgagattcaaggacgacttccccgagctgtgctgcagagcctgggactgcttcgtgagatgcctggaccacgcctgcctgggcagcctgctgagccacgtgatcgtggccctgctgcccctgatccacatccagcccaaggagaccgccgccatcttccactacctgatcatcgagaacagagacgccgtgcaggacttcctgcacgagatctacttcctgcccgaccaccccgagctgaagaagatcaaggccgtgctgcaggagtacagaaaggagaccagcgagagcaccgacctgcagaccaccctgcagctgagcatgaaggccatccagcacgagaacgtggacgtgagaatccacgccctgaccagcctgaaggagaccctgtacaagaaccaggagaagctgatcaagtacgccaccgacagcgagaccgtggagcccatcatcagccagctggtgaccgtgctgctgaagggctgccaggacgccaacagccaggccagactgctgtgcggcgagtgcctgggcgagctgggcgccatcgaccccggcagactggacttcagcaccaccgagacccagggcaaggacttcaccttcgtgaccggcgtggaggacagcagcttcgcctacggcctgctgatggagctgaccagagcctacctggcctacgccgacaacagcagagcccaggacagcgccgcctacgccatccaggagctgctgagcatctacgactgcagagagatggagaccaacggccccggccaccagctgtggagaagattccccgagcacgtgagagagatcctggagccccacctgaacaccagatacaagagcagccagaagagcaccgactggagcggcgtgaagaagcccatctacctgagcaagctgggcagcaacttcgccgagtggagcgccagctgggccggctacctgatcaccaaggtgagacacgacctggccagcaagatcttcacctgctgcagcatcatgatgaagcacgacttcaaggtgaccatctacctgctgccccacatcctggtgtacgtgctgctgggctgcaaccaggaggaccagcaggaggtgtacgccgagatcatggccgtgctgaagcacgacgaccagcacaccatcaacacccaggacatcgccagcgacctgtgccagctgagcacccagaccgtgttcagcatgctggaccacctgacccagtgggccagacacaagttccaggccctgaaggccgagaagtgcccccacagcaagagcaacagaaacaaggtggacagcatggtgagcaccgtggactacgaggactaccagagcgtgaccagattcctggacctgatcccccaggacaccctggccgtggccagcttcagaagcaaggcctacaccagagccgtgatgcacttcgagagcttcatcaccgagaagaagcagaacatccaggagcacctgggcttcctgcagaagctgtacgccgccatgcacgagcccgacggcgtggccggcgtgagcgccatcagaaaggccgagcccagcctgaaggagcagatcctggagcacgagagcctgggcctgctgagagacgccaccgcctgctacgacagagccatccagctggagcccgaccagatcatccactaccacggcgtggtgaagagcatgctgggcctgggccagctgagcaccgtgatcacccaggtgaacggcgtgcacgccaacagaagcgagtggaccgacgagctgaacacctacagagtggaggccgcctggaagctgagccagtgggacctggtggagaactacctggccgccgacggcaagagcaccacctggagcgtgagactgggccagctgctgctgagcgccaagaagagagacatcaccgccttctacgacagcctgaagctggtgagagccgagcagatcgtgcccctgagcgccgccagcttcgagagaggcagctaccagagaggctacgagtacatcgtgagactgcacatgctgtgcgagctggagcacagcatcaagcccctgttccagcacagccccggcgacagcagccaggaggacagcctgaactgggtggccagactggagatgacccagaacagctacagagccaaggagcccatcctggccctgagaagagccctgctgagcctgaacaagagacccgactacaacgagatggtgggcgagtgctggctgcagagcgccagagtggccagaaaggccggccaccaccagaccgcctacaacgccctgctgaacgccggcgagagcagactggccgagctgtacgtggagagagccaagtggctgtggagcaagggcgacgtgcaccaggccctgatcgtgctgcagaagggcgtggagctgtgcttccccgagaacgagaccccccccgagggcaagaacatgctgatccacggcagagccatgctgctggtgggcagattcatggaggagaccgccaacttcgagagcaacgccatcatgaagaagtacaaggacgtgaccgcctgcctgcccgagtgggaggacggccacttctacctggccaagtactacgacaagctgatgcccatggtgaccgacaacaagatggagaagcagggcgacctgatcagatacatcgtgctgcacttcggcagaagcctgcagtacggcaaccagttcatctaccagagcatgcccagaatgctgaccctgtggctggactacggcaccaaggcctacgagtgggagaaggccggcagaagcgacagagtgcagatgagaaacgacctgggcaagatcaacaaggtgatcaccgagcacaccaactacctggccccctaccagttcctgaccgccttcagccagctgatcagcagaatctgccacagccacgacgaggtgttcgtggtgctgatggagatcatcgccaaggtgttcctggcctacccccagcaggccatgtggatgatgaccgccgtgagcaagagcagctaccccatgagagtgaacagatgcaaggagatcctgaacaaggccatccacatgaagaagagcctggagaagttcgtgggcgacgccaccagactgaccgacaagctgctggagctgtgcaacaagcccgtggacggcagcagcagcaccctgagcatgagcacccacttcaagatgctgaagaagctggtggaggaggccaccttcagcgagatcctgatccccctgcagagcgtgatgatccccaccctgcccagcatcctgggcacccacgccaaccacgccagccacgagcccttccccggccactgggcctacatcgccggcttcgacgacatggtggagatcctggccagcctgcagaagcccaagaagatcagcctgaagggcagcgacggcaagttctacatcatgatgtgcaagcccaaggacgacctgagaaaggactgcagactgatggagttcaacagcctgatcaacaagtgcctgagaaaggacgccgagagcagaagaagagagctgcacatcagaacctacgccgtgatccccctgaacgacgagtgcggcatcatcgagtgggtgaacaacaccgccggcctgagacccatcctgaccaagctgtacaaggagaagggcgtgtacatgaccggcaaggagctgagacagtgcatgctgcccaagagcgccgccctgagcgagaagctgaaggtgttcagagagttcctgctgcccagacacccccccatcttccacgagtggttcctgagaaccttccccgaccccaccagctggtacagcagcagaagcgcctactgcagaagcaccgccgtgatgagcatggtgggctacatcctgggcctgggcgacagacacggcgagaacatcctgttcgacagcctgaccggcgagtgcgtgcacgtggacttcaactgcctgttcaacaagggcgagaccttcgaggtgcccgagatcgtgcccttcagactgacccacaacatggtgaacggcatgggccccatgggcaccgagggcctgttcagaagagcctgcgaggtgaccatgagactgatgagagaccagagagagcccctgatgagcgtgctgaagaccttcctgcacgaccccctggtggagtggagcaagcccgtgaagggccacagcaaggcccccctgaacgagaccggcgaggtggtgaacgagaaggccaagacccacgtgctggacatcgagcagagactgcagggcgtgatcaagaccagaaacagagtgaccggcctgcccctgagcatcgagggccacgtgcactacctgatccaggaggccaccgacgagaacctgctgtgccagatgtacctgggctggaccccctacatgtag

SEQ ID NO: 9412 - DNA, 7743 bp, synthetic construct
  misc_feature 1..7743: note = Description of Artificial Sequence: Synthetic coding sequence
  source 1..7743: mol_type = other DNA
atgggcgagcacggcctggagctggccagcatgatccccgccctgagagagctgggcagcgccacccccgaggagtacaacaccgtggtgcagaagcccagacagatcctgtgccagttcatcgacagaatcctgaccgacgtgaacgtggtggccgtggagctggtgaagaagaccgacagccagcccaccagcgtgatgctgctggacttcatccagcacatcatgaagagcagccccctgatgttcgtgaacgtgagcggcagccacgaggccaagggcagctgcatcgagttcagcaactggatcatcaccagactgctgagaatcgccgccacccccagctgccacctgctgcacaagaagatctgcgaggtgatctgcagcctgctgttcctgttcaagagcaagagccccgccatcttcggcgtgctgaccaaggagctgctgcagctgttcgaggacctggtgtacctgcacagaagaaacgtgatgggccacgccgtggagtggcccgtggtgatgagcagattcctgagccagctggacgagcacatgggctacctgcagagcgcccccctgcagctgatgagcatgcagaacctggagttcatcgaggtgaccctgctgatggtgctgaccagaatcatcgccatcgtgttcttcagaagacaggagctgctgctgtggcagatcggctgcgtgctgctggagtacggcagccccaagatcaagagcctggccatcagcttcctgaccgagctgttccagctgggcggcctgcccgcccagcccgccagcaccttcttcagcagcttcctggagctgctgaagcacctggtggagatggacaccgaccagctgaagctgtacgaggagcccctgagcaagctgatcaagaccctgttccccttcgaggccgaggcctacagaaacatcgagcccgtgtacctgaacatgctgctggagaagctgtgcgtgatgttcgaggacggcgtgctgatgagactgaagagcgacctgctgaaggccgccctgtgccacctgctgcagtacttcctgaagttcgtgcccgccggctacgagagcgccctgcaggtgagaaaggtgtacgtgagaaacatctgcaaggccctgctggacgtgctgggcatcgaggtggacgccgagtacctgctgggccccctgtacgccgccctgaagatggagagcatggagatcatcgaggagatccagtgccagacccagcaggagaacctgagcagcaacagcgacggcatcagccccaagagaagaagactgagcagcagcctgaaccccagcaagagagcccccaagcagaccgaggacagaaccttcaaggactgccagcacaagagcaagaagaagcccagcgtggtgatcacctggatgagcctggacttctacaccaaggtgctgaagagctgcagaagcctgctggagagcgtgcagaagctggacctggaggccaccatcgacaaggtggtgaagatctacgacgccctgatctacatgcaggtgaacagcagcttcgaggaccacatcctggaggacctgtgcggcatgctgagcctgccctggatctacagccacagcgacgacggctgcctgaagctgaccaccttcgccgccaacctgctgaccctgagctgcagaatcagcgacagctacagcccccaggcccagagcagatgcgtgttcctgctgaccctgttccccagaagaatcttcctggagtggagaaccgccgtgtacaactgggccctgcagagcagccacgaggtgatcagagccagctgcgtgagcggcttcttcatcctgctgcagcagcagaacagctgcaacagagtgcccaagatcctgatcgacaaggtgaaggacgacagcgacatcgtgaagaaggagttcgccagcatcctgggccagctggtgtgcaccctgcacggcatgttctacctgaccagcagcctgaccgagcccttcagcgagcacggccacgtggacctgttctgcagaaacctgaaggccaccagccagcacgagtgcagcagcagccagctgaaggccagcgtgtgcaagcccttcctgttcctgctgaagaagaagatccccagccccgtgaagctggccttcatcgacaacctgcaccacctgtgcaagcacctggacttcagagaggacgagaccgacgtgaaggccgtgctgggcaccctgctgaacctgatggaggaccccgacaaggacgtgagagtggccttcagcggcaacatcaagcacatcctggagagcctggacagcgaggacggcttcatcaaggagctgttcgtgctgagaatgaaggaggcctacacccacgcccagatcagcagaaacaacgagctgaaggacaccctgatcctgaccaccggcgacatcggcagagccgccaagggcgacctggtgcccttcgccctgctgcacctgctgcactgcctgctgagcaagagcgccagcgtgagcggcgccgcctacaccgagatcagagccctggtggccgccaagagcgtgaagctgcagagcttcttcagccagtacaagaagcccatctgccagttcctggtggagagcctgcacagcagccagatgaccgccctgcccaacaccccctgccagaacgccgacgtgagaaagcaggacgtggcccaccagagagagatggccctgaacaccctgagcgagatcgccaacgtgttcgacttccccgacctgaacagattcctgaccagaaccctgcaggtgctgctgcccgacctggccgccaaggccagccccgccgccagcgccctgatcagaaccctgggcaagcagctgaacgtgaacagaagagagatcctgatcaacaacttcaagtacatcttcagccacctggtgtgcagctgcagcaaggacgagctggagagagccctgcactacctgaagaacgagaccgagatcgagctgggcagcctgctgagacaggacttccagggcctgcacaacgagctgctgctgagaatcggcgagcactaccagcaggtgttcaacggcctgagcatcctggccagcttcgccagcagcgacgacccctaccagggccccagagacatcatcagccccgagctgatggccgactacctgcagcccaagctgctgggcatcctggccttcttcaacatgcagctgctgagcagcagcgtgggcatcgaggacaagaagatggccctgaacagcctgatgagcctgatgaagctgatgggccccaagcacgtgagcagcgtgagagtgaagatgatgaccaccctgagaaccggcctgagattcaaggacgacttccccgagctgtgctgcagagcctgggactgcttcgtgagatgcctggaccacgcctgcctgggcagcctgctgagccacgtgatcgtggccctgctgcccctgatccacatccagcccaaggagaccgccgccatcttccactacctgatcatcgagaacagagacgccgtgcaggacttcctgcacgagatctacttcctgcccgaccaccccgagctgaagaagatcaaggccgtgctgcaggagtacagaaaggagaccagcgagagcaccgacctgcagaccaccctgcagctgagcatgaaggccatccagcacgagaacgtggacgtgagaatccacgccctgaccagcctgaaggagaccctgtacaagaaccaggagaagctgatcaagtacgccaccgacagcgagaccgtggagcccatcatcagccagctggtgaccgtgctgctgaagggctgccaggacgccaacagccaggccagactgctgtgcggcgagtgcctgggcgagctgggcgccatcgaccccggcagactggacttcagcaccaccgagacccagggcaaggacttcaccttcgtgaccggcgtggaggacagcagcttcgcctacggcctgctgatggagctgaccagagcctacctggcctacgccgacaacagcagagcccaggacagcgccgcctacgccatccaggagctgctgagcatctacgactgcagagagatggagaccaacggccccggccaccagctgtggagaagattccccgagcacgtgagagagatcctggagccccacctgaacaccagatacaagagcagccagaagagcaccgactggagcggcgtgaagaagcccatctacctgagcaagctgggcagcaacttcgccgagtggagcgccagctgggccggctacctgatcaccaaggtgagacacgacctggccagcaagatcttcacctgctgcagcatcatgatgaagcacgacttcaaggtgaccatctacctgctgccccacatcctggtgtacgtgctgctgggctgcaaccaggaggaccagcaggaggtgtacgccgagatcatggccgtgctgaagcacgacgaccagcacaccatcaacacccaggacatcgccagcgacctgtgccagctgagcacccagaccgtgttcagcatgctggaccacctgacccagtgggccagacacaagttccaggccctgaaggccgagaagtgcccccacagcaagagcaacagaaacaaggtggacagcatggtgagcaccgtggactacgaggactaccagagcgtgaccagattcctggacctgatcccccaggacaccctggccgtggccagcttcagaagcaaggcctacaccagagccgtgatgcacttcgagagcttcatcaccgagaagaagcagaacatccaggagcacctgggcttcctgcagaagctgtacgccgccatgcacgagcccgacggcgtggccggcgtgagcgccatcagaaaggccgagcccagcctgaaggagcagatcctggagcacgagagcctgggcctgctgagagacgccaccgcctgctacgacagagccatccagctggagcccgaccagatcatccactaccacggcgtggtgaagagcatgctgggcctgggccagctgagcaccgtgatcacccaggtgaacggcgtgcacgccaacagaagcgagtggaccgacgagctgaacacctacagagtggaggccgcctggaagctgagccagtgggacctggtggagaactacctggccgccgacggcaagagcaccacctggagcgtgagactgggccagctgctgctgagcgccaagaagagagacatcaccgccttctacgacagcctgaagctggtgagagccgagcagatcgtgcccctgagcgccgccagcttcgagagaggcagctaccagagaggctacgagtacatcgtgagactgcacatgctgtgcgagctggagcacagcatcaagcccctgttccagcacagccccggcgacagcagccaggaggacagcctgaactgggtggccagactggagatgacccagaacagctacagagccaaggagcccatcctggccctgagaagagccctgctgagcctgaacaagagacccgactacaacgagatggtgggcgagtgctggctgcagagcgccagagtggccagaaaggccggccaccaccagaccgcctacaacgccctgctgaacgccggcgagagcagactggccgagctgtacgtggagagagccaagtggctgtggagcaagggcgacgtgcaccaggccctgatcgtgctgcagaagggcgtggagctgtgcttccccgagaacgagaccccccccgagggcaagaacatgctgatccacggcagagccatgctgctggtgggcagattcatggaggagaccgccaacttcgagagcaacgccatcatgaagaagtacaaggacgtgaccgcctgcctgcccgagtgggaggacggccacttctacctggccaagtactacgacaagctgatgcccatggtgaccgacaacaagatggagaagcagggcgacctgatcagatacatcgtgctgcacttcggcagaagcctgcagtacggcaaccagttcatctaccagagcatgcccagaatgctgaccctgtggctggactacggcaccaaggcctacgagtgggagaaggccggcagaagcgacagagtgcagatgagaaacgacctgggcaagatcaacaaggtgatcaccgagcacaccaactacctggccccctaccagttcctgaccgccttcagccagctgatcagcagaatctgccacagccacgacgaggtgttcgtggtgctgatggagatcatcgccaaggtgttcctggcctacccccagcaggccatgtggatgatgaccgccgtgagcaagagcagctaccccatgagagtgaacagatgcaaggagatcctgaacaaggccatccacatgaagaagagcctggagaagttcgtgggcgacgccaccagactgaccgacaagctgctggagctgtgcaacaagcccgtggacggcagcagcagcaccctgagcatgagcacccacttcaagatgctgaagaagctggtggaggaggccaccttcagcgagatcctgatccccctgcagagcgtgatgatccccaccctgcccagcatcctgggcacccacgccaaccacgccagccacgagcccttccccggccactgggcctacatcgccggcttcgacgacatggtggagatcctggccagcctgcagaagcccaagaagatcagcctgaagggcagcgacggcaagttctacatcatgatgtgcaagcccaaggacgacctgagaaaggactgcagactgatggagttcaacagcctgatcaacaagtgcctgagaaaggacgccgagagcagaagaagagagctgcacatcagaacctacgccgtgatccccctgaacgacgagtgcggcatcatcgagtgggtgaacaacaccgccggcctgagacccatcctgaccaagctgtacaaggagaagggcgtgtacatgaccggcaaggagctgagacagtgcatgctgcccaagagcgccgccctgagcgagaagctgaaggtgttcagagagttcctgctgcccagacacccccccatcttccacgagtggttcctgagaaccttccccgaccccaccagctggtacagcagcagaagcgcctactgcagaagcaccgccgtgatgagcatggtgggctacatcctgggcctgggcgacagacacggcgagaacatcctgttcgacagcctgaccggcgagtgcgtgcacgtggacttcaactgcctgttcaacaagggcgagaccttcgaggtgcccgagatcgtgcccttcagactgacccacaacatggtgaacggcatgggccccatgggcaccgagggcctgttcagaagagcctgcgaggtgaccatgagactgatgagagaccagagagagcccctgatgagcgtgctgaagaccttcctgcacgaccccctggtggagtggagcaagcccgtgaagggccacagcaaggcccccctgaacgagaccggcgaggtggtgaacgagaaggccaagacccacgtgctggacatcgagcagagactgcagggcgtgatcaagaccagaaacagagtgaccggcctgcccctgagcatcgagggccacgtgcactacctgatccaggaggccaccgacgagaacctgctgtgccagatgtacctgggctggaccccctacatgtag

SEQ ID NO: 9413 - DNA, 9171 bp, synthetic construct
  misc_feature 1..9171: note = Description of Artificial Sequence: Synthetic coding sequence
  source 1..9171: mol_type = other DNA
atgagcctggtgctgaacgacctgctgatctgctgcagacagctggagcacgacagagccaccgagagaaagaaggaggtggagaagttcaagagactgatcagagaccccgagaccatcaagcacctggacagacacagcgacagcaagcagggcaagtacctgaactgggacgccgtgttcagattcctgcagaagtacatccagaaggagaccgagtgcctgagaatcgccaagcccaacgtgagcgccagcacccaggccagcagacagaagaagatgcaggagatcagcagcctggtgaagtacttcatcaagtgcgccaacagaagagcccccagactgaagtgccaggagctgctgaactacatcatggacaccgtgaaggacagcagcaacggcgccatctacggcgccgactgcagcaacatcctgctgaaggacatcctgagcgtgagaaagtactggtgcgagatcagccagcagcagtggctggagctgttcagcgtgtacttcagactgtacctgaagcccagccaggacgtgcacagagtgctggtggccagaatcatccacgccgtgaccaagggctgctgcagccagaccgacggcctgaacagcaagttcctggacttcttcagcaaggccatccagtgcgccagacaggagaagagcagcagcggcctgaaccacatcctggccgccctgaccatcttcctgaagaccctggccgtgaacttcagaatcagagtgtgcgagctgggcgacgagatcctgcccaccctgctgtacatctggacccagcacagactgaacgacagcctgaaggaggtgatcatcgagctgttccagctgcagatctacatccaccaccccaagggcgccaagacccaggagaagggcgcctacgagagcaccaagtggagaagcatcctgtacaacctgtacgacctgctggtgaacgagatcagccacatcggcagcagaggcaagtacagcagcggcttcagaaacatcgccgtgaaggagaacctgatcgagctgatggccgacatctgccaccaggtgttcaacgaggacaccagaagcctggagatcagccagagctacaccaccacccagagagagagcagcgactacagcgtgccctgcaagagaaagaagatcgagctgggctgggaggtgatcaaggaccacctgcagaagagccagaacgacttcgacctggtgccctggctgcagatcgccacccagctgatcagcaagtaccccgccagcctgcccaactgcgagctgagccccctgctgatgatcctgagccagctgctgccccagcagagacacggcgagagaaccccctacgtgctgagatgcctgaccgaggtggccctgtgccaggacaagagaagcaacctggagagcagccagaagagcgacctgctgaagctgtggaacaagatctggtgcatcaccttcagaggcatcagcagcgagcagatccaggccgagaacttcggcctgctgggcgccatcatccagggcagcctggtggaggtggacagagagttctggaagctgttcaccggcagcgcctgcagacccagctgccccgccgtgtgctgcctgaccctggccctgaccaccagcatcgtgcccggcaccgtgaagatgggcatcgagcagaacatgtgcgaggtgaacagaagcttcagcctgaaggagagcatcatgaagtggctgctgttctaccagctggagggcgacctggagaacagcaccgaggtgccccccatcctgcacagcaacttcccccacctggtgctggagaagatcctggtgagcctgaccatgaagaactgcaaggccgccatgaacttcttccagagcgtgcccgagtgcgagcaccaccagaaggacaaggaggagctgagcttcagcgaggtggaggagctgttcctgcagaccaccttcgacaagatggacttcctgaccatcgtgagagagtgcggcatcgagaagcaccagagcagcatcggcttcagcgtgcaccagaacctgaaggagagcctggacagatgcctgctgggcctgagcgagcagctgctgaacaactacagcagcgagatcaccaacagcgagaccctggtgagatgcagcagactgctggtgggcgtgctgggctgctactgctacatgggcgtgatcgccgaggaggaggcctacaagagcgagctgttccagaaggccaagagcctgatgcagtgcgccggcgagagcatcaccctgttcaagaacaagaccaacgaggagttcagaatcggcagcctgagaaacatgatgcagctgtgcaccagatgcctgagcaactgcaccaagaagagccccaacaagatcgccagcggcttcttcctgagactgctgaccagcaagctgatgaacgacatcgccgacatctgcaagagcctggccagcttcatcaagaagcccttcgacagaggcgaggtggagagcatggaggacgacaccaacggcaacctgatggaggtggaggaccagagcagcatgaacctgttcaacgactaccccgacagcagcgtgagcgacgccaacgagcccggcgagagccagagcaccatcggcgccatcaaccccctggccgaggagtacctgagcaagcaggacctgctgttcctggacatgctgaagttcctgtgcctgtgcgtgaccaccgcccagaccaacaccgtgagcttcagagccgccgacatcagaagaaagctgctgatgctgatcgacagcagcaccctggagcccaccaagagcctgcacctgcacatgtacctgatgctgctgaaggagctgcccggcgaggagtaccccctgcccatggaggacgtgctggagctgctgaagcccctgagcaacgtgtgcagcctgtacagaagagaccaggacgtgtgcaagaccatcctgaaccacgtgctgcacgtggtgaagaacctgggccagagcaacatggacagcgagaacaccagagacgcccagggccagttcctgaccgtgatcggcgccttctggcacctgaccaaggagagaaagtacatcttcagcgtgagaatggccctggtgaactgcctgaagaccctgctggaggccgacccctacagcaagtgggccatcctgaacgtgatgggcaaggacttccccgtgaacgaggtgttcacccagttcctggccgacaaccaccaccaggtgagaatgctggccgccgagagcatcaacagactgttccaggacaccaagggcgacagcagcagactgctgaaggccctgcccctgaagctgcagcagaccgccttcgagaacgcctacctgaaggcccaggagggcatgagagagatgagccacagcgccgagaaccccgagaccctggacgagatctacaacagaaagagcgtgctgctgaccctgatcgccgtggtgctgagctgcagccccatctgcgagaagcaggccctgttcgccctgtgcaagagcgtgaaggagaacggcctggagccccacctggtgaagaaggtgctggagaaggtgagcgagaccttcggctacagaagactggaggacttcatggccagccacctggactacctggtgctggagtggctgaacctgcaggacaccgagtacaacctgagcagcttccccttcatcctgctgaactacaccaacatcgaggacttctacagaagctgctacaaggtgctgatcccccacctggtgatcagaagccacttcgacgaggtgaagagcatcgccaaccagatccaggaggactggaagagcctgctgaccgactgcttccccaagatcctggtgaacatcctgccctacttcgcctacgagggcaccagagacagcggcatggcccagcagagagagaccgccaccaaggtgtacgacatgctgaagagcgagaacctgctgggcaagcagatcgaccacctgttcatcagcaacctgcccgagatcgtggtggagctgctgatgaccctgcacgagcccgccaacagcagcgccagccagagcaccgacctgtgcgacttcagcggcgacctggaccccgcccccaaccccccccacttccccagccacgtgatcaaggccaccttcgcctacatcagcaactgccacaagaccaagctgaagagcatcctggagatcctgagcaagagccccgacagctaccagaagatcctgctggccatctgcgagcaggccgccgagaccaacaacgtgtacaagaagcacagaatcctgaagatctaccacctgttcgtgagcctgctgctgaaggacatcaagagcggcctgggcggcgcctgggccttcgtgctgagagacgtgatctacaccctgatccactacatcaaccagagacccagctgcatcatggacgtgagcctgagaagcttcagcctgtgctgcgacctgctgagccaggtgtgccagaccgccgtgacctactgcaaggacgccctggagaaccacctgcacgtgatcgtgggcaccctgatccccctggtgtacgagcaggtggaggtgcagaagcaggtgctggacctgctgaagtacctggtgatcgacaacaaggacaacgagaacctgtacatcaccatcaagctgctggaccccttccccgaccacgtggtgttcaaggacctgagaatcacccagcagaagatcaagtacagcagaggccccttcagcctgctggaggagatcaaccacttcctgagcgtgagcgtgtacgacgccctgcccctgaccagactggagggcctgaaggacctgagaagacagctggagctgcacaaggaccagatggtggacatcatgagagccagccaggacaacccccaggacggcatcatggtgaagctggtggtgaacctgctgcagctgagcaagatggccatcaaccacaccggcgagaaggaggtgctggaggccgtgggcagctgcctgggcgaggtgggccccatcgacttcagcaccatcgccatccagcacagcaaggacgccagctacaccaaggccctgaagctgttcgaggacaaggagctgcagtggaccttcatcatgctgacctacctgaacaacaccctggtggaggactgcgtgaaggtgagaagcgccgccgtgacctgcctgaagaacatcctggccaccaagaccggccacagcttctgggagatctacaagatgaccaccgaccccatgctggcctacctgcagcccttcagaaccagcagaaagaagttcctggaggtgcccagattcgacaaggagaaccccttcgagggcctggacgacatcaacctgtggatccccctgagcgagaaccacgacatctggatcaagaccctgacctgcgccttcctggacagcggcggcaccaagtgcgagatcctgcagctgctgaagcccatgtgcgaggtgaagaccgacttctgccagaccgtgctgccctacctgatccacgacatcctgctgcaggacaccaacgagagctggagaaacctgctgagcacccacgtgcagggcttcttcaccagctgcctgagacacttcagccagaccagcagaagcaccacccccgccaacctggacagcgagagcgagcacttcttcagatgctgcctggacaagaagagccagagaaccatgctggccgtggtggactacatgagaagacagaagagacccagcagcggcaccatcttcaacgacgccttctggctggacctgaactacctggaggtggccaaggtggcccagagctgcgccgcccacttcaccgccctgctgtacgccgagatctacgccgacaagaagagcatggacgaccaggagaagagaagcctggccttcgaggagggcagccagaacaccaccatcagcagcctgagcgagaagagcaaggaggagaccggcatcagcctgcaggacctgctgctggagatctacagaagcatcggcgagcccgacagcctgtacggctgcggcggcggcaagatgctgcagcccatcaccagactgagaacctacgagcacgaggccatgtggggcaaggccctggtgacctacgacctggagaccgccatccccagcagcaccagacaggccggcatcatccaggccctgcagaacctgggcctgtgccacatcctgagcgtgtacctgaagggcctggactacgagaacaaggactggtgccccgagctggaggagctgcactaccaggccgcctggagaaacatgcagtgggaccactgcaccagcgtgagcaaggaggtggagggcaccagctaccacgagagcctgtacaacgccctgcagagcctgagagacagagagttcagcaccttctacgagagcctgaagtacgccagagtgaaggaggtggaggagatgtgcaagagaagcctggagagcgtgtacagcctgtaccccaccctgagcagactgcaggccatcggcgagctggagagcatcggcgagctgttcagcagaagcgtgacccacagacagctgagcgaggtgtacatcaagtggcagaagcacagccagctgctgaaggacagcgacttcagcttccaggagcccatcatggccctgagaaccgtgatcctggagatcctgatggagaaggagatggacaacagccagagagagtgcatcaaggacatcctgaccaagcacctggtggagctgagcatcctggccagaaccttcaagaacacccagctgcccgagagagccatcttccagatcaagcagtacaacagcgtgagctgcggcgtgagcgagtggcagctggaggaggcccaggtgttctgggccaagaaggagcagagcctggccctgagcatcctgaagcagatgatcaagaagctggacgccagctgcgccgccaacaaccccagcctgaagctgacctacaccgagtgcctgagagtgtgcggcaactggctggccgagacctgcctggagaaccccgccgtgatcatgcagacctacctggagaaggccgtggaggtggccggcaactacgacggcgagagcagcgacgagctgagaaacggcaagatgaaggccttcctgagcctggccagattcagcgacacccagtaccagagaatcgagaactacatgaagagcagcgagttcgagaacaagcaggccctgctgaagagagccaaggaggaggtgggcctgctgagagagcacaagatccagaccaacagatacaccgtgaaggtgcagagagagctggagctggacgagctggccctgagagccctgaaggaggacagaaagagattcctgtgcaaggccgtggagaactacatcaactgcctgctgagcggcgaggagcacgacatgtgggtgttcagactgtgcagcctgtggctggagaacagcggcgtgagcgaggtgaacggcatgatgaagagagacggcatgaagatccccacctacaagttcctgcccctgatgtaccagctggccgccagaatgggcaccaagatgatgggcggcctgggcttccacgaggtgctgaacaacctgatcagcagaatcagcatggaccacccccaccacaccctgttcatcatcctggccctggccaacgccaacagagacgagttcctgaccaagcccgaggtggccagaagaagcagaatcaccaagaacgtgcccaagcagagcagccagctggacgaggacagaaccgaggccgccaacagaatcatctgcaccatcagaagcagaagaccccagatggtgagaagcgtggaggccctgtgcgacgcctacatcatcctggccaacctggacgccacccagtggaagacccagagaaagggcatcaacatccccgccgaccagcccatcaccaagctgaagaacctggaggacgtggtggtgcccaccatggagatcaaggtggaccacaccggcgagtacggcaacctggtgaccatccagagcttcaaggccgagttcagactggccggcggcgtgaacctgcccaagatcatcgactgcgtgggcagcgacggcaaggagagaagacagctggtgaagggcagagacgacctgagacaggacgccgtgatgcagcaggtgttccagatgtgcaacaccctgctgcagagaaacaccgagaccagaaagagaaagctgaccatctgcacctacaaggtggtgcccctgagccagagaagcggcgtgctggagtggtgcaccggcaccgtgcccatcggcgagttcctggtgaacaacgaggacggcgcccacaagagatacagacccaacgacttcagcgccttccagtgccagaagaagatgatggaggtgcagaagaagagcttcgaggagaagtacgaggtgttcatggacgtgtgccagaacttccagcccgtgttcagatacttctgcatggagaagttcctggaccccgccatctggttcgagaagagactggcctacaccagaagcgtggccaccagcagcatcgtgggctacatcctgggcctgggcgacagacacgtgcagaacatcctgatcaacgagcagagcgccgagctggtgcacatcgacctgggcgtggccttcgagcagggcaagatcctgcccacccccgagaccgtgcccttcagactgaccagagacatcgtggacggcatgggcatcaccggcgtggagggcgtgttcagaagatgctgcgagaagaccatggaggtgatgagaaacagccaggagaccctgctgaccatcgtggaggtgctgctgtacgaccccctgttcgactggaccatgaaccccctgaaggccctgtacctgcagcagagacccgaggacgagaccgagctgcaccccaccctgaacgccgacgaccaggagtgcaagagaaacctgagcgacatcgaccagagcttcaacaaggtggccgagagagtgctgatgagactgcaggagaagctgaagggcgtggaggagggcaccgtgctgagcgtgggcggccaggtgaacctgctgatccagcaggccatcgaccccaagaacctgagcagactgttccccggctggaaggcctgggtgtag

SEQ ID NO: 9414 - DNA, 417 bp, synthetic construct
  misc_feature 1..417: note = Description of Artificial Sequence: Synthetic coding sequence
  source 1..417: mol_type = other DNA
atgaccctgcacgagcccgccaacagcagcgccagccagagcaccgacctgtgcgacttcagcggcgacctggaccccgcccccaaccccccccacttccccagccacgtgatcaaggccaccttcgcctacatcagcaactgccacaagaccaagctgaagagcatcctggagatcctgagcaagagccccgacagctaccagaagatcctgctggccatctgcgagcaggccgccgagaccaacaacgtgtacaagaagcacagaatcctgaagatctaccacctgttcgtgagcctgctgctgaaggacatcaagagcggcctgggcggcgcctgggccttcgtgctgagagacgtgatctacaccctgatccactacatcaaccagagaaagctgaccatcttcagccagtag

SEQ ID NO: 9415 - DNA, 9171 bp, synthetic construct; identical to SEQ ID NO: 9413
  misc_feature 1..9171: note = Description of Artificial Sequence: Synthetic coding sequence
  source 1..9171: mol_type = other DNA

SEQ ID NO: 9416 - DNA, 4110 bp, synthetic construct
  misc_feature 1..4110: note = Description of Artificial Sequence: Synthetic coding sequence
  source 1..4110: mol_type = other DNA
atgagcctggtgctgaacgacctgctgatctgctgcagacagctggagcacgacagagccaccgagagaaagaaggaggtggagaagttcaagagactgatcagagaccccgagaccatcaagcacctggacagacacagcgacagcaagcagggcaagtacctgaactgggacgccgtgttcagattcctgcagaagtacatccagaaggagaccgagtgcctgagaatcgccaagcccaacgtgagcgccagcacccaggccagcagacagaagaagatgcaggagatcagcagcctggtgaagtacttcatcaagtgcgccaacagaagagcccccagactgaagtgccaggagctgctgaactacatcatggacaccgtgaaggacagcagcaacggcgccatctacggcgccgactgcagcaacatcctgctgaaggacatcctgagcgtgagaaagtactggtgcgagatcagccagcagcagtggctggagctgttcagcgtgtacttcagactgtacctgaagcccagccaggacgtgcacagagtgctggtggccagaatcatccacgccgtgaccaagggctgctgcagccagaccgacggcctgaacagcaagttcctggacttcttcagcaaggccatccagtgcgccagacaggagaagagcagcagcggcctgaaccacatcctggccgccctgaccatcttcctgaagaccctggccgtgaacttcagaatcagagtgtgcgagctgggcgacgagatcctgcccaccctgctgtacatctggacccagcacagactgaacgacagcctgaaggaggtgatcatcgagctgttccagctgcagatctacatccaccaccccaagggcgccaagacccaggagaagggcgcctacgagagcaccaagtggagaagcatcctgtacaacctgtacgacctgctggtgaacgagatcagccacatcggcagcagaggcaagtacagcagcggcttcagaaacatcgccgtgaaggagaacctgatcgagctgatggccgacatctgccaccaggtgttcaacgaggacaccagaagcctggagatcagccagagctacaccaccacccagagagagagcagcgactacagcgtgccctgcaagagaaagaagatcgagctgggctgggaggtgatcaaggaccacctgcagaagagccagaacgacttcgacctggtgccctggctgcagatcgccacccagctgatcagcaagtaccccgccagcctgcccaactgcgagctgagccccctgctgatgatcctgagccagctgctgccccagcagagacacggcgagagaaccccctacgtgctgagatgcctgaccgaggtggccctgtgccaggacaagagaagcaacctggagagcagccagaagagcgacctgctgaagctgtggaacaagatctggtgcatcaccttcagaggcatcagcagcgagcagatccaggccgagaacttcggcctgctgggcgccatcatccagggcagcctggtggaggtggacagagagttctggaagctgttcaccggcagcgcctgcagacccagctgccccgccgtgtgctgcctgaccctggccctgaccaccagcatcgtgcccggcaccgtgaagatgggcatcgagcagaacatgtgcgaggtgaacagaagcttcagcctgaaggagagcatcatgaagtggctgctgttctaccagctggagggcgacctggagaacagcaccgaggtgccccccatcctgcacagcaacttcccccacctggtgctggagaagatcctggtgagcctgaccatgaagaactgcaaggccgccatgaacttcttccagagcgtgcccgagtgcgagcaccaccagaaggacaaggaggagctgagcttcagcgaggtggaggagctgttcctgcagaccaccttcgacaagatggacttcctgaccatcgtgagagagtgcggcatcgagaagcaccagagcagcatcggcttcagcgtgcaccagaacctgaaggagagcctggacagatgcctgctgggcctgagcgagcagctgctgaacaactacagcagcgagatcaccaacagcgagaccctggtgagatgcagcagactgctggtgggcgtgctgggctgctactgctacatgggcgtgatcgccgaggaggaggcctacaagagcgagctgttccagaaggccaagagcctgatgcagtgcgccggcgagagcatcaccctgttcaagaacaagaccaacgaggagttcagaatcggcagcctgagaaacatgatgcagctgtgcaccagatgcctgagcaactgcaccaagaagagccccaacaagatcgccagcggcttcttcctgagactgctgaccagcaagctgatgaacgacatcgccgacatctgcaagagcctggccagcttcatcaagaagcccttcgacagaggcgaggtggagagcatggaggacgacaccaacggcaacctgatggaggtggaggaccagagcagcatgaacctgttcaacgactaccccgacagcagcgtgagcgacgccaacgagcccggcgagagccagagcaccatcggcgccatcaaccccctggccgaggagtacctgagcaagcaggacctgctgttcctggacatgctgaagttcctgtgcctgtgcgtgaccaccgcccagaccaacaccgtgagcttcagagccgccgacatcagaagaaagctgctgatgctgatcgacagcagcaccctggagcccaccaagagcctgcacctgcacatgtacctgatgctgctgaaggagctgcccggcgaggagtaccccctgcccatggaggacgtgctggagctgctgaagcccctgagcaacgtgtgcagcctgtacagaagagaccaggacgtgtgcaagaccatcctgaaccacgtgctgcacgtggtgaagaacctgggccagagcaacatggacagcgagaacaccagagacgcccagggccagttcctgaccgtgatcggcgccttctggcacctgaccaaggagagaaagtacatcttcagcgtgagaatggccctggtgaactgcctgaagaccctgctggaggccgacccctacagcaagtgggccatcctgaacgtgatgggcaaggacttccccgtgaacgaggtgttcacccagttcctggccgacaaccaccaccaggtgagaatgctggccgccgagagcatcaacagactgttccaggacaccaagggcgacagcagcagactgctgaaggccctgcccctgaagctgcagcagaccgccttcgagaacgcctacctgaaggcccaggagggcatgagagagatgagccacagcgccgagaaccccgagaccctggacgagatctacaacagaaagagcgtgctgctgaccctgatcgccgtggtgctgagctgcagccccatctgcgagaagcaggccctgttcgccctgtgcaagagcgtgaaggagaacggcctggagccccacctggtgaagaaggtgctggagaaggtgagcgagaccttcggctacagaagactggaggacttcatggccagccacctggactacctggtgctggagtggctgaacctgcaggacaccgagtacaacctgagcagcttccccttcatcctgctgaactacaccaacatcgaggacttctacagaagctgctacaaggtgctgatcccccacctggtgatcagaagccacttcgacgaggtgaagagcatcgccaaccagatccaggaggactggaagagcctgctgaccgactgcttccccaagatcctggtgaacatcctgccctacttcgcctacgagggcaccagagacagcggcatggcccagcagagagagaccgccaccaaggtgtacgacatgctgaagagcgagaacctgctgggcaagcagatcgaccacctgttcatcagcaacctgcccgagatcgtggtggagctgctgatgaccctgcacgagcccgccaacagcagcgccagccagagcaccgacctgtgcgacttcagctag

SEQ ID NO: 9417 - DNA, 282 bp, synthetic construct
  misc_feature 1..282: note = Description of Artificial Sequence: Synthetic coding sequence
  source 1..282: mol_type = other DNA
atgagcctggtgctgaacgacctgctgatctgctgcagacagctggagcacgacagagccaccgagagaaagaaggaggtggagaagttcaagagactgatcagagaccccgagaccatcaagcacctggacagacacagcgacagcaagcagggcaagtacctgaactgggacgccgtgttcagattcctgcagaagtacatccagaaggagaccgagtgcctgagaatcgccaagcccaacgtgagcgccagcacccaggccagcagacagaagaagtag

SEQ ID NO: 9418 - DNA, 921 bp, synthetic construct
  misc_feature 1..921: note = Description of Artificial Sequence: Synthetic coding sequence
  source 1..921: mol_type = other DNA
atggagagcatcttccacgagaagcagcccagcggcaacatggacgacagcggcttcttcagcatccaggtgatcagcaacgccctgaaggtgtggggcctggagctgatcctgttcaacagccccgagtaccagagactgagaatcgaccccatcaacgagagaagcttcatctgcaactacaaggagcactggttcaccgtgagaaagctgggcaagcagtggttcaacctgaacagcctgctgaccggccccgagctgatcagcgacacctacctggccctgttcctggcccagctgcagcaggagggctacagcatcttcgtggtgaagggcgacctgcccgactgcgaggccgaccagctgctgcagatgatcagagtgcagcagatgcacagacccaagctgatcggcgaggagctggcccagctgaaggagcagagagtgcacaagaccgacctggagagagtgctggaggccaacgacggcagcggcatgctggacgaggacgaggaggacctgcagagagccctggccctgagcagacaggagatcgacatggaggacgaggaggccgacctgagaagagccatccagctgagcatgcagggcagcagcagaaacatcagccaggacatgacccagaccagcggcaccaacctgaccagcgaggagctgagaaagagaagagaggcctacttcgagaagcagcagcagaagcagcagcagcagcagcagcagcagcagcagggcgacctgagcggccagagcagccacccctgcgagagacccgccaccagcagcggcgccctgggcagcgacctgggcgacgccatgagcgaggaggacatgctgcaggccgccgtgaccatgagcctggagaccgtgagaaacgacctgaagaccgagggcaagaagtag

SEQ ID NO: 9419 - DNA, 1110 bp, synthetic construct
  misc_feature 1..1110: note = Description of Artificial Sequence: Synthetic coding sequence
  source 1..1110: mol_type = other DNA
atggagagcatcttccacgagaagcaggagggcagcctgtgcgcccagcactgcctgaacaacctgctgcagggcgagtacttcagccccgtggagctgagcagcatcgcccaccagctggacgaggaggagagaatgagaatggccgagggcggcgtgaccagcgaggactacagaaccttcctgcagcagcccagcggcaacatggacgacagcggcttcttcagcatccaggtgatcagcaacgccctgaaggtgtggggcctggagctgatcctgttcaacagccccgagtaccagagactgagaatcgaccccatcaacgagagaagcttcatctgcaactacaaggagcactggttcaccgtgagaaagctgggcaagcagtggttcaacctgaacagcctgctgaccggccccgagctgatcagcgacacctacctggccctgttcctggcccagctgcagcaggagggctacagcatcttcgtggtgaagggcgacctgcccgactgcgaggccgaccagctgctgcagatgatcagagtgcagcagatgcacagacccaagctgatcggcgaggagctggcccagctgaaggagcagagagtgcacaagaccgacctggagagagtgctggaggccaacgacggcagcggcatgctggacgaggacgaggaggacctgcagagagccctggccctgagcagacaggagatcgacatggaggacgaggaggccgacctgagaagagccatccagctgagcatgcagggcagcagcagaaacatcagccaggacatgacccagaccagcggcaccaacctgaccagcgaggagctgagaaagagaagagaggcctacttcgagaaggaccagcacttccacatcctgaagcagcagcagaagcagcagcagcagcagcagcagcagcagcagggcgacctgagcggccagagcagccacccctgcgagagacccgccaccagcagcggcgccctgggcagcgacctgggcgacgccatgagcgaggaggacatgctgcaggccgccgtgaccatgagcctggagaccgtgagaaacgacctgaagaccgagggcaagaagtag

SEQ ID NO: 9420 - DNA, 1086 bp, synthetic construct
  misc_feature 1..1086: note = Description of Artificial Sequence: Synthetic coding sequence
  source 1..1086: mol_type = other DNA
atggagagcatcttccacgagaagcaggagggcagcctgtgcgcccagcactgcctgaacaacctgctgcagggcgagtacttcagccccgtggagctgagcagcatcgcccaccagctggacgaggaggagagaatgagaatggccgagggcggcgtgaccagcgaggactacagaaccttcctgcagcagcccagcggcaacatggacgacagcggcttcttcagcatccaggtgatcagcaacgccctgaaggtgtggggcctggagctgatcctgttcaacagccccgagtaccagagactgagaatcgaccccatcaacgagagaagcttcatctgcaactacaaggagcactggttcaccgtgagaaagctgggcaagcagtggttcaacctgaacagcctgctgaccggccccgagctgatcagcgacacctacctggccctgttcctggcccagctgcagcaggagggctacagcatcttcgtggtgaagggcgacctgcccgactgcgaggccgaccagctgctgcagatgatcagagtgcagcagatgcacagacccaagctgatcggcgaggagctggcccagctgaaggagcagagagtgcacaagaccgacctggagagagtgctggaggccaacgacggcagcggcatgctggacgaggacgaggaggacctgcagagagccctggccctgagcagacaggagatcgacatggaggacgaggaggccgacctgagaagagccatccagctgagcatgcagggcagcagcagaaacatcagccaggacatgacccagaccagcggcaccaacctgaccagcgaggagctgagaaagagaagagaggcctacttcgagaagcagcagcagaagcagcagcagcagcagcagcagcagcagcagggcgacctgagcggccagagcagccacccctgcgagagacccgccaccagcagcggcgccctgggcagcgacctgggcgacgccatgagcgaggaggacatgctgcaggccgccgtgaccatgagcctggagaccgtgagaaacgacctgaagaccgagggcaagaagtag

SEQ ID NO: 9421 - DNA, 1101 bp, synthetic construct
  misc_feature 1..1101: note = Description of Artificial Sequence: Synthetic coding sequence
  source 1..1101: mol_type = other DNA
atggagagcatcttccacgagaagcaggagggcagcctgtgcgcccagcactgcctgaacaacctgctgcagggcgagtacttcagccccgtggagctgagcagcatcgcccaccagctggacgaggaggagagaatgagaatggccgagggcggcgtgaccagcgaggactacagaaccttcctgcagcagcccagcggcaacatggacgacagcggcttcttcagcatccaggtgatcagcaacgccctgaaggtgtggggcctggagctgatcctgttcaacagccccgagtaccagagactgagaatcgaccccatcaacgagagaagcttcatctgcaactacaaggagcactggttcaccgtgagaaagctgggcaagcagtggttcaacctgaacagcctgctgaccggccccgagctgatcagcgacacctacctggccctgttcctggcccagctgcagcaggagggctacagcatcttcgtggtgaagggcgacctgcccgactgcgaggccgaccagctgctgcagatgatcagagtgcagcagatgcacagacccaagctgatcggcgaggagctggcccagctgaaggagcagagagtgcacaagaccgacctggagagagtgctggaggccaacgacggcagcggcatgctggacgaggacgaggaggacctgcagagagccctggccctgagcagacaggagatcgacatggaggacgaggaggccgacctgagaagagccatccagctgagcatgcagggcagcagcagaaacatcagccaggacatgacccagaccagcggcaccaacctgaccagcgaggagctgagaaagagaagagaggcctacttcgagaacgactacttcgacagccagcagcagaagcagcagcagcagcagcagcagcagcagcagggcgacctgagcggccagagcagccacccctgcgagagacccgccaccagcagcggcgccctgggcagcgacctgggcgacgccatgagcgaggaggacatgctgcaggccgccgtgaccatgagcctggagaccgtgagaaacgacctgaagaccgagggcaagaagtag

SEQ ID NO: 9422 - DNA, 1065 bp, synthetic construct
  misc_feature 1..1065: note = Description of Artificial Sequence: Synthetic coding sequence
  source 1..1065: mol_type = other DNA
atggagagcatcttccacgagaagcaggagggcagcctgtgcgcccagcactgcctgaacaacctgctgcagggcgagtacttcagccccgtggagctgagcagcatcgcccaccagctggacgaggaggagagaatgagaatggccgagggcggcgtgaccagcgaggactacagaaccttcctgcaggtgatcagcaacgccctgaaggtgtggggcctggagctgatcctgttcaacagccccgagtaccagagactgagaatcgaccccatcaacgagagaagcttcatctgcaactacaaggagcactggttcaccgtgagaaagctgggcaagcagtggttcaacctgaacagcctgctgaccggccccgagctgatcagcgacacctacctggccctgttcctggcccagctgcagcaggagggctacagcatcttcgtggtgaagggcgacctgcccgactgcgaggccgaccagctgctgcagatgatcagagtgcagcagatgcacagacccaagctgatcggcgaggagctggcccagctgaaggagcagagagtgcacaagaccgacctggagagagtgctggaggccaacgacggcagcggcatgctggacgaggacgaggaggacctgcagagagccctggccctgagcagacaggagatcgacatggaggacgaggaggccgacctgagaagagccatccagctgagcatgcagggcagcagcagaaacatcagccaggacatgacccagaccagcggcaccaacctgaccagcgaggagctgagaaagagaagagaggcctacttcgagaaggaccagcacttccacatcctgaagcagcagcagaagcagcagcagcagcagcagcagcagcagcagggcgacctgagcggccagagcagccacccctgcgagagacccgccaccagcagcggcgccctgggcagcgacctgggcgacgccatgagcgaggaggacatgctgcaggccgccgtgaccatgagcctggagaccgtgagaaacgacctgaagaccgagggcaagaagtag

SEQ ID NO: 9423 - DNA, 1113 bp, synthetic construct
  misc_feature 1..1113: note = Description of Artificial Sequence: Synthetic coding sequence
  source 1..1113: mol_type = other DNA
atggagagcatcttccacgagaagcaggagggcagcctgtgcgcccagcactgcctgaacaacctgctgcagggcgagtacttcagccccgtggagctgagcagcatcgcccaccagctggacgaggaggagagaatgagaatggccgagggcggcgtgaccagcgaggactacagaaccttcctgcagcagcccagcggcaacatggacgacagcggcttcttcagcatccaggtgatcagcaacgccctgaaggtgtggggcctggagctgatcctgttcaacagccccgagtaccagagactgagaatcgaccccatcaacgagagaagcttcatctgcaactacaaggagcactggttcaccgtgagaaagctgggcaagcagtggttcaacctgaacagcctgctgaccggccccgagctgatcagcgacacctacctggccctgttcctggcccagctgcagcaggagggctacagcatcttcgtggtgaagggcgacctgcccgactgcgaggccgaccagctgctgcagatgatcagagtgcagcagatgcacagacccaagctgatcggcgaggagctggcccagctgaaggagcagagagtgcacaagaccgacctggagagagtgctggaggccaacgacggcagcggcatgctggacgaggacgaggaggacctgcagagagccctggccctgagcagacaggagatcgacatggaggacgaggaggccgacctgagaagagccatccagctgagcatgcagggcagcagcagaaacatcagccaggacatgacccagaccagcggcaccaacctgaccagcgaggagctgagaaagagaagagaggcctacttcgagaagaccgagagcagaagcgtggcccaggcccagcagcagaagcagcagcagcagcagcagcagcagcagcagggcgacctgagcggccagagcagccacccctgcgagagacccgccaccagcagcggcgccctgggcagcgacctgggcgacgccatgagcgaggaggacatgctgcaggccgccgtgaccatgagcctggagaccgtgagaaacgacctgaagaccgagggcaagaagtag

SEQ ID NO: 9424 - DNA, 1041 bp, synthetic construct
  misc_feature 1..1041: note = Description of Artificial Sequence: Synthetic coding sequence
  source 1..1041: mol_type = other DNA
atggagagcatcttccacgagaagcaggagggcagcctgtgcgcccagcactgcctgaacaacctgctgcagggcgagtacttcagccccgtggagctgagcagcatcgcccaccagctggacgaggaggagagaatgagaatggccgagggcggcgtgaccagcgaggactacagaaccttcctgcaggtgatcagcaacgccctgaaggtgtggggcctggagctgatcctgttcaacagccccgagtaccagagactgagaatcgaccccatcaacgagagaagcttcatctgcaactacaaggagcactggttcaccgtgagaaagctgggcaagcagtggttcaacctgaacagcctgctgaccggccccgagctgatcagcgacacctacctggccctgttcctggcccagctgcagcaggagggctacagcatcttcgtggtgaagggcgacctgcccgactgcgaggccgaccagctgctgcagatgatcagagtgcagcagatgcacagacccaagctgatcggcgaggagctggcccagctgaaggagcagagagtgcacaagaccgacctggagagagtgctggaggccaacgacggcagcggcatgctggacgaggacgaggaggacctgcagagagccctggccctgagcagacaggagatcgacatggaggacgaggaggccgacctgagaagagccatccagctgagcatgcagggcagcagcagaaacatcagccaggacatgacccagaccagcggcaccaacctgaccagcgaggagctgagaaagagaagagaggcctacttcgagaagcagcagcagaagcagcagcagcagcagcagcagcagcagcagggcgacctgagcggccagagcagccacccctgcgagagacccgccaccagcagcggcgccctgggcagcgacctgggcgacgccatgagcgaggaggacatgctgcaggccgccgtgaccatgagcctggagaccgtgagaaacgacctgaagaccgagggcaagaagtag

SEQ ID NO: 9425 - DNA, 1095 bp, synthetic construct
  misc_feature 1..1095: note = Description of Artificial Sequence: Synthetic coding sequence
  source 1..1095: mol_type = other DNA
atggagagcatcttccacgagaagcaggagggcagcctgtgcgcccagcactgcctgaacaacctgctgcagggcgagtacttcagccccgtggagctgagcagcatcgcccaccagctggacgaggaggagagaatgagaatggccgagggcggcgtgaccagcgaggactacagaaccttcctgcagcagcccagcggcaacatggacgacagcggcttcttcagcatccaggtgatcagcaacgccctgaaggtgtggggcctggagctgatcctgttcaacagccccgagtaccagagactgagaatcgaccccatcaacgagagaagcttcatctgcaactacaaggagcactggttcaccgtgagaaagctgggcaagcagtggttcaacctgaacagcctgctgaccggccccgagctgatcagcgacacctacctggccctgttcctggcccagctgcagcaggagggctacagcatcttcgtggtgaagggcgacctgcccgactgcgaggccgaccagctgctgcagatgatcagagtgcagcagatgcacagacccaagctgatcggcgaggagctggcccagctgaaggagcagagagtgcacaagaccgacctggagagagtgctggaggccaacgacggcagcggcatgctggacgaggacgaggaggacctgcagagagccctggccctgagcagacaggagatcgacatggaggacgaggaggccgacctgagaagagccatccagctgagcatgcagggcagcagcagaaacatcagccaggacatgacccagaccagcggcaccaacctgaccagcgaggagctgagaaagagaagagaggcctacttcgagaagcagcagcagaagcagcagcagcagcagcagcagcagcagcagggcgacctgagcggccagagcagccacccctgcgagagacccgccaccagcagcggcgccctgggcagcgacctgggcaaggcctgcagccccttcatcatgttcgccaccttcaccctgtacctgacctacgagctgcacgtgatcttcgccctgcactacagcagcttccccctgtag

SEQ ID NO: 9426 - DNA, 1119 bp, synthetic construct
  misc_feature 1..1119: note = Description of Artificial Sequence: Synthetic coding sequence
  source 1..1119: mol_type = other DNA
atggagagcatcttccacgagaagcaggagggcagcctgtgcgcccagcactgcctgaacaacctgctgcagggcgagtacttcagccccgtggagctgagcagcatcgcccaccagctggacgaggaggagagaatgagaatggccgagggcggcgtgaccagcgaggactacagaaccttcctgcagcagcccagcggcaacatggacgacagcggcttcttcagcatccaggtgatcagcaacgccctgaaggtgtggggcctggagctgatcctgttcaacagccccgagtaccagagactgagaatcgaccccatcaacgagagaagcttcatctgcaactacaaggagcactggttcaccgtgagaaagctgggcaagcagtggttcaacctgaacagcctgctgaccggccccgagctgatcagcgacacctacctggccctgttcctggcccagctgcagcaggagggctacagcatcttcgtggtgaagggcgacctgcccgactgcgaggccgaccagctgctgcagatgatcagagtgcagcagatgcacagacccaagctgatcggcgaggagctggcccagctgaaggagcagagagtgcacaagaccgacctggagagagtgctggaggccaacgacggcagcggcatgctggacgaggacgaggaggacctgcagagagccctggccctgagcagacaggagatcgacatggaggacgaggaggccgacctgagaagagccatccagctgagcatgcagggcagcagcagaaacatcagccaggacatgacccagaccagcggcaccaacctgaccagcgaggagctgagaaagagaagagaggcctacttcgagaagttcggcagacccagaagagccgactgcctgagacagcagcagaagcagcagcagcagcagcagcagcagcagcagggcgacctgagcggccagagcagccacccctgcgagagacccgccaccagcagcggcgccctgggcagcgacctgggcgacgccatgagcgaggaggacatgctgcaggccgccgtgaccatgagcctggagaccgtgagaaacgacctgaagaccgagggcaagaagtag

SEQ ID NO: 9427 - DNA, 1128 bp, synthetic construct
  misc_feature 1..1128: note = Description of Artificial Sequence: Synthetic coding sequence
  source 1..1128: mol_type = other DNA
gacagcgtgagcaagaagaagcaggagggcagcctgtgcgcccagcactgcctgaacaacctgctgcagggcgagtacttcagccccgtggagctgagcagcatcgcccaccagctggacgaggaggagagaatgagaatggccgagggcggcgtgaccagcgaggactacagaaccttcctgcagcagcccagcggcaacatggacgacagcggcttcttcagcatccaggtgatcagcaacgccctgaaggtgtggggcctggagctgatcctgttcaacagccccgagtaccagagactgagaatcgaccccatcaacgagagaagcttcatctgcaactacaaggagcactggttcaccgtgagaaagctgggcaagcagtggttcaacctgaacagcctgctgaccggccccgagctgatcagcgacacctacctggccctgttcctggcccagctgcagcaggagggctacagcatcttcgtggtgaagggcgacctgcccgactgcgaggccgaccagctgctgcagatgatcagagtgcagcagatgcacagacccaagctgatcggcgaggagctggcccagctgaaggagcagagagtgcacaagaccgacctggagagagtgctggaggccaacgacggcagcggcatgctggacgaggacgaggaggacctgcagagagccctggccctgagcagacaggagatcgacatggaggacgaggaggccgacctgagaagagccatccagctgagcatgcagggcagcagcagaaacatcagccaggacatgacccagaccagcggcaccaacctgaccagcgaggagctgagaaagagaagagaggcctacttcgagaagaagttcaccgccaacagaaccgaccagcacttccacatcctgaagcagcagcagaagcagcagcagcagcagcagcagcagcagcagggcgacctgagcggccagagcagccacccctgcgagagacccgccaccagcagcggcgccctgggcagcgacctgggcgacgccatgagcgaggaggacatgctgcaggccgccgtgaccatgagcctggagaccgtgagaaacgacctgaagaccgagggcaagaagtag

SEQ ID NO: 9428 - DNA, 1125 bp, synthetic construct
  misc_feature 1..1125: note = Description of Artificial Sequence: Synthetic coding sequence
  source 1..1125: mol_type = other DNA
atggagagcatcttccacgagaagcaggagggcagcctgtgcgcccagcactgcctgaacaacctgctgcagggcgagtacttcagccccgtggagctgagcagcatcgcccaccagctggacgaggaggagagaatgagaatggccgagggcggcgtgaccagcgaggactacagaaccttcctgcagcagcccagcggcaacatggacgacagcggcttcttcagcatccaggtgatcagcaacgccctgaaggtgtggggcctggagctgatcctgttcaacagccccgagtaccagagactgagaatcgaccccatcaacgagagaagcttcatctgcaactacaaggagcactggttcaccgtgagaaagctgggcaagcagtggttcaacctgaacagcctgctgaccggccccgagctgatcagcgacacctacctggccctgttcctggcccagctgcagcaggagggctacagcatcttcgtggtgaagggcgacctgcccgactgcgaggccgaccagctgctgcagatgatcagagtgcagcagatgcacagacccaagctgatcggcgaggagctggcccagctgaaggagcagagagtgcacaagaccgacctggagagagtgctggaggccaacgacggcagcggcatgctggacgaggacgaggaggacctgcagagagccctggccctgagcagacaggagatcgacatggaggacgaggaggccgacctgagaagagccatccagctgagcatgcagggcagcagcagaaacatcagccaggacatgacccagaccagcggcaccaacctgaccagcgaggagctgagaaagagaagagaggcctacttcgagaaggtgttcttcaagaacctgcagcagatcggcagagccagacagcagcagaagcagcagcagcagcagcagcagcagcagcagggcgacctgagcggccagagcagccacccctgcgagagacccgccaccagcagcggcgccctgggcagcgacctgggcgacgccatgagcgaggaggacatgctgcaggccgccgtgaccatgagcctggagaccgtgagaaacgacctgaagaccgagggcaagaagtag

SEQ ID NO: 9429 - DNA, 1113 bp, synthetic construct
  misc_feature 1..1113: note = Description of Artificial Sequence: Synthetic coding sequence
  source 1..1113: mol_type = other DNA
atggagagcatcttccacgagaagcaggagggcagcctgtgcgcccagcactgcctgaacaacctgctgcagggcgagtacttcagccccgtggagctgagcagcatcgcccaccagctggacgaggaggagagaatgagaatggccgagggcggcgtgaccagcgaggactacagaaccttcctgcagcagcccagcggcaacatggacgacagcggcttcttcagcatccaggtgatcagcaacgccctgaaggtgtggggcctggagctgatcctgttcaacagccccgagtaccagagactgagaatcgaccccatcaacgagagaagcttcatctgcaactacaaggagcactggttcaccgtgagaaagctgggcaagcagtggttcaacctgaacagcctgctgaccggccccgagctgatcagcgacacctacctggccctgttcctggcccagctgcagcaggagggctacagcatcttcgtggtgaagggcgacctgcccgactgcgaggccgaccagctgctgcagatgatcagagtgcagcagatgcacagacccaagctgatcggcgaggagctggcccagctgaaggagcagagagtgcacaagaccgacctggagagagtgctggaggccaacgacggcagcggcatgctggacgaggacgaggaggacctgcagagagccctggccctgagcagacaggagatcgacatggaggacgaggaggccgacctgagaagagccatccagctgagcatgcagggcagcagcagaaacatcagccaggacatgacccagaccagcggcaccaacctgaccagcgaggagctgagaaagagaagagaggcctacttcgagaagatctacttcaccttcgagtgcttcagacagcagcagaagcagcagcagcagcagcagcagcagcagcagggcgacctgagcggccagagcagccacccctgcgagagacccgccaccagcagcggcgccctgggcagcgacctgggcgacgccatgagcgaggaggacatgctgcaggccgccgtgaccatgagcctggagaccgtgagaaacgacctgaagaccgagggcaagaagtag

SEQ ID NO: 9430 - DNA, 1134 bp, synthetic construct
  misc_feature 1..1134: note = Description of Artificial Sequence: Synthetic coding sequence
  source 1..1134: mol_type = other DNA
atggagagcatcttccacgagaagcaggagggcagcctgtgcgcccagcactgcctgaacaacctgctgcagggcgagtacttcagccccgtggagctgagcagcatcgcccaccagctggacgaggaggagagaatgagaatggccgagggcggcgtgaccagcgaggactacagaaccttcctgcagcagcccagcggcaacatggacgacagcggcttcttcagcatccaggtgatcagcaacgccctgaaggtgtggggcctggagctgatcctgttcaacagccccgagtaccagagactgagaatcgaccccatcaacgagagaagcttcatctgcaactacaaggagcactggttcaccgtgagaaagctgggcaagcagtggttcaacctgaacagcctgctgaccggccccgagctgatcagcgacacctacctggccctgttcctggcccagctgcagcaggagggctacagcatcttcgtggtgaagggcgacctgcccgactgcgaggccgaccagctgctgcagatgatcagagtgcagcagatgcacagacccaagctgatcggcgaggagctggcccagctgaaggagcagagagtgcacaagaccgacctggagagagtgctggaggccaacgacggcagcggcatgctggacgaggacgaggaggacctgcagagagccctggccctgagcagacaggagatcgacatggaggacgaggaggccgacctgagaagagccatccagctgagcatgcagggcagcagcagaaacatcagccaggacatgacccagaccagcggcaccaacctgaccagcgaggagctgagaaagagaagagaggcctacttcgagaaggtgttcttcaagaacctgcagcagaaccagcacttccacatcctgaagcagcagcagaagcagcagcagcagcagcagcagcagcagcagggcgacctgagcggccagagcagccacccctgcgagagacccgccaccagcagcggcgccctgggcagcgacctgggcgacgccatgagcgaggaggacatgctgcaggccgccgtgaccatgagcctggagaccgtgagaaacgacctgaagaccgagggcaagaagtag

SEQ ID NO: 9431 - DNA, 549 bp, synthetic construct
  misc_feature 1..549: note = Description of Artificial Sequence: Synthetic coding sequence
  source 1..549: mol_type = other DNA
atgatcagagtgcagcagatgcacagacccaagctgatcggcgaggagctggcccagctgaaggagcagagagtgcacaagaccgacctggagagagtgctggaggccaacgacggcagcggcatgctggacgaggacgaggaggacctgcagagagccctggccctgagcagacaggagatcgacatggaggacgaggaggccgacctgagaagagccatccagctgagcatgcagggcagcagcagaaacatcagccaggacatgacccagaccagcggcaccaacctgaccagcgaggagctgagaaagagaagagaggcctacttcgagaagcagcagcagaagcagcagcagcagcagcagcagcagcagcagggcgacctgagcggccagagcagccacccctgcgagagacccgccaccagcagcggcgccctgggcagcgacctgggcgacgccatgagcgaggaggacatgctgcaggccgccgtgaccatgagcctggagaccgtgagaaacgacctgaagaccgagggcaagaagtag

SEQ ID NO: 9432 - DNA, 3306 bp, synthetic construct
  misc_feature 1..3306: note = Description of Artificial Sequence: Synthetic coding sequence
  source 1..3306: mol_type = other DNA
atgagcgccaaggccatcagcgagcagaccggcaaggagctgctgtacaagttcatctgcaccaccagcgccatccagaacagattcaagtacgccagagtgacccccgacaccgactgggccagactgctgcaggaccacccctggctgctgagccagaacctggtggtgaagcccgaccagctgatcaagagaagaggcaagctgggcctggtgggcgtgaacctgaccctggacggcgtgaagagctggctgaagcccagactgggccaggaggccaccgtgggcaaggccaccggcttcctgaagaacttcctgatcgagcccttcgtgccccacagccaggccgaggagttctacgtgtgcatctacgccaccagagagggcgactacgtgctgttccaccacgagggcggcgtggacgtgggcgacgtggacgccaaggcccagaagctgctggtgggcgtggacgagaagctgaaccccgaggacatcaagaagcacctgctggtgcacgcccccgaggacaagaaggagatcctggccagcttcatcagcggcctgttcaacttctacgaggacctgtacttcacctacctggagatcaaccccctggtggtgaccaaggacggcgtgtacgtgctggacctggccgccaaggtggacgccaccgccgactacatctgcaaggtgaagtggggcgacatcgagttccccccccccttcggcagagaggcctaccccgaggaggcctacatcgccgacctggacgccaagagcggcgccagcctgaagctgaccctgctgaaccccaagggcagaatctggaccatggtggccggcggcggcgccagcgtggtgtacagcgacaccatctgcgacctgggcggcgtgaacgagctggccaactacggcgagtacagcggcgcccccagcgagcagcagacctacgactacgccaagaccatcctgagcctgatgaccagagagaagcaccccgacggcaagatcctgatcatcggcggcagcatcgccaacttcaccaacgtggccgccaccttcaagggcatcgtgagagccatcagagactaccagggccccctgaaggagcacgaggtgaccatcttcgtgagaagaggcggccccaactaccaggagggcctgagagtgatgggcgaggtgggcaagaccaccggcatccccatccacgtgttcggcaccgagacccacatgaccgccatcgtgggcatggccctgggccacagacccatccccaaccagccccccaccgccgcccacaccgccaacttcctgctgaacgccagcggcagcaccagcacccccgcccccagcagaaccgccagcttcagcgagagcagagccgacgaggtggcccccgccaagaaggccaagcccgccatgccccaggacagcgtgcccagccccagaagcctgcagggcaagagcaccaccctgttcagcagacacaccaaggccatcgtgtggggcatgcagaccagagccgtgcagggcatgctggacttcgactacgtgtgcagcagagacgagcccagcgtggccgccatggtgtaccccttcaccggcgaccacaagcagaagttctactggggccacaaggagatcctgatccccgtgttcaagaacatggccgacgccatgagaaagcaccccgaggtggacgtgctgatcaacttcgccagcctgagaagcgcctacgacagcaccatggagaccatgaactacgcccagatcagaaccatcgccatcatcgccgagggcatccccgaggccctgaccagaaagctgatcaagaaggccgaccagaagggcgtgaccatcatcggccccgccaccgtgggcggcatcaagcccggctgcttcaagatcggcaacaccggcggcatgctggacaacatcctggccagcaagctgtacagacccggcagcgtggcctacgtgagcagaagcggcggcatgagcaacgagctgaacaacatcatcagcagaaccaccgacggcgtgtacgagggcgtggccatcggcggcgacagataccccggcagcaccttcatggaccacgtgctgagataccaggacacccccggcgtgaagatgatcgtggtgctgggcgagatcggcggcaccgaggagtacaagatctgcagaggcatcaaggagggcagactgaccaagcccatcgtgtgctggtgcatcggcacctgcgccaccatgttcagcagcgaggtgcagttcggccacgccggcgcctgcgccaaccaggccagcgagaccgccgtggccaagaaccaggccctgaaggaggccggcgtgttcgtgcccagaagcttcgacgagctgggcgagatcatccagagcgtgtacgaggacctggtggccaacggcgtgatcgtgcccgcccaggaggtgcccccccccaccgtgcccatggactacagctgggccagagagctgggcctgatcagaaagcccgccagcttcatgaccagcatctgcgacgagagaggccaggagctgatctacgccggcatgcccatcaccgaggtgttcaaggaggagatgggcatcggcggcgtgctgggcctgctgtggttccagaagagactgcccaagtacagctgccagttcatcgagatgtgcctgatggtgaccgccgaccacggccccgccgtgagcggcgcccacaacaccatcatctgcgccagagccggcaaggacctggtgagcagcctgaccagcggcctgctgaccatcggcgacagattcggcggcgccctggacgccgccgccaagatgttcagcaaggccttcgacagcggcatcatccccatggagttcgtgaacaagatgaagaaggagggcaagctgatcatgggcatcggccacagagtgaagagcatcaacaaccccgacatgagagtgcagatcctgaaggactacgtgagacagcacttccccgccacccccctgctggactacgccctggaggtggagaagatcaccaccagcaagaagcccaacctgatcctgaacgtggacggcctgatcggcgtggccttcgtggacatgctgagaaactgcggcagcttcaccagagaggaggccgacgagtacatcgacatcggcgccctgaacggcatcttcgtgctgggcagaagcatgggcttcatcggccactacctggaccagaagagactgaagcagggcctgtacagacacccctgggacgacatcagctacgtgctgcccgagcacatgagcatgtag

SEQ ID NO: 9433 - DNA, 3276 bp, synthetic construct
  misc_feature 1..3276: note = Description of Artificial Sequence: Synthetic coding sequence
  source 1..3276: mol_type = other DNA
atgagcgccaaggccatcagcgagcagaccggcaaggagctgctgtacaagttcatctgcaccaccagcgccatccagaacagattcaagtacgccagagtgacccccgacaccgactgggccagactgctgcaggaccacccctggctgctgagccagaacctggtggtgaagcccgaccagctgatcaagagaagaggcaagctgggcctggtgggcgtgaacctgaccctggacggcgtgaagagctggctgaagcccagactgggccaggaggccaccgtgggcaaggccaccggcttcctgaagaacttcctgatcgagcccttcgtgccccacagccaggccgaggagttctacgtgtgcatctacgccaccagagagggcgactacgtgctgttccaccacgagggcggcgtggacgtgggcgacgtggacgccaaggcccagaagctgctggtgggcgtggacgagaagctgaaccccgaggacatcaagaagcacctgctggtgcacgcccccgaggacaagaaggagatcctggccagcttcatcagcggcctgttcaacttctacgaggacctgtacttcacctacctggagatcaaccccctggtggtgaccaaggacggcgtgtacgtgctggacctggccgccaaggtggacgccaccgccgactacatctgcaaggtgaagtggggcgacatcgagttccccccccccttcggcagagaggcctaccccgaggaggcctacatcgccgacctggacgccaagagcggcgccagcctgaagctgaccctgctgaaccccaagggcagaatctggaccatggtggccggcggcggcgccagcgtggtgtacagcgacaccatctgcgacctgggcggcgtgaacgagctggccaactacggcgagtacagcggcgcccccagcgagcagcagacctacgactacgccaagaccatcctgagcctgatgaccagagagaagcaccccgacggcaagatcctgatcatcggcggcagcatcgccaacttcaccaacgtggccgccaccttcaagggcatcgtgagagccatcagagactaccagggccccctgaaggagcacgaggtgaccatcttcgtgagaagaggcggccccaactaccaggagggcctgagagtgatgggcgaggtgggcaagaccaccggcatccccatccacgtgttcggcaccgagacccacatgaccgccatcgtgggcatggccctgggccacagacccatccccaaccagccccccaccgccgcccacaccgccaacttcctgctgaacgccagcggcagcaccagcacccccgcccccagcagaaccgccagcttcagcgagagcagagccgacgaggtggcccccgccaagaaggccaagcccgccatgccccagggcaagagcaccaccctgttcagcagacacaccaaggccatcgtgtggggcatgcagaccagagccgtgcagggcatgctggacttcgactacgtgtgcagcagagacgagcccagcgtggccgccatggtgtaccccttcaccggcgaccacaagcagaagttctactggggccacaaggagatcctgatccccgtgttcaagaacatggccgacgccatgagaaagcaccccgaggtggacgtgctgatcaacttcgccagcctgagaagcgcctacgacagcaccatggagaccatgaactacgcccagatcagaaccatcgccatcatcgccgagggcatccccgaggccctgaccagaaagctgatcaagaaggccgaccagaagggcgtgaccatcatcggccccgccaccgtgggcggcatcaagcccggctgcttcaagatcggcaacaccggcggcatgctggacaacatcctggccagcaagctgtacagacccggcagcgtggcctacgtgagcagaagcggcggcatgagcaacgagctgaacaacatcatcagcagaaccaccgacggcgtgtacgagggcgtggccatcggcggcgacagataccccggcagcaccttcatggaccacgtgctgagataccaggacacccccggcgtgaagatgatcgtggtgctgggcgagatcggcggcaccgaggagtacaagatctgcagaggcatcaaggagggcagactgaccaagcccatcgtgtgctggtgcatcggcacctgcgccaccatgttcagcagcgaggtgcagttcggccacgccggcgcctgcgccaaccaggccagcgagaccgccgtggccaagaaccaggccctgaaggaggccggcgtgttcgtgcccagaagcttcgacgagctgggcgagatcatccagagcgtgtacgaggacctggtggccaacggcgtgatcgtgcccgcccaggaggtgcccccccccaccgtgcccatggactacagctgggccagagagctgggcctgatcagaaagcccgccagcttcatgaccagcatctgcgacgagagaggccaggagctgatctacgccggcatgcccatcaccgaggtgttcaaggaggagatgggcatcggcggcgtgctgggcctgctgtggttccagaagagactgcccaagtacagctgccagttcatcgagatgtgcctgatggtgaccgccgaccacggccccgccgtgagcggcgcccacaacaccatcatctgcgccagagccggcaaggacctggtgagcagcctgaccagcggcctgctgaccatcggcgacagattcggcggcgccctggacgccgccgccaagatgttcagcaaggccttcgacagcggcatcatccccatggagttcgtgaacaagatgaagaaggagggcaagctgatcatgggcatcggccacagagtgaagagcatcaacaaccccgacatgagagtgcagatcctgaaggactacgtgagacagcacttccccgccacccccctgctggactacgccctggaggtggagaagatcaccaccagcaagaagcccaacctgatcctgaacgtggacggcctgatcggcgtggccttcgtggacatgctgagaaactgcggcagcttcaccagagaggaggccgacgagtacatcgacatcggcgccctgaacggcatcttcgtgctgggcagaagcatgggcttcatcggccactacctggaccagaagagactgaagcagggcctgtacagacacccctgggacgacatcagctacgtgctgcccgagcacatgagcatgtag

SEQ ID NO: 9434 - DNA, 3276 bp, synthetic construct; identical to SEQ ID NO: 9433
  misc_feature 1..3276: note = Description of Artificial Sequence: Synthetic coding sequence
  source 1..3276: mol_type = other DNA

SEQ ID NO: 9435 - DNA, 3468 bp, synthetic construct
  misc_feature 1..3468: note = Description of Artificial Sequence: Synthetic coding sequence
  source 1..3468: mol_type = other DNA
atgggcgccggcaagagccccgccggccccggccagaagcccgaccccggcaagctgcccgccgccggcgtgctgagaatcctgagaggcagcagcggcctgtggaagaagagaagagccagaaccagcgccgagaccggcagagccggcctgagcgccgccatgagcgccaaggccatcagcgagcagaccggcaaggagctgctgtacaagttcatctgcaccaccagcgccatccagaacagattcaagtacgccagagtgacccccgacaccgactgggccagactgctgcaggaccacccctggctgctgagccagaacctggtggtgaagcccgaccagctgatcaagagaagaggcaagctgggcctggtgggcgtgaacctgaccctggacggcgtgaagagctggctgaagcccagactgggccaggaggccaccgtgggcaaggccaccggcttcctgaagaacttcctgatcgagcccttcgtgccccacagccaggccgaggagttctacgtgtgcatctacgccaccagagagggcgactacgtgctgttccaccacgagggcggcgtggacgtgggcgacgtggacgccaaggcccagaagctgctggtgggcgtggacgagaagctgaaccccgaggacatcaagaagcacctgctggtgcacgcccccgaggacaagaaggagatcctggccagcttcatcagcggcctgttcaacttctacgaggacctgtacttcacctacctggagatcaaccccctggtggtgaccaaggacggcgtgtacgtgctggacctggccgccaaggtggacgccaccgccgactacatctgcaaggtgaagtggggcgacatcgagttccccccccccttcggcagagaggcctaccccgaggaggcctacatcgccgacctggacgccaagagcggcgccagcctgaagctgaccctgctgaaccccaagggcagaatctggaccatggtggccggcggcggcgccagcgtggtgtacagcgacaccatctgcgacctgggcggcgtgaacgagctggccaactacggcgagtacagcggcgcccccagcgagcagcagacctacgactacgccaagaccatcctgagcctgatgaccagagagaagcaccccgacggcaagatcctgatcatcggcggcagcatcgccaacttcaccaacgtggccgccaccttcaagggcatcgtgagagccatcagagactaccagggccccctgaaggagcacgaggtgaccatcttcgtgagaagaggcggccccaactaccaggagggcctgagagtgatgggcgaggtgggcaagaccaccggcatccccatccacgtgttcggcaccgagacccacatgaccgccatcgtgggcatggccctgggccacagacccatccccaaccagccccccaccgccgcccacaccgccaacttcctgctgaacgccagcggcagcaccagcacccccgcccccagcagaaccgccagcttcagcgagagcagagccgacgaggtggcccccgccaagaaggccaagcccgccatgccccaggacagcgtgcccagccccagaagcctgcagggcaagagcaccaccctgttcagcagacacaccaaggccatcgtgtggggcatgcagaccagagccgtgcagggcatgctggacttcgactacgtgtgcagcagagacgagcccagcgtggccgccatggtgtaccccttcaccggcgaccacaagcagaagttctactggggccacaaggagatcctgatccccgtgttcaagaacatggccgacgccatgagaaagcaccccgaggtggacgtgctgatcaacttcgccagcctgagaagcgcctacgacagcaccatggagaccatgaactacgcccagatcagaaccatcgccatcatcgccgagggcatccccgaggccctgaccagaaagctgatcaagaaggccgaccagaagggcgtgaccatcatcggccccgccaccgtgggcggcatcaagcccggctgcttcaagatcggcaacaccggcggcatgctggacaacatcctggccagcaagctgtacagacccggcagcgtggcctacgtgagcagaagcggcggcatgagcaacgagctgaacaacatcatcagcagaaccaccgacggcgtgtacgagggcgtggccatcggcggcgacagataccccggcagcaccttcatggaccacgtgctgagataccaggacacccccggcgtgaagatgatcgtggtgctgggcgagatcggcggcaccgaggagtacaagatctgcagaggcatcaaggagggcagactgaccaagcccatcgtgtgctggtgcatcggcacctgcgccaccatgttcagcagcgaggtgcagttcggccacgccggcgcctgcgccaaccaggccagcgagaccgccgtggccaagaaccaggccctgaaggaggccggcgtgttcgtgcccagaagcttcgacgagctgggcgagatcatccagagcgtgtacgaggacctggtggccaacggcgtgatcgtgcccgcccaggaggtgcccccccccaccgtgcccatggactacagctgggccagagagctgggcctgatcagaaagcccgccagcttcatgaccagcatctgcgacgagagaggccaggagctgatctacgccggcatgcccatcaccgaggtgttcaaggaggagatgggcatcggcggcgtgctgggcctgctgtggttccagaagagactgcccaagtacagctgccagttcatcgagatgtgcctgatggtgaccgccgaccacggccccgccgtgagcggcgcccacaacaccatcatctgcgccagagccggcaaggacctggtgagcagcctgaccagcggcctgctgaccatcggcgacagattcggcggcgccctggacgccgccgccaagatgttcagcaaggccttcgacagcggcatcatccccatggagttcgtgaacaagatgaagaaggagggcaagctgatcatgggcatcggccacagagtgaagagcatcaacaaccccgacatgagagtgcagatcctgaaggactacgtgagacagcacttccccgccacccccctgctggactacgccctggaggtggagaagatcaccaccagcaagaagcccaacctgatcctgaacgtggacggcctgatcggcgtggccttcgtggacatgctgagaaactgcggcagcttcaccagagaggaggccgacgagtacatcgacatcggcgccctgaacggcatcttcgtgctgggcagaagcatgggcttcatcggccactacctggaccagaagagactgaagcagggcctgtacagacacccctgggacgacatcagctacgtgctgcccgagcacatgagcatgtag

SEQ ID NO: 9436 - DNA, 2493 bp, synthetic construct
  misc_feature 1..2493: note = Description of Artificial Sequence: Synthetic coding sequence
  source 1..2493: mol_type = other DNA
atgagcgccaaggccatcagcgagcagaccggcaaggagctgctgtacaagttcatctgcaccaccagcgccatccagaacagattcaagtacgccagagtgacccccgacaccgactgggccagactgctgcaggaccacccctggctgctgagccagaacctggtggtgaagcccgaccagctgatcaagagaagaggcaagctgggcctggtgggcgtgaacctgaccctggacggcgtgaagagctggctgaagcccagactgggccaggaggccaccggcatcgtgagagccatcagagactaccagggccccctgaaggagcacgaggtgaccatcttcgtgagaagaggcggccccaactaccaggagggcctgagagtgatgggcgaggtgggcaagaccaccggcatccccatccacgtgttcggcaccgagacccacatgaccgccatcgtgggcatggccctgggccacagacccatccccaaccagccccccaccgccgcccacaccgccaacttcctgctgaacgccagcggcagcaccagcacccccgcccccagcagaaccgccagcttcagcgagagcagagccgacgaggtggcccccgccaagaaggccaagcccgccatgccccagggcaagagcaccaccctgttcagcagacacaccaaggccatcgtgtggggcatgcagaccagagccgtgcagggcatgctggacttcgactacgtgtgcagcagagacgagcccagcgtggccgccatggtgtaccccttcaccggcgaccacaagcagaagttctactggggccacaaggagatcctgatccccgtgttcaagaacatggccgacgccatgagaaagcaccccgaggtggacgtgctgatcaacttcgccagcctgagaagcgcctacgacagcaccatggagaccatgaactacgcccagatcagaaccatcgccatcatcgccgagggcatccccgaggccctgaccagaaagctgatcaagaaggccgaccagaagggcgtgaccatcatcggccccgccaccgtgggcggcatcaagcccggctgcttcaagatcggcaacaccggcggcatgctggacaacatcctggccagcaagctgtacagacccggcagcgtggcctacgtgagcagaagcggcggcatgagcaacgagctgaacaacatcatcagcagaaccaccgacggcgtgtacgagggcgtggccatcggcggcgacagataccccggcagcaccttcatggaccacgtgctgagataccaggacacccccggcgtgaagatgatcgtggtgctgggcgagatcggcggcaccgaggagtacaagatctgcagaggcatcaaggagggcagactgaccaagcccatcgtgtgctggtgcatcggcacctgcgccaccatgttcagcagcgaggtgcagttcggccacgccggcgcctgcgccaaccaggccagcgagaccgccgtggccaagaaccaggccctgaaggaggccggcgtgttcgtgcccagaagcttcgacgagctgggcgagatcatccagagcgtgtacgaggacctggtggccaacggcgtgatcgtgcccgcccaggaggtgcccccccccaccgtgcccatggactacagctgggccagagagctgggcctgatcagaaagcccgccagcttcatgaccagcatctgcgacgagagaggccaggagctgatctacgccggcatgcccatcaccgaggtgttcaaggaggagatgggcatcggcggcgtgctgggcctgctgtggttccagaagagactgcccaagtacagctgccagttcatcgagatgtgcctgatggtgaccgccgaccacggccccgccgtgagcggcgcccacaacaccatcatctgcgccagagccggcaaggacctggtgagcagcctgaccagcggcctgctgaccatcggcgacagattcggcggcgccctggacgccgccgccaagatgttcagcaaggccttcgacagcggcatcatccccatggagttcgtgaacaagatgaagaaggagggcaagctgatcatgggcatcggccacagagtgaagagcatcaacaaccccgacatgagagtgcagatcctgaaggactacgtgagacagcacttccccgccacccccctgctggactacgccctggaggtggagaagatcaccaccagcaagaagcccaacctgatcctgaacgtggacggcctgatcggcgtggccttcgtggacatgctgagaaactgcggcagcttcaccagagaggaggccgacgagtacatcgacatcggcgccctgaacggcatcttcgtgctgggcagaagcatgggcttcatcggccactacctggaccagaagagactgaagcagggcctgtacagacacccctgggacgacatcagctacgtgctgcccgagcacatgagcatgtag

SEQ ID NO: 9437 - DNA, 1512 bp, synthetic construct
  misc_feature 1..1512: note = Description of Artificial Sequence: Synthetic coding sequence
  source 1..1512: mol_type = other DNA
atgagcagcatcctggaggagagaatcctgggcgccgacaccagcgtggacctggaggagaccggcagagtgctgagcatcggcgacggcatcgccagagtgcacggcctgagaaacgtgcaggccgaggagatggtggagttcagcagcggcctgaagggcatgagcctgaacctggagcccgacaacgtgggcgtggtggtgttcggcaacgacaagctgatcaaggagggcgacatcgtgaagagaaccggcgccatcgtggacgtgcccgtgggcgaggagctgctgggcagagtggtggacgccctgggcaacgccatcgacggcaagggccccatcggcagcaagaccagaagaagagtgggcctgaaggcccccggcatcatccccagaatcagcgtgagagagcccatgcagaccggcatcaaggccgtggacagcctggtgcccatcggcagaggccagagagagctgatcatcggcgacagacagaccggcaagaccagcatcgccatcgacaccatcatcaaccagaagagattcaacgacggcagcgacgagaagaagaagctgtactgcatctacgtggccatcggccagaagagaagcaccgtggcccagctggtgaagagactgaccgacgccgacgccatgaagtacaccatcgtggtgagcgccaccgccagcgacgccgcccccctgcagtacctggccccctacagcggctgcagcatgggcgagtacttcagagacaacggcaagcacgccctgatcatctacgacgacctgagcaagcaggccgtggcctacagacagatgagcctgctgctgagaagaccccccggcagagaggcctaccccggcgacgtgttctacctgcacagcagactgctggagagagccgccaagatgaacgacgccttcggcggcggcagcctgaccgccctgcccgtgatcgagacccaggccggcgacgtgagcgcctacatccccaccaacgtgatcagcatcaccgacggccagatcttcctggagaccgagctgttctacaagggcatcagacccgccatcaacgtgggcctgagcgtgagcagagtgggcagcgccgcccagaccagagccatgaagcaggtggccggcaccatgaagctggagctggcccagtacagagaggtggccgccttcgcccagttcggcagcgacctggacgccgccacccagcagctgctgagcagaggcgtgagactgaccgagctgctgaagcagggccagtacagccccatggccatcgaggagcaggtggccgtgatctacgccggcgtgagaggctacctggacaagctggagcccagcaagatcaccaagttcgagaacgccttcctgagccacgtggtgagccagcaccaggccctgctgggcaccatcagagccgacggcaagatcagcgagcagagcgacgccaagctgaaggagatcgtgaccaacttcctggccggcttcgaggcctag

SEQ ID NO: 9438 - DNA, 177 bp, synthetic construct
  misc_feature 1..177: note = Description of Artificial Sequence: Synthetic coding sequence
  source 1..177: mol_type = other DNA
atgctgagcgtgagagtggccgccgccgtggtgagagccctgcccagaagagccggcctggtgagcagaaacgccctgggcagcagcttcatcgccgccagaaacttccacgccagcaacacccacctgcagaagaccggcaagctgctgttcctgagcctgagaagaacctactag

SEQ ID NO: 9439 - DNA, 1596 bp, synthetic construct
  misc_feature 1..1596: note = Description of Artificial Sequence: Synthetic coding sequence
  source 1..1596: mol_type = other DNA
atgctgagcgtgagagtggccgccgccgtggtgagagccctgcccagaagagccggcctggtgagcagaaacgccctgggcagcagcttcatcgccgccagaaacttccacgccagcaacacccacctgcagaagaccggcaccgccgagatgagcagcatcctggaggagagaatcctgggcgccgacaccagcgtggacctggaggagaccggcagagtgctgagcatcggcgacggcatcgccagagtgcacggcctgagaaacgtgcaggccgaggagatggtggagttcagcagcggcctgaagggcatgagcctgaacctggagcccgacaacgtgggcgtggtggtgttcggcaacgacaagctgatcaaggagggcgacatcgtgaagagaaccggcgccatcgtggacggccccatcggcagcaagaccagaagaagagtgggcctgaaggcccccggcatcatccccagaatcagcgtgagagagcccatgcagaccggcatcaaggccgtggacagcctggtgcccatcggcagaggccagagagagctgatcatcggcgacagacagaccggcaagaccagcatcgccatcgacaccatcatcaaccagaagagattcaacgacggcagcgacgagaagaagaagctgtactgcatctacgtggccatcggccagaagagaagcaccgtggcccagctggtgaagagactgaccgacgccgacgccatgaagtacaccatcgtggtgagcgccaccgccagcgacgccgcccccctgcagtacctggccccctacagcggctgcagcatgggcgagtacttcagagacaacggcaagcacgccctgatcatctacgacgacctgagcaagcaggccgtggcctacagacagatgagcctgctgctgagaagaccccccggcagagaggcctaccccggcgacgtgttctacctgcacagcagactgctggagagagccgccaagatgaacgacgccttcggcggcggcagcctgaccgccctgcccgtgatcgagacccaggccggcgacgtgagcgcctacatccccaccaacgtgatcagcatcaccgacggccagatcttcctggagaccgagctgttctacaagggcatcagacccgccatcaacgtgggcctgagcgtgagcagagtgggcagcgccgcccagaccagagccatgaagcaggtggccggcaccatgaagctggagctggcccagtacagagaggtggccgccttcgcccagttcggcagcgacctggacgccgccacccagcagctgctgagcagaggcgtgagactgaccgagctgctgaagcagggccagtacagccccatggccatcgaggagcaggtggccgtgatctacgccggcgtgagaggctacctggacaagctggagcccagcaagatcaccaagttcgagaacgccttcctgagccacgtggtgagccagcaccaggccctgctgggcaccatcagagccgacggcaagatcagcgagcagagcgacgccaagctgaaggagatcgtgaccaacttcctggccggcttcgaggcctag

SEQ ID NO: 9440 - DNA, 1662 bp, synthetic construct
  misc_feature 1..1662: note = Description of Artificial Sequence: Synthetic coding sequence
  source 1..1662: mol_type = other DNA
atgctgagcgtgagagtggccgccgccgtggtgagagccctgcccagaagagccggcctggtgagcagaaacgccctgggcagcagcttcatcgccgccagaaacttccacgccagcaacacccacctgcagaagaccggcaccgccgagatgagcagcatcctggaggagagaatcctgggcgccgacaccagcgtggacctggaggagaccggcagagtgctgagcatcggcgacggcatcgccagagtgcacggcctgagaaacgtgcaggccgaggagatggtggagttcagcagcggcctgaagggcatgagcctgaacctggagcccgacaacgtgggcgtggtggtgttcggcaacgacaagctgatcaaggagggcgacatcgtgaagagaaccggcgccatcgtggacgtgcccgtgggcgaggagctgctgggcagagtggtggacgccctgggcaacgccatcgacggcaagggccccatcggcagcaagaccagaagaagagtgggcctgaaggcccccggcatcatccccagaatcagcgtgagagagcccatgcagaccggcatcaaggccgtggacagcctggtgcccatcggcagaggccagagagagctgatcatcggcgacagacagaccggcaagaccagcatcgccatcgacaccatcatcaaccagaagagattcaacgacggcagcgacgagaagaagaagctgtactgcatctacgtggccatcggccagaagagaagcaccgtggcccagctggtgaagagactgaccgacgccgacgccatgaagtacaccatcgtggtgagcgccaccgccagcgacgccgcccccctgcagtacctggccccctacagcggctgcagcatgggcgagtacttcagagacaacggcaagcacgccctgatcatctacgacgacctgagcaagcaggccgtggcctacagacagatgagcctgctgctgagaagaccccccggcagagaggcctaccccggcgacgtgttctacctgcacagcagactgctggagagagccgccaagatgaacgacgccttcggcggcggcagcctgaccgccctgcccgtgatcgagacccaggccggcgacgtgagcgcctacatccccaccaacgtgatcagcatcaccgacggccagatcttcctggagaccgagctgttctacaagggcatcagacccgccatcaacgtgggcctgagcgtgagcagagtgggcagcgccgcccagaccagagccatgaagcaggtggccggcaccatgaagctggagctggcccagtacagagaggtggccgccttcgcccagttcggcagcgacctggacgccgccacccagcagctgctgagcagaggcgtgagactgaccgagctgctgaagcagggccagtacagccccatggccatcgaggagcaggtggccgtgatctacgccggcgtgagaggctacctggacaagctggagcccagcaagatcaccaagttcgagaacgccttcctgagccacgtggtgagccagcaccaggccctgctgggcaccatcagagccgacggcaagatcagcgagcagagcgacgccaagctgaaggagatcgtgaccaacttcctggccggcttcgaggcctag

SEQ ID NO: 9441 - DNA, 1662 bp, synthetic construct; identical to SEQ ID NO: 9440
  misc_feature 1..1662: note = Description of Artificial Sequence: Synthetic coding sequence
  source 1..1662: mol_type = other DNA

SEQ ID NO: 9442 - DNA, 1512 bp, synthetic construct; identical to SEQ ID NO: 9437
  misc_feature 1..1512: note = Description of Artificial Sequence: Synthetic coding sequence
  source 1..1512: mol_type = other DNA

SEQ ID NO: 9443 - DNA, 3843 bp, synthetic construct
  misc_feature 1..3843: note = Description of Artificial Sequence: Synthetic coding sequence
  source 1..3843: mol_type = other DNA
atggacctggagggcgacagaaacggcggcgccaagaagaagaacttcttcaagctgaacaacaagagcgagaaggacaagaaggagaagaagcccaccgtgagcgtgttcagcatgttcagatacagcaactggctggacaagctgtacatggtggtgggcaccctggccgccatcatccacggcgccggcctgcccctgatgatgctggtgttcggcgagatgaccgacatcttcgccaacgccggcaacctggaggacctgatgagcaacatcaccaacagaagcgacatcaacgacaccggcttcttcatgaacctggaggaggacatgaccagatacgcctactactacagcggcatcggcgccggcgtgctggtggccgcctacatccaggtgagcttctggtgcctggccgccggcagacagatccacaagatcagaaagcagttcttccacgccatcatgagacaggagatcggctggttcgacgtgcacgacgtgggcgagctgaacaccagactgaccgacgacgtgagcaagatcaacgagggcatcggcgacaagatcggcatgttcttccagagcatggccaccttcttcaccggcttcatcgtgggcttcaccagaggctggaagctgaccctggtgatcctggccatcagccccgtgctgggcctgagcgccgccgtgtgggccaagatcctgagcagcttcaccgacaaggagctgctggcctacgccaaggccggcgccgtggccgaggaggtgctggccgccatcagaaccgtgatcgccttcggcggccagaagaaggagctggagagatacaacaagaacctggaggaggccaagagaatcggcatcaagaaggccatcaccgccaacatcagcatcggcgccgccttcctgctgatctacgccagctacgccctggccttctggtacggcaccaccctggtgctgagcggcgagtacagcatcggccaggtgctgaccgtgttcttcagcgtgctgatcggcgccttcagcgtgggccaggccagccccagcatcgaggccttcgccaacgccagaggcgccgcctacgagatcttcaagatcatcgacaacaagcccagcatcgacagctacagcaagagcggccacaagcccgacaacatcaagggcaacctggagttcagaaacgtgcacttcagctaccccagcagaaaggaggtgaagatcctgaagggcctgaacctgaaggtgcagagcggccagaccgtggccctggtgggcaacagcggctgcggcaagagcaccaccgtgcagctgatgcagagactgtacgaccccaccgagggcatggtgagcgtggacggccaggacatcagaaccatcaacgtgagattcctgagagagatcatcggcgtggtgagccaggagcccgtgctgttcgccaccaccatcgccgagaacatcagatacggcagagagaacgtgaccatggacgagatcgagaaggccgtgaaggaggccaacgcctacgacttcatcatgaagctgccccacaagttcgacaccctggtgggcgagagaggcgcccagctgagcggcggccagaagcagagaatcgccatcgccagagccctggtgagaaaccccaagatcctgctgctggacgaggccaccagcgccctggacaccgagagcgaggccgtggtgcaggtggccctggacaaggccagaaagggcagaaccaccatcgtgatcgcccacagactgagcaccgtgagaaacgccgacgtgatcgccggcttcgacgacggcgtgatcgtggagaagggcaaccacgacgagctgatgaaggagaagggcatctacttcaagctggtgaccatgcagaccgccggcaacgaggtggagctggagaacgccgccgacgagagcaagagcgagatcgacgccctggagatgagcagcaacgacagcagaagcagcctgatcagaaagagaagcaccagaagaagcgtgagaggcagccaggcccaggacagaaagctgagcaccaaggaggccctggacgagagcatcccccccgtgagcttctggagaatcatgaagctgaacctgaccgagtggccctacttcgtggtgggcgtgttctgcgccatcatcaacggcggcctgcagcccgccttcgccatcatcttcagcaagatcatcggcgtgttcaccagaatcgacgaccccgagaccaagagacagaacagcaacctgttcagcctgctgttcctggccctgggcatcatcagcttcatcaccttcttcctgcagggcttcaccttcggcaaggccggcgagatcctgaccaagagactgagatacatggtgttcagaagcatgctgagacaggacgtgagctggttcgacgaccccaagaacaccaccggcgccctgaccaccagactggccaacgacgccgcccaggtgaagggcgccatcggcagcagactggccgtgatcacccagaacatcgccaacctgggcaccggcatcatcatcagcttcatctacggctggcagctgaccctgctgctgctggccatcgtgcccatcatcgccatcgccggcgtggtggagatgaagatgctgagcggccaggccctgaaggacaagaaggagctggagggcagcggcaagatcgccaccgaggccatcgagaacttcagaaccgtggtgagcctgacccaggagcagaagttcgagcacatgtacgcccagagcctgcaggtgccctacagaaacagcctgagaaaggcccacatcttcggcatcaccttcagcttcacccaggccatgatgtacttcagctacgccggctgcttcagattcggcgcctacctggtggcccacaagctgatgagcttcgaggacgtgctgctggtgttcagcgccgtggtgttcggcgccatggccgtgggccaggtgagcagcttcgcccccgactacgccaaggccaagatcagcgccgcccacatcatcatgatcatcgagaagacccccctgatcgacagctacagcaccgagggcctgatgcccaacaccctggagggcaacgtgaccttcggcgaggtggtgttcaactaccccaccagacccgacatccccgtgctgcagggcctgagcctggaggtgaagaagggccagaccctggccctggtgggcagcagcggctgcggcaagagcaccgtggtgcagctgctggagagattctacgaccccctggccggcaaggtgctgctggacggcaaggagatcaagagactgaacgtgcagtggctgagagcccacctgggcatcgtgagccaggagcccatcctgttcgactgcagcatcgccgagaacatcgcctacggcgacaacagcagagtggtgagccaggaggagatcgtgagagccgccaaggaggccaacatccacgccttcatcgagagcctgcccaacaagtacagcaccaaggtgggcgacaagggcacccagctgagcggcggccagaagcagagaatcgccatcgccagagccctggtgagacagccccacatcctgctgctggacgaggccaccagcgccctggacaccgagagcgagaaggtggtgcaggaggccctggacaaggccagagagggcagaacctgcatcgtgatcgcccacagactgagcaccatccagaacgccgacctgatcgtggtgttccagaacggcagagtgaaggagcacggcacccaccagcagctgctggcccagaagggcatctacttcagcatggtgagcgtgcaggccggcaccaagagacagtag

SEQ ID NO: 9444 - DNA, 69 bp, synthetic construct
  misc_feature 1..69: note = Description of Artificial Sequence: Synthetic coding sequence
  source 1..69: mol_type = other DNA
atggacctggagggcgacagaaacggcggcgccaagaagaagaacttcttcaagctgaacaacaagtag

SEQ ID NO: 9445 - DNA, 147 bp, synthetic construct
  misc_feature 1..147: note = Description of Artificial Sequence: Synthetic coding sequence
  source 1..147: mol_type = other DNA
atggacctggagggcgacagaaacggcggcgccaagaagaagaacttcttcaagctgaacaacaagagcgagaaggacaagaaggagaagaagcccaccgtgagcgtgttcagcatgttcagatacagcaactggctggacaagtag

SEQ ID NO: 9446 - DNA, 3186 bp, synthetic construct
  misc_feature 1..3186: note = Description of Artificial Sequence: Synthetic coding sequence
  source 1..3186: mol_type = other DNA
gccctgagccccgtgatgggcgtgagcgccggctactggcccaagatcctgagcagcttcaccgacaaggagctgctggcctacgccaaggccggcgccgtggccgaggaggtgctggccgccatcagaaccgtgatcgccttcggcggccagaagaaggagctggagagatacaacaagaacctggaggaggccaagagaatcggcatcaagaaggccatcaccgccaacatcagcatcggcgccgccttcctgctgatctacgccagctacgccctggccttctggtacggcaccaccctggtgctgagcggcgagtacagcatcggccaggtgctgaccgtgttcttcagcgtgctgatcggcgccttcagcgtgggccaggccagccccagcatcgaggccttcgccaacgccagaggcgccgcctacgagatcttcaagatcatcgacaacaagcccagcatcgacagctacagcaagagcggccacaagcccgacaacatcaagggcaacctggagttcagaaacgtgcacttcagctaccccagcagaaaggaggtgaagatcctgaagggcctgaacctgaaggtgcagagcggccagaccgtggccctggtgggcaacagcggctgcggcaagagcaccaccgtgcagctgatgcagagactgtacgaccccaccgagggcatggtgagcgtggacggccaggacatcagaaccatcaacgtgagattcctgagagagatcatcggcgtggtgagccaggagcccgtgctgttcgccaccaccatcgccgagaacatcagatacggcagagagaacgtgaccatggacgagatcgagaaggccgtgaaggaggccaacgcctacgacttcatcatgaagctgccccacaagttcgacaccctggtgggcgagagaggcgcccagctgagcggcggccagaagcagagaatcgccatcgccagagccctggtgagaaaccccaagatcctgctgctggacgaggccaccagcgccctggacaccgagagcgaggccgtggtgcaggtggccctggacaaggccagaaagggcagaaccaccatcgtgatcgcccacagactgagcaccgtgagaaacgccgacgtgatcgccggcttcgacgacggcgtgatcgtggagaagggcaaccacgacgagctgatgaaggagaagggcatctacttcaagctggtgaccatgcagaccgccggcaacgaggtggagctggagaacgccgccgacgagagcaagagcgagatcgacgccctggagatgagcagcaacgacagcagaagcagcctgatcagaaagagaagcaccagaagaagcgtgagaggcagccaggcccaggacagaaagctgagcaccaaggaggccctggacgagagcatcccccccgtgagcttctggagaatcatgaagctgaacctgaccgagtggccctacttcgtggtgggcgtgttctgcgccatcatcaacggcggcctgcagcccgccttcgccatcatcttcagcaagatcatcggcgtgttcaccagaatcgacgaccccgagaccaagagacagaacagcaacctgttcagcctgctgttcctggccctgggcatcatcagcttcatcaccttcttcctgcagggcttcaccttcggcaaggccggcgagatcctgaccaagagactgagatacatggtgttcagaagcatgctgagacaggacgtgagctggttcgacgaccccaagaacaccaccggcgccctgaccaccagactggccaacgacgccgcccaggtgaagggcgccatcggcagcagactggccgtgatcacccagaacatcgccaacctgggcaccggcatcatcatcagcttcatctacggctggcagctgaccctgctgctgctggccatcgtgcccatcatcgccatcgccggcgtggtggagatgaagatgctgagcggccaggccctgaaggacaagaaggagctggagggcagcggcaagatcgccaccgaggccatcgagaacttcagaaccgtggtgagcctgacccaggagcagaagttcgagcacatgtacgcccagagcctgcaggtgccctacagaaacagcctgagaaaggcccacatcttcggcatcaccttcagcttcacccaggccatgatgtacttcagctacgccggctgcttcagattcggcgcctacctggtggcccacaagctgatgagcttcgaggacgtgctgctggtgttcagcgccgtggtgttcggcgccatggccgtgggccaggtgagcagcttcgcccccgactacgccaaggccaagatcagcgccgcccacatcatcatgatcatcgagaagacccccctgatcgacagctacagcaccgagggcctgatgcccaacaccctggagggcaacgtgaccttcggcgaggtggtgttcaactaccccaccagacccgacatccccgtgctgcagggcctgagcctggaggtgaagaagggccagaccctggccctggtgggcagcagcggctgcggcaagagcaccgtggtgcagctgctggagagattctacgaccccctggccggcaaggtgctgctggacggcaaggagatcaagagactgaacgtgcagtggctgagagcccacctgggcatcgtgagccaggagcccatcctgttcgactgcagcatcgccgagaacatcgcctacggcgacaacagcagagtggtgagccaggaggagatcgtgagagccgccaaggaggccaacatccacgccttcatcgagagcctgcccaacaagtacagcaccaaggtgggcgacaagggcacccagctgagcggcggccagaagcagagaatcgccatcgccagagccctggtgagacagccccacatcctgctgctggacgaggccaccagcgccctggacaccgagagcgagaaggtggtgcaggaggccctggacaaggccagagagggcagaacctgcatcgtgatcgcccacagactgagcaccatccagaacgccgacctgatcgtggtgttccagaacggcagagtgaaggagcacggcacccaccagcagctgctggcccagaagggcatctacttcagcatggtgagcgtgcaggccggcaccaagagacagtag

SEQ ID NO: 9447 - DNA, 3651 bp, synthetic construct
  misc_feature 1..3651: note = Description of Artificial Sequence: Synthetic coding sequence
  source 1..3651: mol_type = other DNA
atggacctggagggcgacagaaacggcggcgccaagaagaagaacttcttcaagctgaacaacaagagcgagaaggacaagaaggagaagaagcccaccgtgagcgtgttcagcatgttcagatacagcaactggctggacaagctgtacatggtggtgggcaccctggccgccatcatccacggcgccggcctgcccctgatgatgctggtgttcggcgagatgaccgacatcttcgccaacgccggcaacctggaggacctgatgagcaacatcaccaacagaagcgacatcaacgacaccggcttcttcatgaacctggaggaggacatgaccagcgacgtgagcaagatcaacgagggcatcggcgacaagatcggcatgttcttccagagcatggccaccttcttcaccggcttcatcgtgggcttcaccagaggctggaagctgaccctggtgatcctggccatcagccccgtgctgggcctgagcgccgccgtgtgggccaagatcctgagcagcttcaccgacaaggagctgctggcctacgccaaggccggcgccgtggccgaggaggtgctggccgccatcagaaccgtgatcgccttcggcggccagaagaaggagctggagagatacaacaagaacctggaggaggccaagagaatcggcatcaagaaggccatcaccgccaacatcagcatcggcgccgccttcctgctgatctacgccagctacgccctggccttctggtacggcaccaccctggtgctgagcggcgagtacagcatcggccaggtgctgaccgtgttcttcagcgtgctgatcggcgccttcagcgtgggccaggccagccccagcatcgaggccttcgccaacgccagaggcgccgcctacgagatcttcaagatcatcgacaacaagcccagcatcgacagctacagcaagagcggccacaagcccgacaacatcaagggcaacctggagttcagaaacgtgcacttcagctaccccagcagaaaggaggtgaagatcctgaagggcctgaacctgaaggtgcagagcggccagaccgtggccctggtgggcaacagcggctgcggcaagagcaccaccgtgcagctgatgcagagactgtacgaccccaccgagggcatggtgagcgtggacggccaggacatcagaaccatcaacgtgagattcctgagagagatcatcggcgtggtgagccaggagcccgtgctgttcgccaccaccatcgccgagaacatcagatacggcagagagaacgtgaccatggacgagatcgagaaggccgtgaaggaggccaacgcctacgacttcatcatgaagctgccccacaagttcgacaccctggtgggcgagagaggcgcccagctgagcggcggccagaagcagagaatcgccatcgccagagccctggtgagaaaccccaagatcctgctgctggacgaggccaccagcgccctggacaccgagagcgaggccgtggtgcaggtggccctggacaaggccagaaagggcagaaccaccatcgtgatcgcccacagactgagcaccgtgagaaacgccgacgtgatcgccggcttcgacgacggcgtgatcgtggagaagggcaaccacgacgagctgatgaaggagaagggcatctacttcaagctggtgaccatgcagaccgccggcaacgaggtggagctggagaacgccgccgacgagagcaagagcgagatcgacgccctggagatgagcagcaacgacagcagaagcagcctgatcagaaagagaagcaccagaagaagcgtgagaggcagccaggcccaggacagaaagctgagcaccaaggaggccctggacgagagcatcccccccgtgagcttctggagaatcatgaagctgaacctgaccgagtggccctacttcgtggtgggcgtgttctgcgccatcatcaacggcggcctgcagcccgccttcgccatcatcttcagcaagatcatcggcgtgttcaccagaatcgacgaccccgagaccaagagacagaacagcaacctgttcagcctgctgttcctggccctgggcatcatcagcttcatcaccttcttcctgcagggcttcaccttcggcaaggccggcgagatcctgaccaagagactgagatacatggtgttcagaagcatgctgagacaggacgtgagctggttcgacgaccccaagaacaccaccggcgccctgaccaccagactggccaacgacgccgcccaggtgaagggcgccatcggcagcagactggccgtgatcacccagaacatcgccaacctgggcaccggcatcatcatcagcttcatctacggctggcagctgaccctgctgctgctggccatcgtgcccatcatcgccatcgccggcgtggtggagatgaagatgctgagcggccaggccctgaaggacaagaaggagctggagggcagcggcaagatcgccaccgaggccatcgagaacttcagaaccgtggtgagcctgacccaggagcagaagttcgagcacatgtacgcccagagcctgcaggtgccctacagaaacagcctgagaaaggcccacatcttcggcatcaccttcagcttcacccaggccatgatgtacttcagctacgccggctgcttcagattcggcgcctacctggtggcccacaagctgatgagcttcgaggacgtgctgctggtgttcagcgccgtggtgttcggcgccatggccgtgggccaggtgagcagcttcgcccccgactacgccaaggccaagatcagcgccgcccacatcatcatgatcatcgagaagacccccctgatcgacagctacagcaccgagggcctgatgcccaacaccctggagggcaacgtgaccttcggcgaggtggtgttcaactaccccaccagacccgacatccccgtgctgcagggcctgagcctggaggtgaagaagggccagaccctggccctggtgggcagcagcggctgcggcaagagcaccgtggtgcagctgctggagagattctacgaccccctggccggcaaggtgctgctggacggcaaggagatcaagagactgaacgtgcagtggctgagagcccacctgggcatcgtgagccaggagcccatcctgttcgactgcagcatcgccgagaacatcgcctacggcgacaacagcagagtggtgagccaggaggagatcgtgagagccgccaaggaggccaacatccacgccttcatcgagagcctgcccaacaagtacagcaccaaggtgggcgacaagggcacccagctgagcggcggccagaagcagagaatcgccatcgccagagccctggtgagacagccccacatcctgctgctggacgaggccaccagcgccctggacaccgagagcgagaaggtggtgcaggaggccctggacaaggccagagagggcagaacctgcatcgtgatcgcccacagactgagcaccatccagaacgccgacctgatcgtggtgttccagaacggcagagtgaaggagcacggcacccaccagcagctgctggcccagaagggcatctacttcagcatggtgagcgtgcaggccggcaccaagagacagtag

SEQ ID NO: 9448 - DNA, 4401 bp, synthetic construct
  misc_feature 1..4401: note = Description of Artificial Sequence: Synthetic coding sequence
  source 1..4401: mol_type = other DNA
atggccctgagaggcttctgcagcgccgacggcagcgaccccctgtgggactggaacgtgacctggaacaccagcaaccccgacttcaccaagtgcttccagaacaccgtgctggtgtgggtgccctgcttctacctgtgggcctgcttccccttctacttcctgtacctgagcagacacgacagaggctacatccagatgacccccctgaacaagaccaagaccgccctgggcttcctgctgtggatcgtgtgctgggccgacctgttctacagcttctgggagagaagcagaggcatcttcctggcccccgtgttcctggtgagccccaccctgctgggcatcaccatgctgctggccaccttcctgatccagctggagagaagaaagggcgtgcagagcagcggcatcatgctgaccttctggctggtggccctggtgtgcgccctggccatcctgagaagcaagatcatgaccgccctgaaggaggacgcccaggtggacctgttcagagacatcaccttctacgtgtacttcagcctgctgctgatccagctggtgctgagctgcttcagcgacagaagccccctgttcagcgagaccatccacgaccccaacccctgccccgagagcagcgccagcttcctgagcagaatcaccttctggtggatcaccggcctgatcgtgagaggctacagacagcccctggagggcagcgacctgtggagcctgaacaaggaggacaccagcgagcaggtggtgcccgtgctggtgaagaactggaagaaggagtgcgccaagaccagaaagcagcccgtgaaggtggtgtacagcagcaaggaccccgcccagcccaaggagagcagcaaggtggacgccaacgaggaggtggaggccctgatcgtgaagagcccccagaaggagtggaaccccagcctgttcaaggtgctgtacaagaccttcggcccctacttcctgatgagcttcttcttcaaggccatccacgacctgatgatgttcagcggcccccagatcctgaagctgctgatcaagttcgtgaacgacaccaaggcccccgactggcagggctacttctacaccgtgctgctgttcgtgaccgcctgcctgcagaccctggtgctgcaccagtacttccacatctgcttcgtgagcggcatgagaatcaagaccgccgtgatcggcgccgtgtacagaaaggccctggtgatcaccaacagcgccagaaagagcagcaccgtgggcgagatcgtgaacctgatgagcgtggacgcccagagattcatggacctggccacctacatcaacatgatctggagcgcccccctgcaggtgatcctggccctgtacctgctgtggctgaacctgggccccagcgtgctggccggcgtggccgtgatggtgctgatggtgcccgtgaacgccgtgatggccatgaagaccaagacctaccaggtggcccacatgaagagcaaggacaacagaatcaagctgatgaacgagatcctgaacggcatcaaggtgctgaagctgtacgcctgggagctggccttcaaggacaaggtgctggccatcagacaggaggagctgaaggtgctgaagaagagcgcctacctgagcgccgtgggcaccttcacctgggtgtgcacccccttcctggtggccctgtgcaccttcgccgtgtacgtgaccatcgacgagaacaacatcctggacgcccagaccgccttcgtgagcctggccctgttcaacatcctgagattccccctgaacatcctgcccatggtgatcagcagcatcgtgcaggccagcgtgagcctgaagagactgagaatcttcctgagccacgaggagctggagcccgacagcatcgagagaagacccgtgaaggacggcggcggcaccaacagcatcaccgtgagaaacgccaccttcacctgggccagaagcgacccccccaccctgaacggcatcaccttcagcatccccgagggcgccctggtggccgtggtgggccaggtgggctgcggcaagagcagcctgctgagcgccctgctggccgagatggacaaggtggagggccacgtggccatcaagggcagcgtggcctacgtgccccagcaggcctggatccagaacgacagcctgagagagaacatcctgttcggctgccagctggaggagccctactacagaagcgtgatccaggcctgcgccctgctgcccgacctggagatcctgcccagcggcgacagaaccgagatcggcgagaagggcgtgaacctgagcggcggccagaagcagagagtgagcctggccagagccgtgtacagcaacgccgacatctacctgttcgacgaccccctgagcgccgtggacgcccacgtgggcaagcacatcttcgagaacgtgatcggccccaagggcatgctgaagaacaagaccagaatcctggtgacccacagcatgagctacctgccccaggtggacgtgatcatcgtgatgagcggcggcaagatcagcgagatgggcagctaccaggagctgctggccagagacggcgccttcgccgagttcctgagaacctacgccagcaccgagcaggagcaggacgccgaggagaacggcgtgaccggcgtgagcggccccggcaaggaggccaagcagatggagaacggcatgctggtgaccgacagcgccggcaagcagctgcagagacagctgagcagcagcagcagctacagcggcgacatcagcagacaccacaacagcaccgccgagctgcagaaggccgaggccaagaaggaggagacctggaagctgatggaggccgacaaggcccagaccggccaggtgaagctgagcgtgtactgggactacatgaaggccatcggcctgttcatcagcttcctgagcatcttcctgttcatgtgcaaccacgtgagcgccctggccagcaactactggctgagcctgtggaccgacgaccccatcgtgaacggcacccaggagcacaccaaggtgagactgagcgtgtacggcgccctgggcatcagccagggcatcgccgtgttcggctacagcatggccgtgagcatcggcggcatcctggccagcagatgcctgcacgtggacctgctgcacagcatcctgagaagccccatgagcttcttcgagagaacccccagcggcaacctggtgaacagattcagcaaggagctggacaccgtggacagcatgatccccgaggtgatcaagatgttcatgggcagcctgttcaacgtgatcggcgcctgcatcgtgatcctgctggccacccccatcgccgccatcatcatcccccccctgggcctgatctacttcttcgtgcagagattctacgtggccagcagcagacagctgaagagactggagagcgtgagcagaagccccgtgtacagccacttcaacgagaccctgctgggcgtgagcgtgatcagagccttcgaggagcaggagagattcatccaccagagcgacctgaaggtggacgagaaccagaaggcctactaccccagcatcgtggccaacagatggctggccgtgagactggagtgcgtgggcaactgcatcgtgctgttcgccgccctgttcgccgtgatcagcagacacagcctgagcgccggcctggtgggcctgagcgtgagctacagcctgcaggtgaccacctacctgaactggctggtgagaatgagcagcgagatggagaccaacatcgtggccgtggagagactgaaggagtacagcgagaccgagaaggaggccccctggcagatccaggagaccgccccccccagcagctggccccaggtgggcagagtggagttcagaaactactgcctgagatacagagaggacctggacttcgtgctgagacacatcaacgtgaccatcaacggcggcgagaaggtgggcatcgtgggcagaaccggcgccggcaagagcagcctgaccctgggcctgttcagaatcaacgagagcgccgagggcgagatcatcatcgacggcatcaacatcgccaagatcggcctgcacgacctgagattcaagatcaccatcatcccccaggaccccgtgctgttcagcggcagcctgagaatgaacctggaccccttcagccagtacagcgacgaggaggtgtggaccagcctggagctggcccacctgaaggacttcgtgagcgccctgcccgacaagctggaccacgagtgcgccgagggcggcgagaacctgagagtgatcgtgctggacaagggcgagatccaggagtacggcgcccccagcgacctgctgcagcagagaggcctgttctacagcatggccaaggacgccggcctggtgtag

SEQ ID NO: 9449 - DNA, 4428 bp, synthetic construct
  misc_feature 1..4428: note = Description of Artificial Sequence: Synthetic coding sequence
  source 1..4428: mol_type = other DNA
atggccctgagaggcttctgcagcgccgacggcagcgaccccctgtgggactggaacgtgacctggaacaccagcaaccccgacttcaccaagtgcttccagaacaccgtgctggtgtgggtgccctgcttctacctgtgggcctgcttccccttctacttcctgtacctgagcagacacgacagaggctacatccagatgacccccctgaacaagaccaagaccgccctgggcttcctgctgtggatcgtgtgctgggccgacctgttctacagcttctgggagagaagcagaggcatcttcctggcccccgtgttcctggtgagccccaccctgctgggcatcaccatgctgctggccaccttcctgatccagctggagagaagaaagggcgtgcagagcagcggcatcatgctgaccttctggctggtggccctggtgtgcgccctggccatcctgagaagcaagatcatgaccgccctgaaggaggacgcccaggtggacctgttcagagacatcaccttctacgtgtacttcagcctgctgctgatccagctggtgctgagctgcttcagcgacagaagccccctgttcagcgagaccatccacgaccccaacccctgccccgagagcagcgccagcttcctgagcagaatcaccttctggtggatcaccggcctgatcgtgagaggctacagacagcccctggagggcagcgacctgtggagcctgaacaaggaggacaccagcgagcaggtggtgcccgtgctggtgaagaactggaagaaggagtgcgccaagaccagaaagcagcccgtgaaggtggtgtacagcagcaaggaccccgcccagcccaaggagagcagcaaggtggacgccaacgaggaggtggaggccctgatcgtgaagagcccccagaaggagtggaaccccagcctgttcaaggtgctgtacaagaccttcggcccctacttcctgatgagcttcttcttcaaggccatccacgacctgatgatgttcagcggcccccagatcctgaagctgctgatcaagttcgtgaacgacaccaaggcccccgactggcagggctacttctacaccgtgctgctgttcgtgaccgcctgcctgcagaccctggtgctgcaccagtacttccacatctgcttcgtgagcggcatgagaatcaagaccgccgtgatcggcgccgtgtacagaaaggccctggtgatcaccaacagcgccagaaagagcagcaccgtgggcgagatcgtgaacctgatgagcgtggacgcccagagattcatggacctggccacctacatcaacatgatctggagcgcccccctgcaggtgatcctggccctgtacctgctgtggctgaacctgggccccagcgtgctggccggcgtggccgtgatggtgctgatggtgcccgtgaacgccgtgatggccatgaagaccaagacctaccaggtggcccacatgaagagcaaggacaacagaatcaagctgatgaacgagatcctgaacggcatcaaggtgctgaagctgtacgcctgggagctggccttcaaggacaaggtgctggccatcagacaggaggagctgaaggtgctgaagaagagcgcctacctgagcgccgtgggcaccttcacctgggtgtgcacccccttcctggtggccctgtgcaccttcgccgtgtacgtgaccatcgacgagaacaacatcctggacgcccagaccgccttcgtgagcctggccctgttcaacatcctgagattccccctgaacatcctgcccatggtgatcagcagcatcgtgcaggccagcgtgagcctgaagagactgagaatcttcctgagccacgaggagctggagcccgacagcatcgagagaagacccgtgaaggacggcggcggcaccaacagcatcaccgtgagaaacgccaccttcacctgggccagaagcgacccccccaccctgaacggcatcaccttcagcatccccgagggcgccctggtggccgtggtgggccaggtgggctgcggcaagagcagcctgctgagcgccctgctggccgagatggacaaggtggagggccacgtggccatcaagggcagcgtggcctacgtgccccagcaggcctggatccagaacgacagcctgagagagaacatcctgttcggctgccagctggaggagccctactacagaagcgtgatccaggcctgcgccctgctgcccgacctggagatcctgcccagcggcgacagaaccgagatcggcgagaagaccagaatcctggtgacccacagcatgagctacctgccccaggtggacgtgatcatcgtgatgagcggcggcaagatcagcgagatgggcagctaccaggagctgctggccagagacggcgccttcgccgagttcctgagaacctacgccagcaccgagcaggagcaggacgccgaggagaacggcgtgaccggcgtgagcggccccggcaaggaggccaagcagatggagaacggcatgctggtgaccgacagcgccggcaagcagctgcagagacagctgagcagcagcagcagctacagcggcgacatcagcagacaccacaacagcaccgccgagctgcagaaggccgaggccaagaaggaggagacctggaagctgatggaggccgacaaggcccagaccggccaggtgaagctgagcgtgtactgggactacatgaaggccatcggcctgttcatcagcttcctgagcatcttcctgttcatgtgcaaccacgtgagcgccctggccagcaactactggctgagcctgtggaccgacgaccccatcgtgaacggcacccaggagcacaccaaggtgagactgagcgtgtacggcgccctgggcatcagccagggcatcgccgtgttcggctacagcatggccgtgagcatcggcggcatcctggccagcagatgcctgcacgtggacctgctgcacagcatcctgagaagccccatgagcttcttcgagagaacccccagcggcaacctggtgaacagattcagcaaggagctggacaccgtggacagcatgatccccgaggtgatcaagatgttcatgggcagcctgttcaacgtgatcggcgcctgcatcgtgatcctgctggccacccccatcgccgccatcatcatcccccccctgggcctgatctacttcttcgtgcagagattctacgtggccagcagcagacagctgaagagactggagagcgtgagcagaagccccgtgtacagccacttcaacgagaccctgctgggcgtgagcgtgatcagagccttcgaggagcaggagagattcatccaccagagcgacctgaaggtggacgagaaccagaaggcctactaccccagcatcgtggccaacagatggctggccgtgagactggagtgcgtgggcaactgcatcgtgctgttcgccgccctgttcgccgtgatcagcagacacagcctgagcgccggcctggtgggcctgagcgtgagctacagcctgcaggtgaccacctacctgaactggctggtgagaatgagcagcgagatggagaccaacatcgtggccgtggagagactgaaggagtacagcgagaccgagaaggaggccccctggcagatccaggagaccgccccccccagcagctggccccaggtgggcagagtggagttcagaaactactgcctgagatacagagaggacctggacttcgtgctgagacacatcaacgtgaccatcaacggcggcgagaaggtgggcatcgtgggcagaaccggcgccggcaagagcagcctgaccctgggcctgttcagaatcaacgagagcgccgagggcgagatcatcatcgacggcatcaacatcgccaagatcggcctgcacgacctgagattcaagatcaccatcatcccccaggaccccgtgctgttcagcggcagcctgagaatgaacctggaccccttcagccagtacagcgacgaggaggtgtggaccagcctggagctggcccacctgaaggacttcgtgagcgccctgcccgacaagctggaccacgagtgcgccgagggcggcgagaacctgagcgtgggccagagacagctggtgtgcctggccagagccctgctgagaaagaccaagatcctggtgctggacgaggccaccgccgccgtggacctggagaccgacgacctgatccagagcaccatcagaacccagttcgaggactgcaccgtgctgaccatcgcccacagactgaacaccatcatggactacaccagagtgatcgtgctggacaagggcgagatccaggagtacggcgcccccagcgacctgctgcagcagagaggcctgttctacagcatggccaaggacgccggcctggtgtag

SEQ ID NO: 9450 - DNA, 4251 bp, synthetic construct
  misc_feature 1..4251: note = Description of Artificial Sequence: Synthetic coding sequence
  source 1..4251: mol_type = other DNA
atggccctgagaggcttctgcagcgccgacggcagcgaccccctgtgggactggaacgtgacctggaacaccagcaaccccgacttcaccaagtgcttccagaacaccgtgctggtgtgggtgccctgcttctacctgtgggcctgcttccccttctacttcctgtacctgagcagacacgacagaggctacatccagatgacccccctgaacaagaccaagaccgccctgggcttcctgctgtggatcgtgtgctgggccgacctgttctacagcttctgggagagaagcagaggcatcttcctggcccccgtgttcctggtgagccccaccctgctgggcatcaccatgctgctggccaccttcctgatccagctggagagaagaaagggcgtgcagagcagcggcatcatgctgaccttctggctggtggccctggtgtgcgccctggccatcctgagaagcaagatcatgaccgccctgaaggaggacgcccaggtggacctgttcagagacatcaccttctacgtgtacttcagcctgctgctgatccagctggtgctgagctgcttcagcgacagaagccccctgttcagcgagaccatccacgaccccaacccctgccccgagagcagcgccagcttcctgagcagaatcaccttctggtggatcaccggcctgatcgtgagaggctacagacagcccctggagggcagcgacctgtggagcctgaacaaggaggacaccagcgagcaggtggtgcccgtgctggtgaagaactggaagaaggagtgcgccaagaccagaaagcagcccgtgaaggtggtgtacagcagcaaggaccccgcccagcccaaggagagcagcaaggtggacgccaacgaggaggtggaggccctgatcgtgaagagcccccagaaggagtggaaccccagcctgttcaaggtgctgtacaagaccttcggcccctacttcctgatgagcttcttcttcaaggccatccacgacctgatgatgttcagcggcccccagatcctgaagctgctgatcaagttcgtgaacgacaccaaggcccccgactggcagggctacttctacaccgtgctgctgttcgtgaccgcctgcctgcagaccctggtgctgcaccagtacttccacatctgcttcgtgagcggcatgagaatcaagaccgccgtgatcggcgccgtgtacagaaaggccctggtgatcaccaacagcgccagaaagagcagcaccgtgggcgagatcgtgaacctgatgagcgtggacgcccagagattcatggacctggccacctacatcaacatgatctggagcgcccccctgcaggtgatcctggccctgtacctgctgtggctgaacctgggccccagcgtgctggccggcgtggccgtgatggtgctgatggtgcccgtgaacgccgtgatggccatgaagaccaagacctaccaggtggcccacatgaagagcaaggacaacagaatcaagctgatgaacgagatcctgaacggcatcaaggtgctgaagctgtacgcctgggagctggccttcaaggacaaggtgctggccatcagacaggaggagctgaaggtgctgaagaagagcgcctacctgagcgccgtgggcaccttcacctgggtgtgcacccccttcctggtggccctgtgcaccttcgccgtgtacgtgaccatcgacgagaacaacatcctggacgcccagaccgccttcgtgagcctggccctgttcaacatcctgagattccccctgaacatcctgcccatggtgatcagcagcatcgtgcaggccagcgtgagcctgaagagactgagaatcttcctgagccacgaggagctggagcccgacagcatcgagagaagacccgtgaaggacggcggcggcaccaacagcatcaccgtgagaaacgccaccttcacctgggccagaagcgacccccccaccctgaacggcatcaccttcagcatccccgagggcgccctggtggccgtggtgggccaggtgggctgcggcaagagcagcctgctgagcgccctgctggccgagatggacaaggtggagggccacgtggccatcaagaccagaatcctggtgacccacagcatgagctacctgccccaggtggacgtgatcatcgtgatgagcggcggcaagatcagcgagatgggcagctaccaggagctgctggccagagacggcgccttcgccgagttcctgagaacctacgccagcaccgagcaggagcaggacgccgaggagaacggcgtgaccggcgtgagcggccccggcaaggaggccaagcagatggagaacggcatgctggtgaccgacagcgccggcaagcagctgcagagacagctgagcagcagcagcagctacagcggcgacatcagcagacaccacaacagcaccgccgagctgcagaaggccgaggccaagaaggaggagacctggaagctgatggaggccgacaaggcccagaccggccaggtgaagctgagcgtgtactgggactacatgaaggccatcggcctgttcatcagcttcctgagcatcttcctgttcatgtgcaaccacgtgagcgccctggccagcaactactggctgagcctgtggaccgacgaccccatcgtgaacggcacccaggagcacaccaaggtgagactgagcgtgtacggcgccctgggcatcagccagggcatcgccgtgttcggctacagcatggccgtgagcatcggcggcatcctggccagcagatgcctgcacgtggacctgctgcacagcatcctgagaagccccatgagcttcttcgagagaacccccagcggcaacctggtgaacagattcagcaaggagctggacaccgtggacagcatgatccccgaggtgatcaagatgttcatgggcagcctgttcaacgtgatcggcgcctgcatcgtgatcctgctggccacccccatcgccgccatcatcatcccccccctgggcctgatctacttcttcgtgcagagattctacgtggccagcagcagacagctgaagagactggagagcgtgagcagaagccccgtgtacagccacttcaacgagaccctgctgggcgtgagcgtgatcagagccttcgaggagcaggagagattcatccaccagagcgacctgaaggtggacgagaaccagaaggcctactaccccagcatcgtggccaacagatggctggccgtgagactggagtgcgtgggcaactgcatcgtgctgttcgccgccctgttcgccgtgatcagcagacacagcctgagcgccggcctggtgggcctgagcgtgagctacagcctgcaggtgaccacctacctgaactggctggtgagaatgagcagcgagatggagaccaacatcgtggccgtggagagactgaaggagtacagcgagaccgagaaggaggccccctggcagatccaggagaccgccccccccagcagctggccccaggtgggcagagtggagttcagaaactactgcctgagatacagagaggacctggacttcgtgctgagacacatcaacgtgaccatcaacggcggcgagaaggtgggcatcgtgggcagaaccggcgccggcaagagcagcctgaccctgggcctgttcagaatcaacgagagcgccgagggcgagatcatcatcgacggcatcaacatcgccaagatcggcctgcacgacctgagattcaagatcaccatcatcccccaggaccccgtgctgttcagcggcagcctgagaatgaacctggaccccttcagccagtacagcgacgaggaggtgtggaccagcctggagctggcccacctgaaggacttcgtgagcgccctgcccgacaagctggaccacgagtgcgccgagggcggcgagaacctgagcgtgggccagagacagctggtgtgcctggccagagccctgctgagaaagaccaagatcctggtgctggacgaggccaccgccgccgtggacctggagaccgacgacctgatccagagcaccatcagaacccagttcgaggactgcaccgtgctgaccatcgcccacagactgaacaccatcatggactacaccagagtgatcgtgctggacaagggcgagatccaggagtacggcgcccccagcgacctgctgcagcagagaggcctgttctacagcatggccaaggacgccggcctggtgtag

SEQ ID NO: 9451 - DNA, 4419 bp, synthetic construct
  misc_feature 1..4419: note = Description of Artificial Sequence: Synthetic coding sequence
  source 1..4419: mol_type = other DNA
atggccctgagaggcttctgcagcgccgacggcagcgaccccctgtgggactggaacgtgacctggaacaccagcaaccccgacttcaccaagtgcttccagaacaccgtgctggtgtgggtgccctgcttctacctgtgggcctgcttccccttctacttcctgtacctgagcagacacgacagaggctacatccagatgacccccctgaacaagaccaagaccgccctgggcttcctgctgtggatcgtgtgctgggccgacctgttctacagcttctgggagagaagcagaggcatcttcctggcccccgtgttcctggtgagccccaccctgctgggcatcaccatgctgctggccaccttcctgatccagctggagagaagaaagggcgtgcagagcagcggcatcatgctgaccttctggctggtggccctggtgtgcgccctggccatcctgagaagcaagatcatgaccgccctgaaggaggacgcccaggtggacctgttcagagacatcaccttctacgtgtacttcagcctgctgctgatccagctggtgctgagctgcttcagcgacagaagccccctgttcagcgagaccatccacgaccccaacccctgccccgagagcagcgccagcttcctgagcagaatcaccttctggtggatcaccggcctgatcgtgagaggctacagacagcccctggagggcagcgacctgtggagcctgaacaaggaggacaccagcgagcaggtggtgcccgtgctggtgaagaactggaagaaggagtgcgccaagaccagaaagcagcccgtgaaggtggtgtacagcagcaaggaccccgcccagcccaaggagagcagcaaggtggacgccaacgaggaggtggaggccctgatcgtgaagagcccccagaaggagtggaaccccagcctgttcaaggtgctgtacaagaccttcggcccctacttcctgatgagcttcttcttcaaggccatccacgacctgatgatgttcagcggcccccagatcctgaagctgctgatcaagttcgtgaacgacaccaaggcccccgactggcagggctacttctacaccgtgctgctgttcgtgaccgcctgcctgcagaccctggtgctgcaccagtacttccacatctgcttcgtgagcggcatgagaatcaagaccgccgtgatcggcgccgtgtacagaaaggccctggtgatcaccaacagcgccagaaagagcagcaccgtgggcgagatcgtgaacctgatgagcgtggacgcccagagattcatggacctggccacctacatcaacatgatctggagcgcccccctgcaggtgatcctggccctgtacctgctgtggctgaacctgggccccagcgtgctggccggcgtggccgtgatggtgctgatggtgcccgtgaacgccgtgatggccatgaagaccaagacctaccaggtggcccacatgaagagcaaggacaacagaatcaagctgatgaacgagatcctgaacggcatcaaggtgctgaagctgtacgcctgggagctggccttcaaggacaaggtgctggccatcagacaggaggagctgaaggtgctgaagaagagcgcctacctgagcgccgtgggcaccttcacctgggtgtgcacccccttcctggtggccctgtgcaccttcgccgtgtacgtgaccatcgacgagaacaacatcctggacgcccagaccgccttcgtgagcctggccctgttcaacatcctgagattccccctgaacatcctgcccatggtgatcagcagcatcgtgcaggccagcgtgagcctgaagagactgagaatcttcctgagccacgaggagctggagcccgacagcatcgagagaagacccgtgaaggacggcggcggcaccaacagcatcaccgtgagaaacgccaccttcacctgggccagaagcgacccccccaccctgaacggcatcaccttcagcatccccgagggcgccctggtggccgtggtgggccaggtgggctgcggcaagagcagcctgctgagcgccctgctggccgagatggacaaggtggagggccacgtggccatcaagggcgtgaacctgagcggcggccagaagcagagagtgagcctggccagagccgtgtacagcaacgccgacatctacctgttcgacgaccccctgagcgccgtggacgcccacgtgggcaagcacatcttcgagaacgtgatcggccccaagggcatgctgaagaacaagaccagaatcctggtgacccacagcatgagctacctgccccaggtggacgtgatcatcgtgatgagcggcggcaagatcagcgagatgggcagctaccaggagctgctggccagagacggcgccttcgccgagttcctgagaacctacgccagcaccgagcaggagcaggacgccgaggagaacggcgtgaccggcgtgagcggccccggcaaggaggccaagcagatggagaacggcatgctggtgaccgacagcgccggcaagcagctgcagagacagctgagcagcagcagcagctacagcggcgacatcagcagacaccacaacagcaccgccgagctgcagaaggccgaggccaagaaggaggagacctggaagctgatggaggccgacaaggcccagaccggccaggtgaagctgagcgtgtactgggactacatgaaggccatcggcctgttcatcagcttcctgagcatcttcctgttcatgtgcaaccacgtgagcgccctggccagcaactactggctgagcctgtggaccgacgaccccatcgtgaacggcacccaggagcacaccaaggtgagactgagcgtgtacggcgccctgggcatcagccagggcatcgccgtgttcggctacagcatggccgtgagcatcggcggcatcctggccagcagatgcctgcacgtggacctgctgcacagcatcctgagaagccccatgagcttcttcgagagaacccccagcggcaacctggtgaacagattcagcaaggagctggacaccgtggacagcatgatccccgaggtgatcaagatgttcatgggcagcctgttcaacgtgatcggcgcctgcatcgtgatcctgctggccacccccatcgccgccatcatcatcccccccctgggcctgatctacttcttcgtgcagagattctacgtggccagcagcagacagctgaagagactggagagcgtgagcagaagccccgtgtacagccacttcaacgagaccctgctgggcgtgagcgtgatcagagccttcgaggagcaggagagattcatccaccagagcgacctgaaggtggacgagaaccagaaggcctactaccccagcatcgtggccaacagatggctggccgtgagactggagtgcgtgggcaactgcatcgtgctgttcgccgccctgttcgccgtgatcagcagacacagcctgagcgccggcctggtgggcctgagcgtgagctacagcctgcaggtgaccacctacctgaactggctggtgagaatgagcagcgagatggagaccaacatcgtggccgtggagagactgaaggagtacagcgagaccgagaaggaggccccctggcagatccaggagaccgccccccccagcagctggccccaggtgggcagagtggagttcagaaactactgcctgagatacagagaggacctggacttcgtgctgagacacatcaacgtgaccatcaacggcggcgagaaggtgggcatcgtgggcagaaccggcgccggcaagagcagcctgaccctgggcctgttcagaatcaacgagagcgccgagggcgagatcatcatcgacggcatcaacatcgccaagatcggcctgcacgacctgagattcaagatcaccatcatcccccaggaccccgtgctgttcagcggcagcctgagaatgaacctggaccccttcagccagtacagcgacgaggaggtgtggaccagcctggagctggcccacctgaaggacttcgtgagcgccctgcccgacaagctggaccacgagtgcgccgagggcggcgagaacctgagcgtgggccagagacagctggtgtgcctggccagagccctgctgagaaagaccaagatcctggtgctggacgaggccaccgccgccgtggacctggagaccgacgacctgatccagagcaccatcagaacccagttcgaggactgcaccgtgctgaccatcgcccacagactgaacaccatcatggactacaccagagtgatcgtgctggacaagggcgagatccaggagtacggcgcccccagcgacctgctgcagcagagaggcctgttctacagcatggccaaggacgccggcctggtgtag

SEQ ID NO: 9452 - DNA, 4626 bp, synthetic construct
  misc_feature 1..4626: note = Description of Artificial Sequence: Synthetic coding sequence
  source 1..4626: mol_type = other DNA
atggccctgagaggcttctgcagcgccgacggcagcgaccccctgtgggactggaacgtgacctggaacaccagcaaccccgacttcaccaagtgcttccagaacaccgtgctggtgtgggtgccctgcttctacctgtgggcctgcttccccttctacttcctgtacctgagcagacacgacagaggctacatccagatgacccccctgaacaagaccaagaccgccctgggcttcctgctgtggatcgtgtgctgggccgacctgttctacagcttctgggagagaagcagaggcatcttcctggcccccgtgttcctggtgagccccaccctgctgggcatcaccatgctgctggccaccttcctgatccagctggagagaagaaagggcgtgcagagcagcggcatcatgctgaccttctggctggtggccctggtgtgcgccctggccatcctgagaagcaagatcatgaccgccctgaaggaggacgcccaggtggacctgttcagagacatcaccttctacgtgtacttcagcctgctgctgatccagctggtgctgagctgcttcagcgacagaagccccctgttcagcgagaccatccacgaccccaacccctgccccgagagcagcgccagcttcctgagcagaatcaccttctggtggatcaccggcctgatcgtgagaggctacagacagcccctggagggcagcgacctgtggagcctgaacaaggaggacaccagcgagcaggtggtgcccgtgctggtgaagaactggaagaaggagtgcgccaagaccagaaagcagcccgtgaaggtggtgtacagcagcaaggaccccgcccagcccaaggagagcagcaaggtggacgccaacgaggaggtggaggccctgatcgtgaagagcccccagaaggagtggaaccccagcctgttcaaggtgctgtacaagaccttcggcccctacttcctgatgagcttcttcttcaaggccatccacgacctgatgatgttcagcggcccccagatcctgaagctgctgatcaagttcgtgaacgacaccaaggcccccgactggcagggctacttctacaccgtgctgctgttcgtgaccgcctgcctgcagaccctggtgctgcaccagtacttccacatctgcttcgtgagcggcatgagaatcaagaccgccgtgatcggcgccgtgtacagaaaggccctggtgatcaccaacagcgccagaaagagcagcaccgtgggcgagatcgtgaacctgatgagcgtggacgcccagagattcatggacctggccacctacatcaacatgatctggagcgcccccctgcaggtgatcctggccctgtacctgctgtggctgaacctgggccccagcgtgctggccggcgtggccgtgatggtgctgatggtgcccgtgaacgccgtgatggccatgaagaccaagacctaccaggtggcccacatgaagagcaaggacaacagaatcaagctgatgaacgagatcctgaacggcatcaaggtgctgaagctgtacgcctgggagctggccttcaaggacaaggtgctggccatcagacaggaggagctgaaggtgctgaagaagagcgcctacctgagcgccgtgggcaccttcacctgggtgtgcacccccttcctggtggccctgtgcaccttcgccgtgtacgtgaccatcgacgagaacaacatcctggacgcccagaccgccttcgtgagcctggccctgttcaacatcctgagattccccctgaacatcctgcccatggtgatcagcagcatcgtgcaggccagcgtgagcctgaagagactgagaatcttcctgagccacgaggagctggagcccgacagcatcgagagaagacccgtgaaggacggcggcggcaccaacagcatcaccgtgagaaacgccaccttcacctgggccagaagcgacccccccaccctgaacggcatcaccttcagcatccccgagggcgccctggtggccgtggtgggccaggtgggctgcggcaagagcagcctgctgagcgccctgctggccgagatggacaaggtggagggccacgtggccatcaagggcagcgtggcctacgtgccccagcaggcctggatccagaacgacagcctgagagagaacatcctgttcggctgccagctggaggagccctactacagaagcgtgatccaggcctgcgccctgctgcccgacctggagatcctgcccagcggcgacagaaccgagatcggcgagaagggcgtgaacctgagcggcggccagaagcagagagtgagcctggccagagccgtgtacagcaacgccgacatctacctgttcgacgaccccctgagcgccgtggacgcccacgtgggcaagcacatcttcgagaacgtgatcggccccaagggcatgctgaagaacaagaccagaatcctggtgacccacagcatgagctacctgccccaggtggacgtgatcatcgtgatgagcggcggcaagatcagcgagatgggcagctaccaggagctgctggccagagacggcgccttcgccgagttcctgagaacctacgccagcaccgagcaggagcaggacgccgaggagaacggcagcaccgtgatggacgaggaggaggccggcgtgaccggcgtgagcggccccggcaaggaggccaagcagatggagaacggcatgctggtgaccgacagcgccggcaagcagctgcagagacagctgagcagcagcagcagctacagcggcgacatcagcagacaccacaacagcaccgccgagctgcagaaggccgaggccaagaaggaggagacctggaagctgatggaggccgacaaggcccagaccggccaggtgaagctgagcgtgtactgggactacatgaaggccatcggcctgttcatcagcttcctgagcatcttcctgttcatgtgcaaccacgtgagcgccctggccagcaactactggctgagcctgtggaccgacgaccccatcgtgaacggcacccaggagcacaccaaggtgagactgagcgtgtacggcgccctgggcatcagccagggcatcgccgtgttcggctacagcatggccgtgagcatcggcggcatcctggccagcagatgcctgcacgtggacctgctgcacagcatcctgagaagccccatgagcttcttcgagagaacccccagcggcaacctggtgaacagattcagcaaggagctggacaccgtggacagcatgatccccgaggtgatcaagatgttcatgggcagcctgttcaacgtgatcggcgcctgcatcgtgatcctgctggccacccccatcgccgccatcatcatcccccccctgggcctgatctacttcttcgtgcagagattctacgtggccagcagcagacagctgaagagactggagagcgtgagcagaagccccgtgtacagccacttcaacgagaccctgctgggcgtgagcgtgatcagagccttcgaggagcaggagagattcatccaccagagcgacctgaaggtggacgagaaccagaaggcctactaccccagcatcgtggccaacagatggctggccgtgagactggagtgcgtgggcaactgcatcgtgctgttcgccgccctgttcgccgtgatcagcagacacagcctgagcgccggcctggtgggcctgagcgtgagctacagcctgcaggtgaccacctacctgaactggctggtgagaatgagcagcgagatggagaccaacatcgtggccgtggagagactgaaggagtacagcgagaccgagaaggaggccccctggcagatccaggagaccgccccccccagcagctggccccaggtgggcagagtggagttcagaaactactgcctgagatacagagaggacctggacttcgtgctgagacacatcaacgtgaccatcaacggcggcgagaaggtgggcatcgtgggcagaaccggcgccggcaagagcagcctgaccctgggcctgttcagaatcaacgagagcgccgagggcgagatcatcatcgacggcatcaacatcgccaagatcggcctgcacgacctgagattcaagatcaccatcatcccccaggaccccgtgctgttcagcggcagcctgagaatgaacctggaccccttcagccagtacagcgacgaggaggtgtggaccagcctggagctggcccacctgaaggacttcgtgagcgccctgcccgacaagctggaccacgagtgcgccgagggcggcgagaacctgagcgtgggccagagacagctggtgtgcctggccagagccctgctgagaaagaccaagatcctggtgctggacgaggccaccgccgccgtggacctggagaccgacgacctgatccagagcaccatcagaacccagttcgaggactgcaccgtgctgaccatcgcccacagactgaacaccatcatggactacaccagagtgatcgtgctggacaagggcgagatccaggagtacggcgcccccagcgacctgctgcagcagagaggcctgttctacagcatggccaaggacgccggcctggtgtag

SEQ ID NO: 9453 - DNA, 4596 bp, synthetic construct
  misc_feature 1..4596: note = Description of Artificial Sequence: Synthetic coding sequence
  source 1..4596: mol_type = other DNA
atggccctgagaggcttctgcagcgccgacggcagcgaccccctgtgggactggaacgtgacctggaacaccagcaaccccgacttcaccaagtgcttccagaacaccgtgctggtgtgggtgccctgcttctacctgtgggcctgcttccccttctacttcctgtacctgagcagacacgacagaggctacatccagatgacccccctgaacaagaccaagaccgccctgggcttcctgctgtggatcgtgtgctgggccgacctgttctacagcttctgggagagaagcagaggcatcttcctggcccccgtgttcctggtgagccccaccctgctgggcatcaccatgctgctggccaccttcctgatccagctggagagaagaaagggcgtgcagagcagcggcatcatgctgaccttctggctggtggccctggtgtgcgccctggccatcctgagaagcaagatcatgaccgccctgaaggaggacgcccaggtggacctgttcagagacatcaccttctacgtgtacttcagcctgctgctgatccagctggtgctgagctgcttcagcgacagaagccccctgttcagcgagaccatccacgaccccaacccctgccccgagagcagcgccagcttcctgagcagaatcaccttctggtggatcaccggcctgatcgtgagaggctacagacagcccctggagggcagcgacctgtggagcctgaacaaggaggacaccagcgagcaggtggtgcccgtgctggtgaagaactggaagaaggagtgcgccaagaccagaaagcagcccgtgaaggtggtgtacagcagcaaggaccccgcccagcccaaggagagcagcaaggtggacgccaacgaggaggtggaggccctgatcgtgaagagcccccagaaggagtggaaccccagcctgttcaaggtgctgtacaagaccttcggcccctacttcctgatgagcttcttcttcaaggccatccacgacctgatgatgttcagcggcccccagatcctgaagctgctgatcaagttcgtgaacgacaccaaggcccccgactggcagggctacttctacaccgtgctgctgttcgtgaccgcctgcctgcagaccctggtgctgcaccagtacttccacatctgcttcgtgagcggcatgagaatcaagaccgccgtgatcggcgccgtgtacagaaaggccctggtgatcaccaacagcgccagaaagagcagcaccgtgggcgagatcgtgaacctgatgagcgtggacgcccagagattcatggacctggccacctacatcaacatgatctggagcgcccccctgcaggtgatcctggccctgtacctgctgtggctgaacctgggccccagcgtgctggccggcgtggccgtgatggtgctgatggtgcccgtgaacgccgtgatggccatgaagaccaagacctaccaggtggcccacatgaagagcaaggacaacagaatcaagctgatgaacgagatcctgaacggcatcaaggtgctgaagctgtacgcctgggagctggccttcaaggacaaggtgctggccatcagacaggaggagctgaaggtgctgaagaagagcgcctacctgagcgccgtgggcaccttcacctgggtgtgcacccccttcctggtggccctgtgcaccttcgccgtgtacgtgaccatcgacgagaacaacatcctggacgcccagaccgccttcgtgagcctggccctgttcaacatcctgagattccccctgaacatcctgcccatggtgatcagcagcatcgtgcaggccagcgtgagcctgaagagactgagaatcttcctgagccacgaggagctggagcccgacagcatcgagagaagacccgtgaaggacggcggcggcaccaacagcatcaccgtgagaaacgccaccttcacctgggccagaagcgacccccccaccctgaacggcatcaccttcagcatccccgagggcgccctggtggccgtggtgggccaggtgggctgcggcaagagcagcctgctgagcgccctgctggccgagatggacaaggtggagggccacgtggccatcaagggcagcgtggcctacgtgccccagcaggcctggatccagaacgacagcctgagagagaacatcctgttcggctgccagctggaggagccctactacagaagcgtgatccaggcctgcgccctgctgcccgacctggagatcctgcccagcggcgacagaaccgagatcggcgagaagggcgtgaacctgagcggcggccagaagcagagagtgagcctggccagagccgtgtacagcaacgccgacatctacctgttcgacgaccccctgagcgccgtggacgcccacgtgggcaagcacatcttcgagaacgtgatcggccccaagggcatgctgaagaacaagaccagaatcctggtgacccacagcatgagctacctgccccaggtggacgtgatcatcgtgatgagcggcggcaagatcagcgagatgggcagctaccaggagctgctggccagagacggcgccttcgccgagttcctgagaacctacgccagcaccgagcaggagcaggacgccgaggagaacggcgtgaccggcgtgagcggccccggcaaggaggccaagcagatggagaacggcatgctggtgaccgacagcgccggcaagcagctgcagagacagctgagcagcagcagcagctacagcggcgacatcagcagacaccacaacagcaccgccgagctgcagaaggccgaggccaagaaggaggagacctggaagctgatggaggccgacaaggcccagaccggccaggtgaagctgagcgtgtactgggactacatgaaggccatcggcctgttcatcagcttcctgagcatcttcctgttcatgtgcaaccacgtgagcgccctggccagcaactactggctgagcctgtggaccgacgaccccatcgtgaacggcacccaggagcacaccaaggtgagactgagcgtgtacggcgccctgggcatcagccagggcatcgccgtgttcggctacagcatggccgtgagcatcggcggcatcctggccagcagatgcctgcacgtggacctgctgcacagcatcctgagaagccccatgagcttcttcgagagaacccccagcggcaacctggtgaacagattcagcaaggagctggacaccgtggacagcatgatccccgaggtgatcaagatgttcatgggcagcctgttcaacgtgatcggcgcctgcatcgtgatcctgctggccacccccatcgccgccatcatcatcccccccctgggcctgatctacttcttcgtgcagagattctacgtggccagcagcagacagctgaagagactggagagcgtgagcagaagccccgtgtacagccacttcaacgagaccctgctgggcgtgagcgtgatcagagccttcgaggagcaggagagattcatccaccagagcgacctgaaggtggacgagaaccagaaggcctactaccccagcatcgtggccaacagatggctggccgtgagactggagtgcgtgggcaactgcatcgtgctgttcgccgccctgttcgccgtgatcagcagacacagcctgagcgccggcctggtgggcctgagcgtgagctacagcctgcaggtgaccacctacctgaactggctggtgagaatgagcagcgagatggagaccaacatcgtggccgtggagagactgaaggagtacagcgagaccgagaaggaggccccctggcagatccaggagaccgccccccccagcagctggccccaggtgggcagagtggagttcagaaactactgcctgagatacagagaggacctggacttcgtgctgagacacatcaacgtgaccatcaacggcggcgagaaggtgggcatcgtgggcagaaccggcgccggcaagagcagcctgaccctgggcctgttcagaatcaacgagagcgccgagggcgagatcatcatcgacggcatcaacatcgccaagatcggcctgcacgacctgagattcaagatcaccatcatcccccaggaccccgtgctgttcagcggcagcctgagaatgaacctggaccccttcagccagtacagcgacgaggaggtgtggaccagcctggagctggcccacctgaaggacttcgtgagcgccctgcccgacaagctggaccacgagtgcgccgagggcggcgagaacctgagcgtgggccagagacagctggtgtgcctggccagagccctgctgagaaagaccaagatcctggtgctggacgaggccaccgccgccgtggacctggagaccgacgacctgatccagagcaccatcagaacccagttcgaggactgcaccgtgctgaccatcgcccacagactgaacaccatcatggactacaccagagtgatcgtgctggacaagggcgagatccaggagtacggcgcccccagcgacctgctgcagcagagaggcctgttctacagcatggccaaggacgccggcctggtgtag

SEQ ID NO: 9454 - DNA, 3648 bp, synthetic construct
  misc_feature 1..3648: note = Description of Artificial Sequence: Synthetic coding sequence
  source 1..3648: mol_type = other DNA
atgagcttcttcttcaaggccatccacgacctgatgatgttcagcggcccccagatcctgaagctgctgatcaagttcgtgaacgacaccaaggcccccgactggcagggctacttctacaccgtgctgctgttcgtgaccgcctgcctgcagaccctggtgctgcaccagtacttccacatctgcttcgtgagcggcatgagaatcaagaccgccgtgatcggcgccgtgtacagaaaggccctggtgatcaccaacagcgccagaaagagcagcaccgtgggcgagatcgtgaacctgatgagcgtggacgcccagagattcatggacctggccacctacatcaacatgatctggagcgcccccctgcaggtgatcctggccctgtacctgctgtggctgaacctgggccccagcgtgctggccggcgtggccgtgatggtgctgatggtgcccgtgaacgccgtgatggccatgaagaccaagacctaccaggtggcccacatgaagagcaaggacaacagaatcaagctgatgaacgagatcctgaacggcatcaaggtgctgaagctgtacgcctgggagctggccttcaaggacaaggtgctggccatcagacaggaggagctgaaggtgctgaagaagagcgcctacctgagcgccgtgggcaccttcacctgggtgtgcacccccttcctggtggccctgtgcaccttcgccgtgtacgtgaccatcgacgagaacaacatcctggacgcccagaccgccttcgtgagcctggccctgttcaacatcctgagattccccctgaacatcctgcccatggtgatcagcagcatcgtgcaggccagcgtgagcctgaagagactgagaatcttcctgagccacgaggagctggagcccgacagcatcgagagaagacccgtgaaggacggcggcggcaccaacagcatcaccgtgagaaacgccaccttcacctgggccagaagcgacccccccaccctgaacggcatcaccttcagcatccccgagggcgccctggtggccgtggtgggccaggtgggctgcggcaagagcagcctgctgagcgccctgctggccgagatggacaaggtggagggccacgtggccatcaagggcagcgtggcctacgtgccccagcaggcctggatccagaacgacagcctgagagagaacatcctgttcggctgccagctggaggagccctactacagaagcgtgatccaggcctgcgccctgctgcccgacctggagatcctgcccagcggcgacagaaccgagatcggcgagaagggcgtgaacctgagcggcggccagaagcagagagtgagcctggccagagccgtgtacagcaacgccgacatctacctgttcgacgaccccctgagcgccgtggacgcccacgtgggcaagcacatcttcgagaacgtgatcggccccaagggcatgctgaagaacaagaccagaatcctggtgacccacagcatgagctacctgccccaggtggacgtgatcatcgtgatgagcggcggcaagatcagcgagatgggcagctaccaggagctgctggccagagacggcgccttcgccgagttcctgagaacctacgccagcaccgagcaggagcaggacgccgaggagaacggcagcaccgtgatggacgaggaggaggccggcgtgaccggcgtgagcggccccggcaaggaggccaagcagatggagaacggcatgctggtgaccgacagcgccggcaagcagctgcagagacagctgagcagcagcagcagctacagcggcgacatcagcagacaccacaacagcaccgccgagctgcagaaggccgaggccaagaaggaggagacctggaagctgatggaggccgacaaggcccagaccggccaggtgaagctgagcgtgtactgggactacatgaaggccatcggcctgttcatcagcttcctgagcatcttcctgttcatgtgcaaccacgtgagcgccctggccagcaactactggctgagcctgtggaccgacgaccccatcgtgaacggcacccaggagcacaccaaggtgagactgagcgtgtacggcgccctgggcatcagccagggcatcgccgtgttcggctacagcatggccgtgagcatcggcggcatcctggccagcagatgcctgcacgtggacctgctgcacagcatcctgagaagccccatgagcttcttcgagagaacccccagcggcaacctggtgaacagattcagcaaggagctggacaccgtggacagcatgatccccgaggtgatcaagatgttcatgggcagcctgttcaacgtgatcggcgcctgcatcgtgatcctgctggccacccccatcgccgccatcatcatcccccccctgggcctgatctacttcttcgtgcagagattctacgtggccagcagcagacagctgaagagactggagagcgtgagcagaagccccgtgtacagccacttcaacgagaccctgctgggcgtgagcgtgatcagagccttcgaggagcaggagagattcatccaccagagcgacctgaaggtggacgagaaccagaaggcctactaccccagcatcgtggccaacagatggctggccgtgagactggagtgcgtgggcaactgcatcgtgctgttcgccgccctgttcgccgtgatcagcagacacagcctgagcgccggcctggtgggcctgagcgtgagctacagcctgcaggtgaccacctacctgaactggctggtgagaatgagcagcgagatggagaccaacatcgtggccgtggagagactgaaggagtacagcgagaccgagaaggaggccccctggcagatccaggagaccgccccccccagcagctggccccaggtgggcagagtggagttcagaaactactgcctgagatacagagaggacctggacttcgtgctgagacacatcaacgtgaccatcaacggcggcgagaaggtgggcatcgtgggcagaaccggcgccggcaagagcagcctgaccctgggcctgttcagaatcaacgagagcgccgagggcgagatcatcatcgacggcatcaacatcgccaagatcggcctgcacgacctgagattcaagatcaccatcatcccccaggaccccgtgctgttcagcggcagcctgagaatgaacctggaccccttcagccagtacagcgacgaggaggtgtggaccagcctggagctggcccacctgaaggacttcgtgagcgccctgcccgacaagctggaccacgagtgcgccgagggcggcgagaacctgagcgtgggccagagacagctggtgtgcctggccagagccctgctgagaaagaccaagatcctggtgctggacgaggccaccgccgccgtggacctggagaccgacgacctgatccagagcaccatcagaacccagttcgaggactgcaccgtgctgaccatcgcccacagactgaacaccatcatggactacaccagagtgatcgtgctggacaagggcgagatccaggagtacggcgcccccagcgacctgctgcagcagagaggcctgttctacagcatggccaaggacgccggcctggtgtag

SEQ ID NO: 9455 - DNA, 1968 bp, synthetic construct
  misc_feature 1..1968: note = Description of Artificial Sequence: Synthetic coding sequence
  source 1..1968: mol_type = other DNA
atgagcagcagcaacgtggaggtgttcatccccgtgagccagggcaacaccaacggcttccccgccaccgccagcaacgacctgaaggccttcaccgagggcgccgtgctgagcttccacaacatctgctacagagtgaagctgaagagcggcttcctgccctgcagaaagcccgtggagaaggagatcctgagcaacatcaacggcatcatgaagcccggcctgaacgccatcctgggccccaccggcggcggcaagagcagcctgctggacgtgctggccgccagaaaggaccccagcggcctgagcggcgacgtgctgatcaacggcgcccccagacccgccaacttcaagtgcaacagcggctacgtggtgcaggacgacgtggtgatgggcaccctgaccgtgagagagaacctgcagttcagcgccgccctgagactggccaccaccatgaccaaccacgagaagaacgagagaatcaacagagtgatccaggagctgggcctggacaaggtggccgacagcaaggtgggcacccagttcatcagaggcgtgagcggcggcgagagaaagagaaccagcatcggcatggagctgatcaccgaccccagcatcctgttcctggacgagcccaccaccggcctggacagcagcaccgccaacgccgtgctgctgctgctgaagagaatgagcaagcagggcagaaccatcatcttcagcatccaccagcccagatacagcatcttcaagctgttcgacagcctgaccctgctggccagcggcagactgatgttccacggccccgcccaggaggccctgggctacttcgagagcgccggctaccactgcgaggcctacaacaaccccgccgacttcttcctggacatcatcaacggcgacagcaccgccgtggccctgaacagagaggaggacttcaaggccaccgagatcatcgagcccagcaagcaggacaagcccctgatcgagaagctggccgagatctacgtgaacagcagcttctacaaggagaccaaggccgagctgcaccagctgagcggcggcgagaagaagaagaagatcaccgtgttcaaggagatcagctacaccaccagcttctgccaccagctgagatgggtgagcaagagaagcttcaagaacctgctgggcaacccccaggccagcatcgcccagatcatcgtgaccgtggtgctgggcctggtgatcggcgccatctacttcggcctgaagaacgacagcaccggcatccagaacagagccggcgtgctgttcttcctgaccaccaaccagtgcttcagcagcgtgagcgccgtggagctgttcgtggtggagaagaagctgttcatccacgagtacatcagcggctactacagagtgagcagctacttcctgggcaagctgctgagcgacctgctgcccatgagaatgctgcccagcatcatcttcacctgcatcgtgtacttcatgctgggcctgaagcccaaggccgacgccttcttcgtgatgatgttcaccctgatgatggtggcctacagcgccagcagcatggccctggccatcgccgccggccagagcgtggtgagcgtggccaccctgctgatgaccatctgcttcgtgttcatgatgatcttcagcggcctgctggtgaacctgaccaccatcgccagctggctgagctggctgcagtacttcagcatccccagatacggcttcaccgccctgcagcacaacgagttcctgggccagaacttctgccccggcctgaacgccaccggcaacaacccctgcaactacgccacctgcaccggcgaggagtacctggtgaagcagggcatcgacctgagcccctggggcctgtggaagaaccacgtggccctggcctgcatgatcgtgatcttcctgaccatcgcctacctgaagctgctgttcctgaagaagtacagctag

SEQ ID NO: 9456 - DNA, 1836 bp, synthetic construct
  misc_feature 1..1836: note = Description of Artificial Sequence: Synthetic coding sequence
  source 1..1836: mol_type = other DNA
atgagcagcagcaacgtggaggtgttcatccccgtgagccagggcaacaccaacggcttccccgccaccgccagcaacgacctgaaggccttcaccgagggcgccgtgctgagcttccacaacatctgctacagagtgaagctgaagagcggcttcctgccctgcagaaagcccgtggagaaggagatcctgagcaacatcaacggcatcatgaagcccggcctgaacgccatcctgggccccaccggcggcggcaagagcagcctgctggacgtgctggccgccagaaaggaccccagcggcctgagcggcgacgtgctgatcaacggcgcccccagacccgccaacttcaagtgcaacagcggctacgtggtgcaggacgacgtggtgatgggcaccctgaccgtgagagagaacctgcagttcagcgccgccctgagactggccaccaccatgaccaaccacgagaagaacgagagaatcaacagagtgatccaggagctgggcctggacaaggtggccgacagcaaggtgggcacccagttcatcagaggcgtgagcggcggcgagagaaagagaaccagcatcggcatggagctgatcaccgaccccagcatcctgttcctggacgagcccaccaccggcctggacagcagcaccgccaacgccgtgctgctgctgctgaagagaatgagcaagcagggcagaaccatcatcttcagcatccaccagcccagatacagcatcttcaagctgttcgacagcctgaccctgctggccagcggcagactgatgttccacggccccgcccaggaggccctgggctacttcgagagcgccggctaccactgcgaggcctacaacaaccccgccgacttcttcctggacatcatcaacggcgacagcaccgccgtggccctgaacagagaggaggacttcaaggccaccgagatcatcgagcccagcaagcaggacaagcccctgatcgagaagctggccgagatctacgtgaacagcagcttctacaaggagaccaaggccgagctgcaccagctgagcggcggcgagaagaagaagaagatcaccgtgttcaaggagatcagctacaccaccagcttctgccaccagctgagatgggtgagcaagagaagcttcaagaacctgctgggcaacccccaggccagcatcgcccagatcatcgtgaccgtggtgctgggcctggtgatcggcgccatctacttcggcctgaagaacgacagcaccggcatccagaacagagccggcgtgctgttcttcctgaccaccaaccagtgcttcagcagcgtgagcgccgtggagctgttcgtggtggagaagaagctgttcatccacgagtacatcagcggctactacagagtgagcagctacttcctgggcaagctgctgagcgacctgctgcccatgagaatgctgcccagcatcatcttcacctgcatcgtgtacttcatgctgggcctgaagcccaaggccgacgccttcttcgtgatgatgttcaccctgatgatggtggcctacagcgccagcagcatggccctggccatcgccgccggccagagcgtggtgagcgtggccaccctgctgatgaccatctgcttcgtgttcatgatggtgtgctggagcatcagccagcccctgcacctgggctgccacggcttcagcaccagcgccttccacgacatggacctgagactgtgcagcatcatgaacttctgggacaagaccagcgcccaggacagcatgcagcaggagaccatcctggtgaccatgcagcacgtgctggccaagaacatctggtag

SEQ ID NO: 9457 - DNA, 1212 bp, synthetic construct
  misc_feature 1..1212: note = Description of Artificial Sequence: Synthetic coding sequence
  source 1..1212: mol_type = other DNA
atggacagaagcaaggagaactgcatcagcggccccgtgaaggccaccgcccccgtgggcggccccaagagagtgctggtgacccagcagttcccctgccagaaccccctgcccgtgaacagcggccaggcccagagagtgctgtgccccagcaacagcagccagagaatccccctgcaggcccagaagctggtgagcagccacaagcccgtgcagaaccagaagcagaagcagctgcaggccaccagcgtgccccaccccgtgagcagacccctgaacaacacccagaagagcaagcagcccctgcccagcgcccccgagaacaaccccgaggaggagctggccagcaagcagaagaacgaggagagcaagaagagacagtgggccctggaggacttcgagatcggcagacccctgggcaagggcaagttcggcaacgtgtacctggccagagagaagcagagcaagttcatcctggccctgaaggtgctgttcaaggcccagctggagaaggccggcgtggagcaccagctgagaagagaggtggagatccagagccacctgagacaccccaacatcctgagactgtacggctacttccacgacgccaccagagtgtacctgatcctggagtacgcccccctgggcaccgtgtacagagagctgcagaagctgagcaagttcgacgagcagagaaccgccacctacatcaccgagctggccaacgccctgagctactgccacagcaagagagtgatccacagagacatcaagcccgagaacctgctgctgggcagcgccggcgagctgaagatcgccgacttcggctggagcgtgcacgcccccagcagcagaagaaccaccctgtgcggcaccctggactacctgccccccgagatgatcgagggcagaatgcacgacgagaaggtggacctgtggagcctgggcgtgctgtgctacgagttcctggtgggcaagccccccttcgaggccaacacctaccaggagacctacaagagaatcagcagagtggagttcaccttccccgacttcgtgaccgagggcgccagagacctgatcagcagactgctgaagcacaaccccagccagagacccatgctgagagaggtgctggagcacccctggatcaccgccaacagcagcaagcccagcaactgccagaacaaggagagcgccagcaagcagagctag

SEQ ID NO: 9458 - DNA, 1212 bp, synthetic construct; identical to SEQ ID NO: 9457
  misc_feature 1..1212: note = Description of Artificial Sequence: Synthetic coding sequence
  source 1..1212: mol_type = other DNA

SEQ ID NO: 9459 - DNA, 1212 bp, synthetic construct; identical to SEQ ID NO: 9457
  misc_feature 1..1212: note = Description of Artificial Sequence: Synthetic coding sequence
  source 1..1212: mol_type = other DNA

SEQ ID NO: 9460 - DNA, 1044 bp, synthetic construct
  misc_feature 1..1044: note = Description of Artificial Sequence: Synthetic coding sequence
  source 1..1044: mol_type = other DNA
atggacagaagcaaggagaactgcatcagcggccccgtgaaggccaccgcccccgtgggcggccccaagagagtgctggtgacccagcagttcccctgccagaaccccctgcccgtgaacagcggccaggcccagagagtgctgtgccccagcaacagcagccagagaatccccctgcaggcccagaagctggtgagcagccacaagcccgtgcagaaccagaagcagaagcagctgcaggccaccagcgtgccccaccccgtgagcagacccctgaacaacacccagaagagcaagcagcccctgcccagcgcccccgagaacaaccccgaggaggagctggccagcaagcagaagaacgaggagagcaagaagagacagtgggccctggaggacttcgagatcggcagacccctgggcaagggcaagttcggcaacgtgtacctggccagagagaagcagagcaagttcatcctggccctgaaggtgctgttcaaggcccagctggagaaggccggcgtggagcaccagctgagaagagaggtggagatccagagccacctgagacaccccaacatcctgagactgtacggctacttccacgacgccaccagagtgtacctgatcctggagtacgcccccctgggcaccgtgtacagagagctgcagaagctgagcaagttcgacgagcagagaaccgccacctacatcaccgagctggccaacgccctgagctactgccacagcaagagagtgatccacagagacatcaagcccgagaacctgctgctgggcagcgccggcgagctgaagatcgccgacttcggctggagcgtgcacgcccccagcagcagaagaaccaccctgtgcggcaccctggactacctgccccccgagatgatcgagggcagaatgcacgacgagaaggtggacctgtggagcctgggcgtgctgtgctacgagttcctggtgggcaagccccccttcgaggccaacacctaccaggagacctacaagagaatcagcagagtgagaagaaactag

SEQ ID NO: 9461 - DNA, 1212 bp, synthetic construct; identical to SEQ ID NO: 9457
  misc_feature 1..1212: note = Description of Artificial Sequence: Synthetic coding sequence
  source 1..1212: mol_type = other DNA

SEQ ID NO: 9462 - DNA, 1212 bp, synthetic construct; identical to SEQ ID NO: 9457
  misc_feature 1..1212: note = Description of Artificial Sequence: Synthetic coding sequence
  source 1..1212: mol_type = other DNA

SEQ ID NO: 9463 - DNA, 1212 bp, synthetic construct; identical to SEQ ID NO: 9457
  misc_feature 1..1212: note = Description of Artificial Sequence: Synthetic coding sequence
  source 1..1212: mol_type = other DNA

SEQ ID NO: 9464 - DNA, 1212 bp, synthetic construct; identical to SEQ ID NO: 9457
  misc_feature 1..1212: note = Description of Artificial Sequence: Synthetic coding sequence
  source 1..1212: mol_type = other DNA

SEQ ID NO: 9465 - DNA, 1212 bp, synthetic construct; identical to SEQ ID NO: 9457
  misc_feature 1..1212: note = Description of Artificial Sequence: Synthetic coding sequence
  source 1..1212: mol_type = other DNA

SEQ ID NO: 9466 - DNA, 570 bp, synthetic construct
  misc_feature 1..570: note = Description of Artificial Sequence: Synthetic coding sequence
  source 1..570: mol_type = other DNA
atggacagaagcaaggagaactgcatcagcggccccgtgaaggccaccgcccccgtgggcggccccaagagagtgctggtgacccagcagttcccctgccagaaccccctgcccgtgaacagcggccaggcccagagagtgctgtgccccagcaacagcagccagagaatccccctgcaggcccagaagctggtgagcagccacaagcccgtgcagaaccagaagcagaagcagctgcaggccaccagcgtgccccaccccgtgagcagacccctgaacaacacccagaagagcaagcagcccctgcccagcgcccccgagaacaaccccgaggaggagctggccagcaagcagaagaacgaggagagcaagaagagacagtgggccctggaggacttcgagatcggcagacccctgggcaagggcaagttcggcaacgtgtacctggccagagagaagcagagcaagttcatcctggccctgaaggtgctgttcaaggcccagctggagaaggccggcgtggagcaccagctgagaagagaggtggagatccagagccacctgagatag

SEQ ID NO: 9467 - DNA, 444 bp, synthetic construct
  misc_feature 1..444: note = Description of Artificial Sequence: Synthetic coding sequence
  source 1..444: mol_type = other DNA
atggacagaagcaaggagaactgcatcagcggccccgtgaaggccaccgcccccgtgggcggccccaagagagtgctggtgacccagcagttcccctgccagaaccccctgcccgtgaacagcggccaggcccagagagtgctgtgccccagcaacagcagccagagaatccccctgcaggcccagaagctggtgagcagccacaagcccgtgcagaaccagaagcagaagcagctgcaggccaccagcgtgccccaccccgtgagcagacccctgaacaacacccagaagagcaagcagcccctgcccagcgcccccgagaacaaccccgaggaggagctggccagcaagcagaagaacgaggagagcaagaagagacagtgggccctggaggacttcgagatcggcagacccctgggcaagggcaagttcggcaacgtgtag

SEQ ID NO: 9468 - DNA, 816 bp, synthetic construct
  misc_feature 1..816: note = Description of Artificial Sequence: Synthetic coding sequence
  source 1..816: mol_type = other DNA
atggacagaagcaaggagaactgcatcagcggccccgtgaaggccaccgcccccgtgggcggccccaagagagtgctggtgacccagcagttcccctgccagaaccccctgcccgtgaacagcggccaggcccagagagtgctgtgccccagcaacagcagccagagaatccccctgcaggcccagaagctggtgagcagccacaagcccgtgcagaaccagaagcagaagcagctgcaggccaccagcgtgccccaccccgtgagcagacccctgaacaacacccagaagagcaagcagcccctgcccagcgcccccgagaacaaccccgaggaggagctggccagcaagcagaagaacgaggagagcaagaagagacagtgggccctggaggacttcgagatcggcagacccctgggcaagggcaagttcggcaacgtgtacctggccagagagaagcagagcaagttcatcctggccctgaaggtgctgttcaaggcccagctggagaaggccggcgtggagcaccagctgagaagagaggtggagatccagagccacctgagacaccccaacatcctgagactgtacggctacttccacgacgccaccagagtgtacctgatcctggagtacgcccccctgggcaccgtgtacagagagctgcagaagctgagcaagttcgacgagcagagaaccgccacctacatcaccgagctggccaacgccctgagctactgccacagcaagagagtgatccacagagacatcaagcccgagaacctgctgctgggcagcgccggcgagctgaagtag

SEQ ID NO: 9469 - DNA, 240 bp, synthetic construct
  misc_feature 1..240: note = Description of Artificial Sequence: Synthetic coding sequence
  source 1..240: mol_type = other DNA
atggacagaagcaaggagaactgcatcagcggccccgtgaaggccaccgcccccgtgggcggccccaagagagtgctggtgacccagcagttcccctgccagaaccccctgcccgtgaacagcggccaggcccagagagtgctgtgccccagcaacagcagccagagaatccccctgcaggcccagaagctggtgagcagccacaagcccgtgcagaaccagaagcagaagcagctgtag

SEQ ID NO: 9470 - DNA, 321 bp, synthetic construct
  misc_feature 1..321: note = Description of Artificial Sequence: Synthetic coding sequence
  source 1..321: mol_type = other DNA
atggacagaagcaaggagaactgcatcagcggccccgtgaaggccaccgcccccgtgggcggccccaagagagtgctggtgacccagcagttcccctgccagaaccccctgcccgtgaacagcggccaggcccagagagtgctgtgccccagcaacagcagccagagaatccccctgcaggcccagaagctggtgagcagccacaagcccgtgcagaaccagaagcagaagcagctgcaggccaccagcgtgccccaccccgtgagcagacccctgaacaacacccagaagagcaagcagcccctgcccagcgccccctag

SEQ ID NO: 9471 - DNA, 1035 bp, synthetic construct
  misc_feature 1..1035: note = Description of Artificial Sequence: Synthetic coding sequence
  source 1..1035: mol_type = other DNA
atggcccagaaggagaacagctacccctggccctacggcagacagaccgcccccagcggcctgagcaccctgccccagagagtgctgagaaaggagcccgtgacccccagcgccctggtgctgatgagcagaagcaacgtgcagcccaccgccgcccccggccagaaggtgatggagaacagcagcggcacccccgacatcctgaccagacacttcaccatcgacgacttcgagatcggcagacccctgggcaagggcaagttcggcaacgtgtacctggccagagagaagaagagccacttcatcgtggccctgaaggtgctgttcaagagccagatcgagaaggagggcgtggagcaccagctgagaagagagatcgagatccaggcccacctgcaccaccccaacatcctgagactgtacaactacttctacgacagaagaagaatctacctgatcctggagtacgcccccagaggcgagctgtacaaggagctgcagaagagctgcaccttcgacgagcagagaaccgccaccatcatggaggagctggccgacgccctgatgtactgccacggcaagaaggtgatccacagagacatcaagcccgagaacctgctgctgggcctgaagggcgagctgaagatcgccgacttcggctggagcgtgcacgcccccagcctgagaagaaagaccatgtgcggcaccctggactacctgccccccgagatgatcgagggcagaatgcacaacgagaaggtggacctgtggtgcatcggcgtgctgtgctacgagctgctggtgggcaacccccccttcgagagcgccagccacaacgagacctacagaagaatcgtgaaggtggacctgaagttccccgccagcgtgcccatgggcgcccaggacctgatcagcaagctgctgagacacaaccccagcgagagactgcccctggcccaggtgagcgcccacccctgggtgagagccaacagcagaagagtgctgccccccagcgccctgcagagcgtggcctag

SEQ ID NO: 9472 - DNA, 912 bp, synthetic construct
  misc_feature 1..912: note = Description of Artificial Sequence: Synthetic coding sequence
  source 1..912: mol_type = other DNA
atgagcagaagcaacgtgcagcccaccgccgcccccggccagaaggtgatggagaacagcagcggcacccccgacatcctgaccagacacttcaccatcgacgacttcgagatcggcagacccctgggcaagggcaagttcggcaacgtgtacctggccagagagaagaagagccacttcatcgtggccctgaaggtgctgttcaagagccagatcgagaaggagggcgtggagcaccagctgagaagagagatcgagatccaggcccacctgcaccaccccaacatcctgagactgtacaactacttctacgacagaagaagaatctacctgatcctggagtacgcccccagaggcgagctgtacaaggagctgcagaagagctgcaccttcgacgagcagagaaccgccaccatcatggaggagctggccgacgccctgatgtactgccacggcaagaaggtgatccacagagacatcaagcccgagaacctgctgctgggcctgaagggcgagctgaagatcgccgacttcggctggagcgtgcacgcccccagcctgagaagaaagaccatgtgcggcaccctggactacctgccccccgagatgatcgagggcagaatgcacaacgagaaggtggacctgtggtgcatcggcgtgctgtgctacgagctgctggtgggcaacccccccttcgagagcgccagccacaacgagacctacagaagaatcgtgaaggtggacctgaagttccccgccagcgtgcccatgggcgcccaggacctgatcagcaagctgctgagacacaaccccagcgagagactgcccctggcccaggtgagcgcccacccctgggtgagagccaacagcagaagagtgctgccccccagcgccctgcagagcgtggcctag

SEQ ID NO: 9473 - DNA, 1035 bp, synthetic construct; identical to SEQ ID NO: 9471
  misc_feature 1..1035: note = Description of Artificial Sequence: Synthetic coding sequence
  source 1..1035: mol_type = other DNA

SEQ ID NO: 9474 - DNA, 930 bp, synthetic construct
  misc_feature 1..930: note = Description of Artificial Sequence: Synthetic coding sequence
  source 1..930: mol_type = other DNA
atgagcagccccagagccgtggtgcagctgggcaaggcccagcccgccggcgaggagctggccaccgccaaccagaccgcccagcagcccagcagccccgccatgagaagactgaccgtggacgacttcgagatcggcagacccctgggcaagggcaagttcggcaacgtgtacctggccagactgaaggagagccacttcatcgtggccctgaaggtgctgttcaagagccagatcgagaaggagggcctggagcaccagctgagaagagagatcgagatccaggcccacctgcagcaccccaacatcctgagactgtacaactacttccacgacgccagaagagtgtacctgatcctggagtacgcccccagaggcgagctgtacaaggagctgcagaagagcgagaagctggacgagcagagaaccgccaccatcatcgaggagctggccgacgccctgacctactgccacgacaagaaggtgatccacagagacatcaagcccgagaacctgctgctgggcttcagaggcgaggtgaagatcgccgacttcggctggagcgtgcacacccccagcctgagaagaaagaccatgtgcggcaccctggactacctgccccccgagatgatcgagggcagaacctacgacgagaaggtggacctgtggtgcatcggcgtgctgtgctacgagctgctggtgggctacccccccttcgagagcgccagccacagcgagacctacagaagaatcctgaaggtggacgtgagattccccctgagcatgcccctgggcgccagagacctgatcagcagactgctgagataccagcccctggagagactgcccctggcccagatcctgaagcacccctgggtgcaggcccacagcagaagagtgctgcccccctgcgcccagatggccagctag

SEQ ID NO: 9475 - DNA, 873 bp, synthetic construct
  misc_feature 1..873: note = Description of Artificial Sequence: Synthetic coding sequence
  source 1..873: mol_type = other DNA
atggccaccgccaaccagaccgcccagcagcccagcagccccgccatgagaagactgaccgtggacgacttcgagatcggcagacccctgggcaagggcaagttcggcaacgtgtacctggccagactgaaggagagccacttcatcgtggccctgaaggtgctgttcaagagccagatcgagaaggagggcctggagcaccagctgagaagagagatcgagatccaggcccacctgcagcaccccaacatcctgagactgtacaactacttccacgacgccagaagagtgtacctgatcctggagtacgcccccagaggcgagctgtacaaggagctgcagaagagcgagaagctggacgagcagagaaccgccaccatcatcgaggagctggccgacgccctgacctactgccacgacaagaaggtgatccacagagacatcaagcccgagaacctgctgctgggcttcagaggcgaggtgaagatcgccgacttcggctggagcgtgcacacccccagcctgagaagaaagaccatgtgcggcaccctggactacctgccccccgagatgatcgagggcagaacctacgacgagaaggtggacctgtggtgcatcggcgtgctgtgctacgagctgctggtgggctacccccccttcgagagcgccagccacagcgagacctacagaagaatcctgaaggtggacgtgagattccccctgagcatgcccctgggcgccagagacctgatcagcagactgctgagataccagcccctggagagactgcccctggcccagatcctgaagcacccctgggtgcaggcccacagcagaagagtgctgcccccctgcgcccagatggccagctag

SEQ ID NO: 9476 - DNA, 828 bp, synthetic construct
  misc_feature 1..828: note = Description of Artificial Sequence: Synthetic coding sequence
  source 1..828: mol_type = other DNA
atgagaagactgaccgtggacgacttcgagatcggcagacccctgggcaagggcaagttcggcaacgtgtacctggccagactgaaggagagccacttcatcgtggccctgaaggtgctgttcaagagccagatcgagaaggagggcctggagcaccagctgagaagagagatcgagatccaggcccacctgcagcaccccaacatcctgagactgtacaactacttccacgacgccagaagagtgtacctgatcctggagtacgcccccagaggcgagctgtacaaggagctgcagaagagcgagaagctggacgagcagagaaccgccaccatcatcgaggagctggccgacgccctgacctactgccacgacaagaaggtgatccacagagacatcaagcccgagaacctgctgctgggcttcagaggcgaggtgaagatcgccgacttcggctggagcgtgcacacccccagcctgagaagaaagaccatgtgcggcaccctggactacctgccccccgagatgatcgagggcagaacctacgacgagaaggtggacctgtggtgcatcggcgtgctgtgctacgagctgctggtgggctacccccccttcgagagcgccagccacagcgagacctacagaagaatcctgaaggtggacgtgagattccccctgagcatgcccctgggcgccagagacctgatcagcagactgctgagataccagcccctggagagactgcccctggcccagatcctgaagcacccctgggtgcaggcccacagcagaagagtgctgcccccctgcgcccagatggccagctag

SEQ ID NO: 9477 - DNA, 2589 bp, synthetic construct
  misc_feature 1..2589: note = Description of Artificial Sequence: Synthetic coding sequence
  source 1..2589: mol_type = other DNA
atgaacatccaggagcagggcttccccctggacctgggcgccagcttcaccgaggacgcccccagaccccccgtgcccggcgaggagggcgagctggtgagcaccgaccccagacccgccagctacagcttctgcagcggcaagggcgtgggcatcaagggcgagaccagcaccgccacccccagaagaagcgacctggacctgggctacgagcccgagggcagcgccagccccacccccccctacctgaagtgggccgagagcctgcacagcctgctggacgaccaggacggcatcagcctgttcagaaccttcctgaagcaggagggctgcgccgacctgctggacttctggttcgcctgcaccggcttcagaaagctggagccctgcgacagcaacgaggagaagagactgaagctggccagagccatctacagaaagtacatcctggacaacaacggcatcgtgagcagacagaccaagcccgccaccaagagcttcatcaagggctgcatcatgaagcagctgatcgaccccgccatgttcgaccaggcccagaccgagatccaggccaccatggaggagaacacctaccccagcttcctgaagagcgacatctacctggagtacaccagaaccggcagcgagagccccaaggtgtgcagcgaccagagcagcggcagcggcaccggcaagggcatcagcggctacctgcccaccctgaacgaggacgaggagtggaagtgcgaccaggacatggacgaggacgacggcagagacgccgccccccccggcagactgccccagaagctgctgctggagaccgccgcccccagagtgagcagcagcagaagatacagcgagggcagagagttcagatacggcagctggagagagcccgtgaacccctactacgtgaacgccggctacgccctggcccccgccaccagcgccaacgacagcgagcagcagagcctgagcagcgacgccgacaccctgagcctgaccgacagcagcgtggacggcatccccccctacagaatcagaaagcagcacagaagagagatgcaggagagcgtgcaggtgaacggcagagtgcccctgccccacatccccagaacctacagagtgcccaaggaggtgagagtggagccccagaagttcgccgaggagctgatccacagactggaggccgtgcagagaaccagagaggccgaggagaagctggaggagagactgaagagagtgagaatggaggaggagggcgaggacggcgaccccagcagcggcccccccggcccctgccacaagctgccccccgcccccgcctggcaccacttcccccccagatgcgtggacatgggctgcgccggcctgagagacgcccacgaggagaaccccgagagcatcctggacgagcacgtgcagagagtgctgagaacccccggcagacagagccccggccccggccacagaagccccgacagcggccacgtggccaagatgcccgtggccctgggcggcgccgccagcggccacggcaagcacgtgcccaagagcggcgccaagctggacgccgccggcctgcaccaccacagacacgtgcaccaccacgtgcaccacagcaccgccagacccaaggagcaggtggaggccgaggccaccagaagagcccagagcagcttcgcctggggcctggagccccacagccacggcgccagaagcagaggctacagcgagagcgtgggcgccgcccccaacgccagcgacggcctggcccacagcggcaaggtgggcgtggcctgcaagagaaacgccaagaaggccgagagcggcaagagcgccagcaccgaggtgcccggcgccagcgaggacgccgagaagaaccagaagatcatgcagtggatcatcgagggcgagaaggagatcagcagacacagaagaaccggccacggcagcagcggcaccagaaagccccagccccacgagaacagcagacccctgagcctggagcacccctgggccggcccccagctgagaaccagcgtgcagcccagccacctgttcatccaggaccccaccatgcccccccaccccgcccccaaccccctgacccagctggaggaggccagaagaagactggaggaggaggagaagagagccagcagagcccccagcaagcagagatacgtgcaggaggtgatgagaagaggcagagcctgcgtgagacccgcctgcgcccccgtgctgcacgtggtgcccgccgtgagcgacatggagctgagcgagaccgagaccagaagccagagaaaggtgggcggcggcagcgcccagccctgcgacagcatcgtggtggcctactacttctgcggcgagcccatcccctacagaaccctggtgagaggcagagccgtgaccctgggccagttcaaggagctgctgaccaagaagggcagctacagatactacttcaagaaggtgagcgacgagttcgactgcggcgtggtgttcgaggaggtgagagaggacgaggccgtgctgcccgtgttcgaggagaagatcatcggcaaggtggagaaggtggactag

SEQ ID NO: 9478 - DNA, 2481 bp, synthetic construct
  misc_feature 1..2481: note = Description of Artificial Sequence: Synthetic coding sequence
  source 1..2481: mol_type = other DNA
atgaacatccaggagcagggcttccccctggacctgggcgccagcttcaccgaggacgcccccagaccccccgtgcccggcgaggagggcgagctggtgagcaccgaccccagacccgccagctacagcttctgcagcggcaagggcgtgggcatcaagggcgagaccagcaccgccacccccagaagaagcgacctggacctgggctacgagcccgagggcagcgccagccccacccccccctacctgaagtgggccgagagcctgcacagcctgctggacgaccaggacggcatcagcctgttcagaaccttcctgaagcaggagggctgcgccgacctgctggacttctggttcgcctgcaccggcttcagaaagctggagccctgcgacagcaacgaggagaagagactgaagctggccagagccatctacagaaagtacatcctggacaacaacggcatcgtgagcagacagaccaagcccgccaccaagagcttcatcaagggctgcatcatgaagcagctgatcgaccccgccatgttcgaccaggcccagaccgagatccaggccaccatggaggagaacacctaccccagcttcctgaagagcgacatctacctggagtacaccagaaccggcagcgagagccccaaggtgtgcagcgaccagagcagcggcagcggcaccggcaagggcatcagcggctacctgcccaccctgaacgaggacgaggagtggaagtgcgaccaggacatggacgaggacgacggcagagacgccgccccccccggcagactgccccagaagctgctgctggagaccgccgcccccagagtgagcagcagcagaagatacagcgagggcagagagttcagatacggcagctggagagagcccgtgaacccctactacgtgaacgccggctacgccctggcccccgccaccagcgccaacgacagcgagcagcagagcctgagcagcgacgccgacaccctgagcctgaccgacagcagcgtggacggcatccccccctacagaatcagaaagcagcacagaagagagatgcaggagagcgtgcaggtgaacggcagagtgcccctgccccacatccccagaacctacagagtgcccaaggaggtgagagtggagccccagaagttcgccgaggagctgatccacagactggaggccgtgcagagaaccagagaggccgaggagaagctggaggagagactgaagagagtgagaatggaggaggagggcgaggacggcgaccccagcagcggcccccccggcccctgccacaagctgccccccgcccccgcctggcaccacttcccccccagatgcgtggacatgggctgcgccggcctgagagacgcccacgaggagaaccccgagagcatcctggacgagcacgtgcagagagtgctgagaacccccggcagacagagccccggccccggccacagaagccccgacagcggccacgtggccaagatgcccgtggccctgggcggcgccgccagcggccacggcaagcacgtgcccaagagcggcgccaagctggacgccgccggcctgcaccaccacagacacgtgcaccaccacgtgcaccacagcaccgccagacccaaggagcaggtggaggccgaggccaccagaagagcccagagcagcttcgcctggggcctggagccccacagccacggcgccagaagcagaggctacagcgagagcgtgggcgccgcccccaacgccagcgacggcctggcccacagcggcaaggtgggcgtggcctgcaagagaaacgccaagaaggccgagagcggcaagagcgccagcaccgaggtgcccggcgccagcgaggacgccgagaagaaccagaagatcatgcagtggatcatcgagggcgagaaggagatcagcagacacagaagaaccggccacggcagcagcggcaccagaaagccccagccccacgagaacagcagacccctgagcctggagcacccctgggccggcccccagctgagaaccagcgtgcagcccagccacctgttcatccaggaccccaccatgcccccccaccccgcccccaaccccctgacccagctggaggaggccagaagaagactggaggaggaggagaagagagccagcagagcccccagcaagcagagaaccagaagccagagaaaggtgggcggcggcagcgcccagccctgcgacagcatcgtggtggcctactacttctgcggcgagcccatcccctacagaaccctggtgagaggcagagccgtgaccctgggccagttcaaggagctgctgaccaagaagggcagctacagatactacttcaagaaggtgagcgacgagttcgactgcggcgtggtgttcgaggaggtgagagaggacgaggccgtgctgcccgtgttcgaggagaagatcatcggcaaggtggagaaggtggactag

SEQ ID NO: 9479 - DNA, 309 bp, synthetic construct
  misc_feature 1..309: note = Description of Artificial Sequence: Synthetic coding sequence
  source 1..309: mol_type = other DNA
tgactggaggaggaggagaagagagccagcagagcccccagcaagcagagaaccagaagccagagaaaggtgggcggcggcagcgcccagccctgcgacagcatcgtggtggcctactacttctgcggcgagcccatcccctacagaaccctggtgagaggcagagccgtgaccctgggccagttcaaggagctgctgaccaagaagggcagctacagaccccccagccacctgagatgctgcctgctgaccgccctgctgaccagcgtgctgcagatcctgctgcaggagagcgagagaagagtgtag

SEQ ID NO: 9480 - DNA, 1824 bp, synthetic construct
  misc_feature 1..1824: note = Description of Artificial Sequence: Synthetic coding sequence
  source 1..1824: mol_type = other DNA
atggtgtgcaccagaaagaccaagaccctggtgagcacctgcgtgatcctgagcggcatgaccaacatcatctgcctgctgtacgtgggctgggtgaccaactacatcgccagcgtgtacgtgagaggccaggagcccgcccccgacaagaagctggaggaggacaagggcgacaccctgaagatcatcgagagactggaccacctggagaacgtgatcaagcagcacatccaggaggcccccgccaagcccgaggaggccgaggccgagcccttcaccgacagcagcctgttcgcccactggggccaggagctgagccccgagggcagaagagtggccctgaagcagttccagtactacggctacaacgcctacctgagcgacagactgcccctggacagacccctgcccgacctgagacccagcggctgcagaaacctgagcttccccgacagcctgcccgaggtgagcatcgtgttcatcttcgtgaacgaggccctgagcgtgctgctgagaagcatccacagcgccatggagagaacccccccccacctgctgaaggagatcatcctggtggacgacaacagcagcaacgaggagctgaaggagaagctgaccgagtacgtggacaaggtgaacagccagaagcccggcttcatcaaggtggtgagacacagcaagcaggagggcctgatcagaagcagagtgagcggctggagagccgccaccgcccccgtggtggccctgttcgacgcccacgtggagttcaacgtgggctgggccgagcccgtgctgaccagaatcaaggagaacagaaagagaatcatcagccccagcttcgacaacatcaagtacgacaacttcgagatcgaggagtaccccctggccgcccagggcttcgactgggagctgtggtgcagatacctgaacccccccaaggcctggtggaagctggagaacagcaccgcccccatcagaagccccgccctgatcggctgcttcatcgtggacagacagtacttccaggagatcggcctgctggacgagggcatggaggtgtacggcggcgagaacgtggagctgggcatcagagtgtggcagtgcggcggcagcgtggaggtgctgccctgcagcagaatcgcccacatcgagagagcccacaagccctacaccgaggacctgaccgcccacgtgagaagaaacgccctgagagtggccgaggtgtggatggacgagttcaagagccacgtgtacatggcctggaacatcccccaggaggacagcggcatcgacatcggcgacatcaccgccagaaaggccctgagaaagcagctgcagtgcaagaccttcagatggtacctggtgagcgtgtaccccgagatgagaatgtacagcgacatcatcgcctacggcgtgctgcagaacagcctgaagaccgacctgtgcctggaccagggccccgacaccgagaacgtgcccatcatgtacatctgccacggcatgaccccccagaacgtgtactacaccagcagccagcagatccacgtgggcatcctgagccccaccgtggacgacgacgacaacagatgcctggtggacgtgaacagcagacccagactgatcgagtgcagctacgccaaggccaagagaatgaagctgcactggcagttcagccagggcggccccatccagaacagaaagagcaagagatgcctggagctgcaggagaacagcgacctggagttcggcttccagctggtgctgcagaagtgcagcggccagcactggagcatcaccaacgtgctgagaagcctggccagctag

SEQ ID NO: 9481 - DNA, 1710 bp, synthetic construct
  misc_feature 1..1710: note = Description of Artificial Sequence: Synthetic coding sequence
  source 1..1710: mol_type = other DNA
atgagcacctacagcaccttccccgccggcgtgcccgtgagcgagagaagcctggccagagccggcttctactacaccggcgtgaacgacaaggtgaagtgcttctgctgcggcctgatgctggacaactggaagctgggcgacagccccatccagaagcacaagcagctgtaccccagctgcagcttcatccagaacctggtgagcgccagcctgggcagcaccagcaagaacaccagccccatgagaaacagcttcgcccacagcctgagccccaccctggagcacagcagcctgttcagcggcagctacagcagcctgagccccaaccccctgaacagcagagccgtggaggacatcagcagcagcagaaccaacccctacagctacgccatgagcaccgaggaggccagattcctgacctaccacatgtggcccctgaccttcctgagccccagcgagctggccagagccggcttctactacatcggccccggcgacagagtggcctgcttcgcctgcggcggcaagctgagcaactgggagcccaaggacgacgccatgagcgagcacagaagacacttccccaactgccccttcctggagaacagcctggagaccctgagattcagcatcagcaacctgagcatgcagacccacgccgccagaatgagaaccttcatgtactggcccagcagcgtgcccgtgcagcccgagcagctggccagcgccggcttctactacgtgggcagaaacgacgacgtgaagtgcttctgctgcgacggcggcctgagatgctgggagagcggcgacgacccctgggtggagcacgccaagtggttccccagatgcgagttcctgatcagaatgaagggccaggagttcgtggacgagatccagggcagatacccccacctgctggagcagctgctgagcaccagcgacaccaccggcgaggagaacgccgacccccccatcatccacttcggccccggcgagagcagcagcgaggacgccgtgatgatgaacacccccgtggtgaagagcgccctggagatgggcttcaacagagacctggtgaagcagaccgtgcagagcaagatcctgaccaccggcgagaactacaagaccgtgaacgacatcgtgagcgccctgctgaacgccgaggacgagaagagagaggaggagaaggagaagcaggccgaggagatggccagcgacgacctgagcctgatcagaaagaacagaatggccctgttccagcagctgacctgcgtgctgcccatcctggacaacctgctgaaggccaacgtgatcaacaagcaggagcacgacatcatcaagcagaagacccagatccccctgcaggccagagagctgatcgacaccatcctggtgaagggcaacgccgccgccaacatcttcaagaactgcctgaaggagatcgacagcaccctgtacaagaacctgttcgtggacaagaacatgaagtacatccccaccgaggacgtgagcggcctgagcctggaggagcagctgagaagactgcaggaggagagaacctgcaaggtgtgcatggacaaggaggtgagcgtggtgttcatcccctgcggccacctggtggtgtgccaggagtgcgcccccagcctgagaaagtgccccatctgcagaggcatcatcaagggcaccgtgagaaccttcctgagctag

SEQ ID NO: 9482 - DNA, 1794 bp, synthetic construct
  misc_feature 1..1794: note = Description of Artificial Sequence: Synthetic coding sequence
  source 1..1794: mol_type = other DNA
atggaggacagcaccatcctgagcgactggaccaacagcaacaagcagaagatgaagtacgacttcagctgcgagctgtacagaatgagcacctacagcaccttccccgccggcgtgcccgtgagcgagagaagcctggccagagccggcttctactacaccggcgtgaacgacaaggtgaagtgcttctgctgcggcctgatgctggacaactggaagctgggcgacagccccatccagaagcacaagcagctgtaccccagctgcagcttcatccagaacctggtgagcgccagcctgggcagcaccagcaagaacaccagccccatgagaaacagcttcgcccacagcctgagccccaccctggagcacagcagcctgttcagcggcagctacagcagcctgagccccaaccccctgaacagcagagccgtggaggacatcagcagcagcagaaccaacccctacagctacgccatgagcaccgaggaggccagattcctgacctaccacatgtggcccctgaccttcctgagccccagcgagctggccagagccggcttctactacatcggccccggcgacagagtggcctgcttcgcctgcggcggcaagctgagcaactgggagcccaaggacgacgccatgagcgagcacagaagacacttccccaactgccccttcctggagaacagcctggagaccctgagattcagcatcagcaacctgagcatgcagacccacgccgccagaatgagaaccttcatgtactggcccagcagcgtgcccgtgcagcccgagcagctggccagcgccggcttctactacgtgggcagaaacgacgacgtgaagtgcttctgctgcgacggcggcctgagatgctgggagagcggcgacgacccctgggtggagcacgccaagtggttccccagatgcgagttcctgatcagaatgaagggccaggagttcgtggacgagatccagggcagatacccccacctgctggagcagctgctgagcaccagcgacaccaccggcgaggagaacgccgacccccccatcatccacttcggccccggcgagagcagcagcgaggacgccgtgatgatgaacacccccgtggtgaagagcgccctggagatgggcttcaacagagacctggtgaagcagaccgtgcagagcaagatcctgaccaccggcgagaactacaagaccgtgaacgacatcgtgagcgccctgctgaacgccgaggacgagaagagagaggaggagaaggagaagcaggccgaggagatggccagcgacgacctgagcctgatcagaaagaacagaatggccctgttccagcagctgacctgcgtgctgcccatcctggacaacctgctgaaggccaacgtgatcaacaagcaggagcacgacatcatcaagcagaagacccagatccccctgcaggccagagagctgatcgacaccatcctggtgaagggcaacgccgccgccaacatcttcaagaactgcctgaaggagatcgacagcaccctgtacaagaacctgttcgtggacaagaacatgaagtacatccccaccgaggacgtgagcggcctgagcctggaggagcagctgagaagactgcaggaggagagaacctgcaaggtgtgcatggacaaggaggtgagcgtggtgttcatcccctgcggccacctggtggtgtgccaggagtgcgcccccagcctgagaaagtgccccatctgcagaggcatcatcaagggcaccgtgagaaccttcctgagctag

SEQ ID NO: 9483 - DNA, 1605 bp, synthetic construct
  misc_feature 1..1605: note = Description of Artificial Sequence: Synthetic coding sequence
  source 1..1605: mol_type = other DNA
atgcacaagaccgccagccagagactgttccccggccccagctaccagaacatcaagagcatcatggaggacagcaccatcctgagcgactggaccaacagcaacaagcagaagatgaagtacgacttcagctgcgagctgtacagaatgagcacctacagcaccttccccgccggcgtgcccgtgagcgagagaagcctggccagagccggcttctactacaccggcgtgaacgacaaggtgaagtgcttctgctgcggcctgatgctggacaactggaagctgggcgacagccccatccagaagcacaagcagctgtaccccagctgcagcttcatccagaacctggtgagcgccagcctgggcagcaccagcaagaacaccagccccatgagaaacagcttcgcccacagcctgagccccaccctggagcacagcagcctgttcagcggcagctacagcagcctgagccccaaccccctgaacagcagagccgtggaggacatcagcagcagcagaaccaacccctacagctacgccatgagcaccgaggaggccagattcctgacctaccacatgtggcccctgaccttcctgagccccagcgagctggccagagccggcttctactacatcggccccggcgacagagtggcctgcttcgcctgcggcggcaagctgagcaactgggagcccaaggacgacgccatgagcgagcacagaagacacttccccaactgccccttcctggagaacagcctggagaccctgagattcagcatcagcaacctgagcatgcagacccacgccgccagaatgagaaccttcatgtactggcccagcagcgtgcccgtgcagcccgagcagctggccagcgccggcttctactacgtgggcagaaacgacgacgtgaagtgcttctgctgcgacggcggcctgagatgctgggagagcggcgacgacccctgggtggagcacgccaagtggttccccagatgcgagttcctgatcagaatgaagggccaggagttcgtggacgagatccagggcagatacccccacctgctggagcagctgctgagcaccagcgacaccaccggcgaggagaacgccgacccccccatcatccacttcggccccggcgagagcagcagcgaggacgccgtgatgatgaacacccccgtggtgaagagcgccctggagatgggcttcaacagagacctggtgaagcagaccgtgcagagcaagatcctgaccaccggcgagaactacaagaccgtgaacgacatcgtgagcgccctgctgaacgccgaggacgagaagagagaggaggagaaggagaagcaggccgaggagatggccagcgacgacctgagcctgatcagaaagaacagaatggccctgttccagcagctgacctgcgtgctgcccatcctggacaacctgctgaaggccaacgtgatcaacaagcaggagcacgacatcatcaagcagaagacccagatccccctgcaggccagagagctgatcgacaccatcctggtgaagggcaacgccgccgccaacatcttcaagaactgcctgaaggtgaagcagagattctag

SEQ ID NO: 9484 - DNA, 1815 bp, synthetic construct
  misc_feature 1..1815: note = Description of Artificial Sequence: Synthetic coding sequence
  source 1..1815: mol_type = other DNA
atgaacatcgtggagaacagcatcttcctgagcaacctgatgaagagcgccaacaccttcgagctgaagtacgacctgagctgcgagctgtacagaatgagcacctacagcaccttccccgccggcgtgcccgtgagcgagagaagcctggccagagccggcttctactacaccggcgtgaacgacaaggtgaagtgcttctgctgcggcctgatgctggacaactggaagagaggcgacagccccaccgagaagcacaagaagctgtaccccagctgcagattcgtgcagagcctgaacagcgtgaacaacctggaggccaccagccagcccaccttccccagcagcgtgaccaacagcacccacagcctgctgcccggcaccgagaacagcggctacttcagaggcagctacagcaacagccccagcaaccccgtgaacagcagagccaaccaggacttcagcgccctgatgagaagcagctaccactgcgccatgaacaacgagaacgccagactgctgaccttccagacctggcccctgaccttcctgagccccaccgacctggccaaggccggcttctactacatcggccccggcgacagagtggcctgcttcgcctgcggcggcaagctgagcaactgggagcccaaggacaacgccatgagcgagcacctgagacacttccccaagtgccccttcatcgagaaccagctgcaggacaccagcagatacaccgtgagcaacctgagcatgcagacccacgccgccagattcaagaccttcttcaactggcccagcagcgtgctggtgaaccccgagcagctggccagcgccggcttctactacgtgggcaacagcgacgacgtgaagtgcttctgctgcgacggcggcctgagatgctgggagagcggcgacgacccctgggtgcagcacgccaagtggttccccagatgcgagtacctgatcagaatcaagggccaggagttcatcagacaggtgcaggccagctacccccacctgctggagcagctgctgagcaccagcgacagccccggcgacgagaacgccgagagcagcatcatccacttcgagcccggcgaggaccacagcgaggacgccatcatgatgaacacccccgtgatcaacgccgccgtggagatgggcttcagcagaagcctggtgaagcagaccgtgcagagaaagatcctggccaccggcgagaactacagactggtgaacgacctggtgctggacctgctgaacgccgaggacgagatcagagaggaggagagagagagagccaccgaggagaaggagagcaacgacctgctgctgatcagaaagaacagaatggccctgttccagcacctgacctgcgtgatccccatcctggacagcctgctgaccgccggcatcatcaacgagcaggagcacgacgtgatcaagcagaagacccagaccagcctgcaggccagagagctgatcgacaccatcctggtgaagggcaacatcgccgccaccgtgttcagaaacagcctgcaggaggccgaggccgtgctgtacgagcacctgttcgtgcagcaggacatcaagtacatccccaccgaggacgtgagcgacctgcccgtggaggagcagctgagaagactgcaggaggagagaacctgcaaggtgtgcatggacaaggaggtgagcatcgtgttcatcccctgcggccacctggtggtgtgcaaggactgcgcccccagcctgagaaagtgccccatctgcagaagcaccatcaagggcaccgtgagaaccttcctgagctag

SEQ ID NO: 9485 - DNA, 1815 bp, synthetic construct; identical to SEQ ID NO: 9484
  misc_feature 1..1815: note = Description of Artificial Sequence: Synthetic coding sequence
  source 1..1815: mol_type = other DNA

SEQ ID NO: 9486 - DNA, 498 bp, synthetic construct
  misc_feature 1..498: note = Description of Artificial Sequence: Synthetic coding sequence
  source 1..498: mol_type = other DNA
atgggcgcccccaccctgccccccgcctggcagcccttcctgaaggaccacagaatcagcaccttcaagaactggcccttcctggagggctgcgcctgcacccccgagagaatggccgaggccggcttcatccactgccccaccgagaacgagcccgacctggcccagtgcttcttctgcttcaaggagctggagggctgggagcccgacgacgaccccatcggccccggcaccgtggcctacgcctgcaacaccagcaccctgggcggcagaggcggcagaatcaccagagaggagcacaagaagcacagcagcggctgcgccttcctgagcgtgaagaagcagttcgaggagctgaccctgggcgagttcctgaagctggacagagagagagccaagaacaagatcgccaaggagaccaacaacaagaagaaggagttcgaggagaccgccgagaaggtgagaagagccatcgagcagctggccgccatggactag

SEQ ID NO: 9487 - DNA, 429 bp, synthetic construct
  misc_feature 1..429: note = Description of Artificial Sequence: Synthetic coding sequence
  source 1..429: mol_type = other DNA
atgggcgcccccaccctgccccccgcctggcagcccttcctgaaggaccacagaatcagcaccttcaagaactggcccttcctggagggctgcgcctgcacccccgagagaatggccgaggccggcttcatccactgccccaccgagaacgagcccgacctggcccagtgcttcttctgcttcaaggagctggagggctgggagcccgacgacgaccccatcgaggagcacaagaagcacagcagcggctgcgccttcctgagcgtgaagaagcagttcgaggagctgaccctgggcgagttcctgaagctggacagagagagagccaagaacaagatcgccaaggagaccaacaacaagaagaaggagttcgaggagaccgccgagaaggtgagaagagccatcgagcagctggccgccatggactag

SEQ ID NO: 9488 - DNA, 414 bp, synthetic construct
  misc_feature 1..414: note = Description of Artificial Sequence: Synthetic coding sequence
  source 1..414: mol_type = other DNA
atgggcgcccccaccctgccccccgcctggcagcccttcctgaaggaccacagaatcagcaccttcaagaactggcccttcctggagggctgcgcctgcacccccgagagaatggccgaggccggcttcatccactgccccaccgagaacgagcccgacctggcccagtgcttcttctgcttcaaggagctggagggctgggagcccgacgacgaccccatgcagagaaagcccaccatcagaagaaagaacctgagaaagctgagaagaaagtgcgccgtgcccagcagcagctggctgccctggatcgaggccagcggcagaagctgcctggtgcccgagtggctgcaccacttccagggcctgttccccggcgccaccagcctgcccgtgggccccctggccatgagctag

SEQ ID NO: 9489 - DNA, 432 bp, synthetic construct
  misc_feature 1..432: note = Description of Artificial Sequence: Synthetic coding sequence
  source 1..432: mol_type = other DNA
atgggcgcccccaccctgccccccgcctggcagcccttcctgaaggaccacagaatcagcaccttcaagaactggcccttcctggagggctgcgcctgcacccccgagagaatggccgaggccggcttcatccactgccccaccgagaacgagcccgacctggcccagtgcttcttctgcttcaaggagctggagggctgggagcccgacgacgaccccatcggccccggcaccgtggcctacgcctgcaacaccagcaccctgggcggcagaggcggcagaatcaccagagaggagcacaagaagcacagcagcggctgcgccttcctgagcgtgaagaagcagttcgaggagctgaccctgggcgagttcctgaagctggacagagagagagccaagaacaagatcgagagagccctgctggccgagtag

SEQ ID NO: 9490 - DNA, 14574 bp, synthetic construct
  misc_feature 1..14574: note = Description of Artificial Sequence: Synthetic coding sequence
  source 1..14574: mol_type = other DNA
atggtgaccggcggcggcgccgccccccccggcaccgtgaccgagcccctgcccagcgtgatcgtgctgagcgccggcagaaagatggccgccgccgccgccgccgccagcggccccggctgcagcagcgccgccggcgccggcgccgccggcgtgagcgagtggctggtgctgagagacggctgcatgcactgcgacgccgacggcctgcacagcctgagctaccaccccgccctgaacgccatcctggccgtgaccagcagaggcaccatcaaggtgatcgacggcaccagcggcgccaccctgcaggccagcgccctgagcgccaagcccggcggccaggtgaagtgccagtacatcagcgccgtggacaaggtgatcttcgtggacgactacgccgtgggctgcagaaaggacctgaacggcatcctgctgctggacaccgccctgcagacccccgtgagcaagcaggacgacgtggtgcagctggagctgcccgtgaccgaggcccagcagctgctgagcgcctgcctggagaaggtggacatcagcagcaccgagggctacgacctgttcatcacccagctgaaggacggcctgaagaacaccagccacgagaccgccgccaaccacaaggtggccaagtgggccaccgtgaccttccacctgccccaccacgtgctgaagagcatcgccagcgccatcgtgaacgagctgaagaagatcaaccagaacgtggccgccctgcccgtggccagcagcgtgatggacagactgagctacctgctgcccagcgccagacccgagctgggcgtgggccccggcagaagcgtggacagaagcctgatgtacagcgaggccaacagaagagagaccttcaccagctggccccacgtgggctacagatgggcccagcccgaccccatggcccaggccggcttctaccaccagcccgccagcagcggcgacgacagagccatgtgcttcacctgcagcgtgtgcctggtgtgctgggagcccaccgacgagccctggagcgagcacgagagacacagccccaactgccccttcgtgaagggcgagcacacccagaacgtgcccctgagcgtgaccctggccaccagccccgcccagttcccctgcaccgacggcaccgacagaatcagctgcttcggcagcggcagctgcccccacttcctggccgccgccaccaagagaggcaagatctgcatctgggacgtgagcaagctgatgaaggtgcacctgaagttcgagatcaacgcctacgaccccgccatcgtgcagcagctgatcctgagcggcgaccccagcagcggcgtggacagcagaagacccaccctggcctggctggaggacagcagcagctgcagcgacatccccaagctggagggcgacagcgacgacctgctggaggacagcgacagcgaggagcacagcagaagcgacagcgtgaccggccacaccagccagaaggaggccatggaggtgagcctggacatcaccgccctgagcatcctgcagcagcccgagaagctgcagtgggagatcgtggccaacgtgctggaggacaccgtgaaggacctggaggagctgggcgccaacccctgcctgaccaacagcaagagcgagaagaccaaggagaagcaccaggagcagcacaacatccccttcccctgcctgctggccggcggcctgctgacctacaagagccccgccaccagccccatcagcagcaacagccacagaagcctggacggcctgagcagaacccagggcgagagcatcagcgagcagggcagcaccgacaacgagagctgcaccaacagcgagctgaacagccccctggtgagaagaaccctgcccgtgctgctgctgtacagcatcaaggagagcgacgagaaggccggcaagatcttcagccagatgaacaacatcatgagcaagagcctgcacgacgacggcttcaccgtgccccagatcatcgagatggagctggacagccaggagcagctgctgctgcaggacccccccgtgacctacatccagcagttcgccgacgccgccgccaacctgaccagccccgacagcgagaagtggaacagcgtgttccccaagcccggcaccctggtgcagtgcctgagactgcccaagttcgccgaggaggagaacctgtgcatcgacagcatcaccccctgcgccgacggcatccacctgctggtgggcctgagaacctgccccgtggagagcctgagcgccatcaaccaggtggaggccctgaacaacctgaacaagctgaacagcgccctgtgcaacagaagaaagggcgagctggagagcaacctggccgtggtgaacggcgccaacatcagcgtgatccagcacgagagccccgccgacgtgcagacccccctgatcatccagcccgagcagagaaacgtgagcggcggctacctggtgctgtacaagatgaactacgccaccagaatcgtgaccctggaggaggagcccatcaagatccagcacatcaaggacccccaggacaccatcaccagcctgatcctgctgccccccgacatcctggacaacagagaggacgactgcgaggagcccatcgaggacatgcagctgaccagcaagaacggcttcgagagagagaagaccagcgacatcagcaccctgggccacctggtgatcaccacccagggcggctacgtgaagatcctggacctgagcaacttcgagatcctggccaaggtggagccccccaagaaggagggcaccgaggagcaggacaccttcgtgagcgtgatctactgcagcggcaccgacagactgtgcgcctgcaccaagggcggcgagctgcacttcctgcagatcggcggcacctgcgacgacatcgacgaggccgacatcctggtggacggcagcctgagcaagggcatcgagcccagcagcgagggcagcaagcccctgagcaaccccagcagccccggcatcagcggcgtggacctgctggtggaccagcccttcaccctggagatcctgaccagcctggtggagctgaccagattcgagaccctgacccccagattcagcgccaccgtgcccccctgctgggtggaggtgcagcaggagcagcagcagagaagacacccccagcacctgcaccagcagcaccacggcgacgccgcccagcacaccagaacctggaagctgcagaccgacagcaacagctgggacgagcacgtgttcgagctggtgctgcccaaggcctgcatggtgggccacgtggacttcaagttcgtgctgaacagcaacatcaccaacatcccccagatccaggtgaccctgctgaagaacaaggcccccggcctgggcaaggtgaacgccctgaacatcgaggtggagcagaacggcaagcccagcctggtggacctgaacgaggagatgcagcacatggacgtggaggagagccagtgcctgagactgtgccccttcctggaggaccacaaggaggacatcctgtgcggccccgtgtggctggccagcggcctggacctgagcggccacgccggcatgctgaccctgaccagccccaagctggtgaagggcatggccggcggcaagtacagaagcttcctgatccacgtgaaggccgtgaacgagagaggcaccgaggagatctgcaacggcggcatgagacccgtggtgagactgcccagcctgaagcaccagagcaacaagggctacagcctggccagcctgctggccaaggtggccgccggcaaggagaagagcagcaacgtgaagaacgagaacaccagcggcaccagaaagagcgagaacctgagaggctgcgacctgctgcaggaggtgagcgtgaccatcagaagattcaagaagaccagcatcagcaaggagagagtgcagagatgcgccatgctgcagttcagcgagttccacgagaagctggtgaacaccctgtgcagaaagaccgacgacggccagatcaccgagcacgcccagagcctggtgctggacaccctgtgctggctggccggcgtgcacagcaacggccccggcagcagcaaggagggcaacgagaacctgctgagcaagaccagaaagttcctgagcgacatcgtgagagtgtgcttcttcgaggccggcagaagcatcgcccacaagtgcgccagattcctggccctgtgcatcagcaacggcaagtgcgacccctgccagcccgccttcggccccgtgctgctgaaggccctgctggacaacatgagcttcctgcccgccgccaccaccggcggcagcgtgtactggtacttcgtgctgctgaactacgtgaaggacgaggacctggccggctgcagcaccgcctgcgccagcctgctgaccgccgtgagcagacagctgcaggacagactgacccccatggaggccctgctgcagaccagatacggcctgtacagcagccccttcgaccccgtgctgttcgacctggagatgagcggcagcagctgcaagaacgtgtacaacagcagcatcggcgtgcagagcgacgagatcgacctgagcgacgtgctgagcggcaacggcaaggtgagcagctgcaccgccgccgagggcagcttcaccagcctgaccggcctgctggaggtggagcccctgcacttcacctgcgtgagcaccagcgacggcaccagaatcgagagagacgacgccatgagcagcttcggcgtgacccccgccgtgggcggcctgagcagcggcaccgtgggcgaggccagcaccgccctgagcagcgccgcccaggtggccctgcagagcctgagccacgccatggccagcgccgagcagcagctgcaggtgctgcaggagaagcagcagcagctgctgaagctgcagcagcagaaggccaagctggaggccaagctgcaccagaccaccgccgccgccgccgccgccgccagcgccgtgggccccgtgcacaacagcgtgcccagcaaccccgtggccgcccccggcttcttcatccaccccagcgacgtgatcccccccacccccaagaccacccccctgttcatgaccccccccctgaccccccccaacgaggccgtgagcgtggtgatcaacgccgagctggcccagctgttccccggcagcgtgatcgacccccccgccgtgaacctggccgcccacaacaagaacagcaacaagagcagaatgaaccccctgggcagcggcctggccctggccatcagccacgccagccacttcctgcagccccccccccaccagagcatcatcatcgagagaatgcacagcggcgccagaagattcgtgaccctggacttcggcagacccatcctgctgaccgacgtgctgatccccacctgcggcgacctggccagcctgagcatcgacatctggaccctgggcgaggaggtggacggcagaagactggtggtggccaccgacatcagcacccacagcctgatcctgcacgacctgatccccccccccgtgtgcagattcatgaagatcaccgtgatcggcagatacggcagcaccaacgccagagccaagatccccctgggcttctactacggccacacctacatcctgccctgggagagcgagctgaagctgatgcacgaccccctgaagggcgagggcgagagcgccaaccagcccgagatcgaccagcacctggccatgatggtggccctgcaggaggacatccagtgcagatacaacctggcctgccacagactggagaccctgctgcagagcatcgacctgccccccctgaacagcgccaacaacgcccagtacttcctgagaaagcccgacaaggccgtggaggaggacagcagagtgttcagcgcctaccaggactgcatccagctgcagctgcagctgaacctggcccacaacgccgtgcagagactgaaggtggccctgggcgccagcagaaagatgctgagcgagaccagcaaccccgaggacctgatccagaccagcagcaccgagcagctgagaaccatcatcagatacctgctggacaccctgctgagcctgctgcacgccagcaacggccacagcgtgcccgccgtgctgcagagcaccttccacgcccaggcctgcgaggagctgttcaagcacctgtgcatcagcggcacccccaagatcagactgcacaccggcctgctgctggtgcagctgtgcggcggcgagagatggtggggccagttcctgagcaacgtgctgcaggagctgtacaacagcgagcagctgctgatcttcccccaggacagagtgttcatgctgctgagctgcatcggccagagaagcctgagcaacagcggcgtgctggagagcctgctgaacctgctggacaacctgctgagccccctgcagccccagctgcccatgcacagaagaaccgagggcgtgctggacatccccatgatcagctgggtggtgatgctggtgagcagactgctggactacgtggccaccgtggaggacgaggccgccgccgccaagaagcccctgaacggcaaccagtggagcttcatcaacaacaacctgcacacccagagcctgaacagaagcagcaagggcagcagcagcctggacagactgtacagcagaaagatcagaaagcagctggtgcaccacaagcagcagctgaacctgctgaaggccaagcagaaggccctggtggagcagatggagaaggagaagatccagagcaacaagggcagcagctacaagctgctggtggagcaggccaagctgaagcaggccaccagcaagcacttcaaggacctgatcagactgagaagaaccgccgagtggagcagaagcaacctggacaccgaggtgaccaccgccaaggagagccccgagatcgagcccctgcccttcaccctggcccacgagagatgcatcagcgtggtgcagaagctggtgctgttcctgctgagcatggacttcacctgccacgccgacctgctgctgttcgtgtgcaaggtgctggccagaatcgccaacgccaccagacccaccatccacctgtgcgagatcgtgaacgagccccagctggagagactgctgctgctgctggtgggcaccgacttcaacagaggcgacatcagctggggcggcgcctgggcccagtacagcctgacctgcatgctgcaggacatcctggccggcgagctgctggcccccgtggccgccgaggccatggaggagggcaccgtgggcgacgacgtgggcgccaccgccggcgacagcgacgacagcctgcagcagagcagcgtgcagctgctggagaccatcgacgagcccctgacccacgacatcaccggcgccccccccctgagcagcctggagaaggacaaggagatcgacctggagctgctgcaggacctgatggaggtggacatcgaccccctggacatcgacctggagaaggaccccctggccgccaaggtgttcaagcccatcagcagcacctggtacgactactggggcgccgactacggcacctacaactacaacccctacatcggcggcctgggcatccccgtggccaagccccccgccaacaccgagaagaacggcagccagaccgtgagcgtgagcgtgagccaggccctggacgccagactggaggtgggcctggagcagcaggccgagctgatgctgaagatgatgagcaccctggaggccgacagcatcctgcaggccctgaccaacaccagccccaccctgagccagagccccaccggcaccgacgacagcctgctgggcggcctgcaggccgccaaccagaccagccagctgatcatccagctgagcagcgtgcccatgctgaacgtgtgcttcaacaagctgttcagcatgctgcaggtgcaccacgtgcagctggagagcctgctgcagctgtggctgaccctgagcctgaacagcagcagcaccggcaacaaggagaacggcgccgacatcttcctgtacaacgccaacagaatccccgtgatcagcctgaaccaggccagcatcaccagcttcctgaccgtgctggcctggtaccccaacaccctgctgagaacctggtgcctggtgctgcacagcctgaccctgatgaccaacatgcagctgaacagcggcagcagcagcgccatcggcacccaggagagcaccgcccacctgctggtgagcgaccccaacctgatccacgtgctggtgaagttcctgagcggcaccagcccccacggcaccaaccagcacagcccccaggtgggccccaccgccacccaggccatgcaggagttcctgaccagactgcaggtgcacctgagcagcacctgcccccagatcttcagcgagttcctgctgaagctgatccacatcctgagcaccgagagaggcgccttccagaccggccagggccccctggacgcccaggtgaagctgctggagttcaccctggagcagaacttcgaggtggtgagcgtgagcaccatcagcgccgtgatcgagagcgtgaccttcctggtgcaccactacatcacctgcagcgacaaggtgatgagcagaagcggcagcgacagcagcgtgggcgccagagcctgcttcggcggcctgttcgccaacctgatcagacccggcgacgccaaggccgtgtgcggcgagatgaccagagaccagctgatgttcgacctgctgaagctggtgaacatcctggtgcagctgcccctgagcggcaacagagagtacagcgccagagtgagcgtgaccaccaacaccaccgacagcgtgagcgacgaggagaaggtgagcggcggcaaggacggcaacggcagcagcaccagcgtgcagggcagccccgcctacgtggccgacctggtgctggccaaccagcagatcatgagccagatcctgagcgccctgggcctgtgcaacagcagcgccatggccatgatcatcggcgccagcggcctgcacctgaccaagcacgagaacttccacggcggcctggacgccatcagcgtgggcgacggcctgttcaccatcctgaccaccctgagcaagaaggccagcaccgtgcacatgatgctgcagcccatcctgacctacatggcctgcggctacatgggcagacagggcagcctggccacctgccagctgagcgagcccctgctgtggttcatcctgagagtgctggacaccagcgacgccctgaaggccttccacgacatgggcggcgtgcagctgatctgcaacaacatggtgaccagcaccagagccatcgtgaacaccgccagaagcatggtgagcaccatcatgaagttcctggacagcggccccaacaaggccgtggacagcaccctgaagaccagaatcctggccagcgagcccgacaacgccgagggcatccacaacttcgcccccctgggcaccatcaccagcagcagccccaccgcccagcccgccgaggtgctgctgcaggccacccccccccacagaagagccagaagcgccgcctggagctacatcttcctgcccgaggaggcctggtgcgacctgaccatccacctgcccgccgccgtgctgctgaaggagatccacatccagccccacctggccagcctggccacctgccccagcagcgtgagcgtggaggtgagcgccgacggcgtgaacatgctgcccctgagcacccccgtggtgaccagcggcctgacctacatcaagatccagctggtgaaggccgaggtggccagcgccgtgtgcctgagactgcacagacccagagacgccagcaccctgggcctgagccagatcaagctgctgggcctgaccgccttcggcaccaccagcagcgccaccgtgaacaaccccttcctgcccagcgaggaccaggtgagcaagaccagcatcggctggctgagactgctgcaccactgcctgacccacatcagcgacctggagggcatgatggccagcgccgccgcccccaccgccaacctgctgcagacctgcgccgccctgctgatgagcccctactgcggcatgcacagccccaacatcgaggtggtgctggtgaagatcggcctgcagagcaccagaatcggcctgaagctgatcgacatcctgctgagaaactgcgccgccagcggcagcgaccccaccgacctgaacagccccctgctgttcggcagactgaacggcctgagcagcgacagcaccatcgacatcctgtaccagctgggcaccacccaggaccccggcaccaaggacagaatccaggccctgctgaagtgggtgagcgacagcgccagagtggccgccatgaagagaagcggcagaatgaactacatgtgccccaacagcagcaccgtggagtacggcctgctgatgcccagccccagccacctgcactgcgtggccgccatcctgtggcacagctacgagctgctggtggagtacgacctgcccgccctgctggaccaggagctgttcgagctgctgttcaactggagcatgagcctgccctgcaacatggtgctgaagaaggccgtggacagcctgctgtgcagcatgtgccacgtgcaccccaactacttcagcctgctgatgggctggatgggcatcacccccccccccgtgcagtgccaccacagactgagcatgaccgacgacagcaagaagcaggacctgagcagcagcctgaccgacgacagcaagaacgcccaggcccccctggccctgaccgagagccacctggccaccctggccagcagcagccagagccccgaggccatcaagcagctgctggacagcggcctgcccagcctgctggtgagaagcctggccagcttctgcttcagccacatcagcagcagcgagagcatcgcccagagcatcgacatcagccaggacaagctgagaagacaccacgtgccccagcagtgcaacaagatgcccatcaccgccgacctggtggcccccatcctgagattcctgaccgaggtgggcaacagccacatcatgaaggactggctgggcggcagcgaggtgaaccccctgtggaccgccctgctgttcctgctgtgccacagcggcagcaccagcggcagccacaacctgggcgcccagcagaccagcgccagaagcgccagcctgagcagcgccgccaccaccggcctgaccacccagcagagaaccgccatcgagaacgccaccgtggccttcttcctgcagtgcatcagctgccaccccaacaaccagaagctgatggcccaggtgctgtgcgagctgttccagaccagcccccagagaggcaacctgcccaccagcggcaacatcagcggcttcatcagaagactgttcctgcagctgatgctggaggacgagaaggtgaccatgttcctgcagagcccctgccccctgtacaagggcagaatcaacgccaccagccacgtgatccagcaccccatgtacggcgccggccacaagttcagaaccctgcacctgcccgtgagcaccaccctgagcgacgtgctggacagagtgagcgacacccccagcatcaccgccaagctgatcagcgagcagaaggacgacaaggagaagaagaaccacgaggagaaggagaaggtgaaggccgagaacggcttccaggacaactacagcgtggtggtggccagcggcctgaagagccagagcaagagagccgtgagcgccaccccccccagaccccccagcagaagaggcagaaccatccccgacaagatcggcagcaccagcggcgccgaggccgccaacaagatcatcaccgtgcccgtgttccacctgttccacaagctgctggccggccagcccctgcccgccgagatgaccctggcccagctgctgaccctgctgtacgacagaaagctgccccagggctacagaagcatcgacctgaccgtgaagctgggcagcagagtgatcaccgaccccagcctgagcaagaccgacagctacaagagactgcaccccgagaaggaccacggcgacctgctggccagctgccccgaggacgaggccctgacccccggcgacgagtgcatggacggcatcctggacgagagcctgctggagacctgccccatccagagccccctgcaggtgttcgccggcatgggcggcctggccctgatcgccgagagactgcccatgctgtaccccgaggtgatccagcaggtgagcgcccccgtggtgaccagcaccacccaggagaagcccaaggacagcgaccagttcgagtgggtgaccatcgagcagagcggcgagctggtgtacgaggcccccgagaccgtggccgccgagcccccccccatcaagagcgccgtgcagaccatgagccccatccccgcccacagcctggccgccttcggcctgttcctgagactgcccggctacgccgaggtgctgctgaaggagagaaagcacgcccagtgcctgctgagactggtgctgggcgtgaccgacgacggcgagggcagccacatcctgcagagccccagcgccaacgtgctgcccaccctgcccttccacgtgctgagaagcctgttcagcaccacccccctgaccaccgacgacggcgtgctgctgagaagaatggccctggagatcggcgccctgcacctgatcctggtgtgcctgagcgccctgagccaccacagccccagagtgcccaacagcagcgtgaaccagaccgagccccaggtgagcagcagccacaaccccaccagcaccgaggagcagcagctgtactgggccaagggcaccggcttcggcaccggcagcaccgccagcggctgggacgtggagcaggccctgaccaagcagagactggaggaggagcacgtgacctgcctgctgcaggtgctggccagctacatcaaccccgtgagcagcgccgtgaacggcgaggcccagagcagccacgagaccagaggccagaacagcaacgccctgcccagcgtgctgctggagctgctgagccagagctgcctgatccccgccatgagcagctacctgagaaacgacagcgtgctggacatggccagacacgtgcccctgtacagagccctgctggagctgctgagagccatcgccagctgcgccgccatggtgcccctgctgctgcccctgagcaccgagaacggcgaggaggaggaggagcagagcgagtgccagaccagcgtgggcaccctgctggccaagatgaagacctgcgtggacacctacaccaacagactgagaagcaagagagagaacgtgaagaccggcgtgaagcccgacgccagcgaccaggagcccgagggcctgaccctgctggtgcccgacatccagaagaccgccgagatcgtgtacgccgccaccaccagcctgagacaggccaaccaggagaagaagctgggcgagtacagcaagaaggccgccatgaagcccaagcccctgagcgtgctgaagagcctggaggagaagtacgtggccgtgatgaagaagctgcagttcgacaccttcgagatggtgagcgaggacgaggacggcaagctgggcttcaaggtgaactaccactacatgagccaggtgaagaacgccaacgacgccaacagcgccgccagagccagaagactggcccaggaggccgtgaccctgagcaccagcctgcccctgagcagcagcagcagcgtgttcgtgagatgcgacgaggagagactggacatcatgaaggtgctgatcaccggccccgccgacaccccctacgccaacggctgcttcgagttcgacgtgtacttcccccaggactaccccagcagcccccccctggtgaacctggagaccaccggcggccacagcgtgagattcaaccccaacctgtacaacgacggcaaggtgtgcctgagcatcctgaacacctggcacggcagacccgaggagaagtggaacccccagaccagcagcttcctgcaggtgctggtgagcgtgcagagcctgatcctggtggccgagccctacttcaacgagcccggctacgagagaagcagaggcacccccagcggcacccagagcagcagagagtacgacggcaacatcagacaggccaccgtgaagtgggccatgctggagcagatcagaaaccccagcccctgcttcaaggaggtgatccacaagcacttctacctgaagagagtggagatcatggcccagtgcgaggagtggatcgccgacatccagcagtacagcagcgacaagagagtgggcagaaccatgagccaccacgccgccgccctgaagagacacaccgcccagctgagagaggagctgctgaagctgccctgccccgagggcctggaccccgacaccgacgacgcccccgaggtgtgcagagccaccaccggcgccgaggagaccctgatgcacgaccaggtgaagcccagcagcagcaaggagctgcccagcgacttccagctgtag

SEQ ID NO: 9491 - DNA, 1566 bp, synthetic construct
  misc_feature 1..1566: note = Description of Artificial Sequence: Synthetic coding sequence
  source 1..1566: mol_type = other DNA
atgagcctgagcagaagcgaggagatgcacagactgaccgagaacgtgtacaagaccatcatggagcagttcaaccccagcctgagaaacttcatcgccatgggcaagaactacgagaaggccctggccggcgtgacctacgccgccaagggctacttcgacgccctggtgaagatgggcgagctggccagcgagagccagggcagcaaggagctgggcgacgtgctgttccagatggccgaggtgcacagacagatccagaaccagctggaggagatgctgaagagcttccacaacgagctgctgacccagctggagcagaaggtggagctggacagcagatacctgagcgccgccctgaagaagtaccagaccgagcagagaagcaagggcgacgccctggacaagtgccaggccgagctgaagaagctgagaaagaagagccagggcagcaagaacccccagaagtacagcgacaaggagctgcagtacatcgacgccatcagcaacaagcagggcgagctggagaactacgtgagcgacggctacaagaccgccctgaccgaggagagaagaagattctgcttcctggtggagaagcagtgcgccgtggccaagaacagcgccgcctaccacagcaagggcaaggagctgctggcccagaagctgcccctgtggcagcaggcctgcgccgaccccagcaagatccccgagagagccgtgcagctgatgcagcaggtggccagcaacggcgccaccctgcccagcgccctgagcgccagcaagagcaacctggtgatcagcgaccccatccccggcgccaagcccctgcccgtgccccccgagctggcccccttcgtgggcagaatgagcgcccaggagagcacccccatcatgaacggcgtgaccggccccgacggcgaggactacagcccctgggccgacagaaaggccgcccagcccaagagcctgagccccccccagagccagagcaagctgagcgacagctacagcaacaccctgcccgtgagaaagagcgtgacccccaagaacagctacgccaccaccgagaacaagaccctgcccagaagcagcagcatggccgccggcctggagagaaacggcagaatgagagtgaaggccatcttcagccacgccgccggcgacaacagcaccctgctgagcttcaaggagggcgacctgatcaccctgctggtgcccgaggccagagacggctggcactacggcgagagcgagaagaccaagatgagaggctggttccccttcagctacaccagagtgctggacagcgacggcagcgacagactgcacatgagcctgcagcagggcaagagcagcagcaccggcaacctgctggacaaggacgacctggccatccccccccccgactacggcgccgccagcagagccttccccgcccagaccgccagcggcttcaagcagagaccctacagcgtggccgtgcccgccttcagccagggcctggacgactacggcgccagaagcatgagcagcggcagcggcaccctggtgagcaccgtgtag

SEQ ID NO: 9492 - DNA, 1659 bp, synthetic construct
  misc_feature 1..1659: note = Description of Artificial Sequence: Synthetic coding sequence
  source 1..1659: mol_type = other DNA
atgagcctgagcagaagcgaggagatgcacagactgaccgagaacgtgtacaagaccatcatggagcagttcaaccccagcctgagaaacttcatcgccatgggcaagaactacgagaaggccctggccggcgtgacctacgccgccaagggctacttcgacgccctggtgaagatgggcgagctggccagcgagagccagggcagcaaggagctgggcgacgtgctgttccagatggccgaggtgcacagacagatccagaaccagctggaggagatgctgaagagcttccacaacgagctgctgacccagctggagcagaaggtggagctggacagcagatacctgagcgccgccctgaagaagtaccagaccgagcagagaagcaagggcgacgccctggacaagtgccaggccgagctgaagaagctgagaaagaagagccagggcagcaagaacccccagaagtacagcgacaaggagctgcagtacatcgacgccatcagcaacaagcagggcgagctggagaactacgtgagcgacggctacaagaccgccctgaccgaggagagaagaagattctgcttcctggtggagaagcagtgcgccgtggccaagaacagcgccgcctaccacagcaagggcaaggagctgctggcccagaagctgcccctgtggcagcaggcctgcgccgaccccagcaagatccccgagagagccgtgcagctgatgcagcaggtggccagcaacggcgccaccctgcccagcgccctgagcgccagcaagagcaacctggtgatcagcgaccccatccccggcgccaagcccctgcccgtgccccccgagctggcccccttcgtgggcagaatgagcgcccaggagagcacccccatcatgaacggcgtgaccggccccgacggcgaggactacagcccctgggccgacagaaaggccgcccagcccaagagcctgagccccccccagagccagagcaagctgagcgacagctacagcaacaccctgcccgtgagaaagagcgtgacccccaagaacagctacgccaccaccgagaacaagaccctgcccagaagcagcagcatggccgccggcctggagagaaacggcagaatgagagtgaaggccatcttcagccacgccgccggcgacaacagcaccctgctgagcttcaaggagggcgacctgatcaccctgctggtgcccgaggccagagacggctggcactacggcgagagcgagaagaccaagatgagaggctggttccccttcagctacaccagagtgctggacagcgacggcagcgacagactgcacatgagcctgcagcagggcaagagcagcagcaccggcaacctgctggacaaggacgacctggccatccccccccccgactacggcgccgccagcagagccttccccgcccagaccgccagcggcttcaagcagagaccctacagcgtggccgtgcccgccttcagccagggcctggacgactacggcgccagaagcatgagcagaaaccccttcgcccacgtgcagctgaagcccaccgtgaccaacgacagatgcgacctgagcgcccagggccccgagggcagagagcacggcgacggcagcgccagaaccctggccggcagatag

SEQ ID NO: 9493 - DNA, 1371 bp, synthetic construct
  misc_feature 1..1371: note = Description of Artificial Sequence: Synthetic coding sequence
  source 1..1371: mol_type = other DNA
atggccgaggtgcacagacagatccagaaccagctggaggagatgctgaagagcttccacaacgagctgctgacccagctggagcagaaggtggagctggacagcagatacctgagcgccgccctgaagaagtaccagaccgagcagagaagcaagggcgacgccctggacaagtgccaggccgagctgaagaagctgagaaagaagagccagggcagcaagaacccccagaagtacagcgacaaggagctgcagtacatcgacgccatcagcaacaagcagggcgagctggagaactacgtgagcgacggctacaagaccgccctgaccgaggagagaagaagattctgcttcctggtggagaagcagtgcgccgtggccaagaacagcgccgcctaccacagcaagggcaaggagctgctggcccagaagctgcccctgtggcagcaggcctgcgccgaccccagcaagatccccgagagagccgtgcagctgatgcagcaggtggccagcaacggcgccaccctgcccagcgccctgagcgccagcaagagcaacctggtgatcagcgaccccatccccggcgccaagcccctgcccgtgccccccgagctggcccccttcgtgggcagaatgagcgcccaggagagcacccccatcatgaacggcgtgaccggccccgacggcgaggactacagcccctgggccgacagaaaggccgcccagcccaagagcctgagccccccccagagccagagcaagctgagcgacagctacagcaacaccctgcccgtgagaaagagcgtgacccccaagaacagctacgccaccaccgagaacaagaccctgcccagaagcagcagcatggccgccggcctggagagaaacggcagaatgagagtgaaggccatcttcagccacgccgccggcgacaacagcaccctgctgagcttcaaggagggcgacctgatcaccctgctggtgcccgaggccagagacggctggcactacggcgagagcgagaagaccaagatgagaggctggttccccttcagctacaccagagtgctggacagcgacggcagcgacagactgcacatgagcctgcagcagggcaagagcagcagcaccggcaacctgctggacaaggacgacctggccatccccccccccgactacggcgccgccagcagagccttccccgcccagaccgccagcggcttcaagcagagaccctacagcgtggccgtgcccgccttcagccagggcctggacgactacggcgccagaagcatgagcagaaaccccttcgcccacgtgcagctgaagcccaccgtgaccaacgacagaagcgcccccctgctgagctag

SEQ ID NO: 9494 - DNA, 1128 bp, synthetic construct
  misc_feature 1..1128: note = Description of Artificial Sequence: Synthetic coding sequence
  source 1..1128: mol_type = other DNA
atgctgctgcccgagggccagagacagagagccctgggcttcggcaccgtgaccagcacctacagccccgtgggccagtacatcgacgccatcagcaacaagcagggcgagctggagaactacgtgagcgacggctacaagaccgccctgaccgaggagagaagaagattctgcttcctggtggagaagcagtgcgccgtggccaagaacagcgccgcctaccacagcaagggcaaggagctgctggcccagaagctgcccctgtggcagcaggcctgcgccgaccccagcaagatccccgagagagccgtgcagctgatgcagcaggtggccagcaacggcgccaccctgcccagcgccctgagcgccagcaagagcaacctggtgatcagcgaccccatccccggcgccaagcccctgcccgtgccccccgagctggcccccttcgtgggcagaatgagcgcccaggagagcacccccatcatgaacggcgtgaccggccccgacggcgaggactacagcccctgggccgacagaaaggccgcccagcccaagagcctgagccccccccagagccagagcaagctgagcgacagctacagcaacaccctgcccgtgagaaagagcgtgacccccaagaacagctacgccaccaccgagaacaagaccctgcccagaagcagcagcatggccgccggcctggagagaaacggcagaatgagagtgaaggccatcttcagccacgccgccggcgacaacagcaccctgctgagcttcaaggagggcgacctgatcaccctgctggtgcccgaggccagagacggctggcactacggcgagagcgagaagaccaagatgagaggctggttccccttcagctacaccagagtgctggacagcgacggcagcgacagactgcacatgagcctgcagcagggcaagagcagcagcaccggcaacctgctggacaaggacgacctggccatccccccccccgactacggcgccgccagcagagccttccccgcccagaccgccagcggcttcaagcagagaccctacagcgtggccgtgcccgccttcagccagggcctggacgactacggcgccagaagcatgagcagatag

SEQ ID NO: 9495 - DNA, 1605 bp, synthetic construct
  misc_feature 1..1605: note = Description of Artificial Sequence: Synthetic coding sequence
  source 1..1605: mol_type = other DNA
atgagcctgagcagaagcgaggagatgcacagactgaccgagaacgtgtacaagaccatcatggagcagttcaaccccagcctgagaaacttcatcgccatgggcaagaactacgagaaggccctggccggcgtgacctacgccgccaagggctacttcgacgccctggtgaagatgggcgagctggccagcgagagccagggcagcaaggagctgggcgacgtgctgttccagatggccgaggtgcacagacagatccagaaccagctggaggagatgctgaagagcttccacaacgagctgctgacccagctggagcagaaggtggagctggacagcagatacctgagcgccgccctgaagaagtaccagaccgagcagagaagcaagggcgacgccctggacaagtgccaggccgagctgaagaagctgagaaagaagagccagggcagcaagaacccccagaagtacagcgacaaggagctgcagtacatcgacgccatcagcaacaagcagggcgagctggagaactacgtgagcgacggctacaagaccgccctgaccgaggagagaagaagattctgcttcctggtggagaagcagtgcgccgtggccaagaacagcgccgcctaccacagcaagggcaaggagctgctggcccagaagctgcccctgtggcagcaggcctgcgccgaccccagcaagatccccgagagagccgtgcagctgatgcagcaggtggccagcaacggcgccaccctgcccagcgccctgagcgccagcaagagcaacctggtgatcagcgaccccatccccggcgccaagcccctgcccgtgccccccgagctggcccccttcgtgggcagaatgagcgcccaggagagcacccccatcatgaacggcgtgaccggccccgacggcgaggactacagcccctgggccgacagaaaggccgcccagcccaagagcctgagccccccccagagccagagcaagctgagcgacagctacagcaacaccctgcccgtgagaaagagcgtgacccccaagaacagctacgccaccaccgagaacaagaccctgcccagaagcagcagcatggccgccggcctggagagaaacggcagaatgagagtgaaggccatcttcagccacgccgccggcgacaacagcaccctgctgagcttcaaggagggcgacctgatcaccctgctggtgcccgaggccagagacggctggcactacggcgagagcgagaagaccaagatgagaggctggttccccttcagctacaccagagtgctggacagcgacggcagcgacagactgcacatgagcctgcagcagggcaagagcagcagcaccggcaacctgctggacaaggacgacctggccatccccccccccgactacggcgccgccagcagagccttccccgcccagaccgccagcggcttcaagcagagaccctacagcgtggccgtgcccgccttcagccagggcctggacgactacggcgccagaagcatgagcagaaaccccttcgcccacgtgcagctgaagcccaccgtgaccaacgacagaagcgcccccctgctgagctag

SEQ ID NO: 9496 - DNA, 1563 bp, synthetic construct
  misc_feature 1..1563: note = Description of Artificial Sequence: Synthetic coding sequence
  source 1..1563: mol_type = other DNA
atgagcctgagcagaagcgaggagatgcacagactgaccgagaacgtgtacaagaccatcatggagcagttcaaccccagcctgagaaacttcatcgccatgggcaagaactacgagaaggccctggccggcgtgacctacgccgccaagggctacttcgacgccctggtgaagatgggcgagctggccagcgagagccagggcagcaaggagctgggcgacgtgctgttccagatggccgaggtgcacagacagatccagaaccagctggaggagatgctgaagagcttccacaacgagctgctgacccagctggagcagaaggtggagctggacagcagatacctgagcgccgccctgaagaagtaccagaccgagcagagaagcaagggcgacgccctggacaagtgccaggccgagctgaagaagctgagaaagaagagccagggcagcaagaacccccagaagtacagcgacaaggagctgcagtacatcgacgccatcagcaacaagcagggcgagctggagaactacgtgagcgacggctacaagaccgccctgaccgaggagagaagaagattctgcttcctggtggagaagcagtgcgccgtggccaagaacagcgccgcctaccacagcaagggcaaggagctgctggcccagaagctgcccctgtggcagcaggcctgcgccgaccccagcaagatccccgagagagccgtgcagctgatgcagcaggtggccagcaacggcgccaccctgcccagcgccctgagcgccagcaagagcaacctggtgatcagcgaccccatccccggcgccaagcccctgcccgtgccccccgagctggcccccttcgtgggcagaatgagcgcccaggagagcacccccatcatgaacggcgtgaccggccccgacggcgaggactacagcccctgggccgacagaaaggccgcccagcccaagagcctgagccccccccagagccagagcaagctgagcgacagctacagcaacaccctgcccgtgagaaagagcgtgacccccaagaacagctacgccaccaccgagaacaagaccctgcccagaagcagcagcatggccgccggcctggagagaaacggcagaatgagagtgaaggccatcttcagccacgccgccggcgacaacagcaccctgctgagcttcaaggagggcgacctgatcaccctgctggtgcccgaggccagagacggctggcactacggcgagagcgagaagaccaagatgagaggctggttccccttcagctacaccagagtgctggacagcgacggcagcgacagactgcacatgagcctgcagcagggcaagagcagcagcaccggcaacctgctggacaaggacgacctggccatccccccccccgactacggcgccgccagcagagccttccccgcccagaccgccagcggcttcaagcagagaccctacagcgtggccgtgcccgccttcagccagggcctggacgactacggcgccagaagcatgagcagcgccgacgtggaggtggccagattctag

SEQ ID NO: 9497 - DNA, 720 bp, synthetic construct
  misc_feature 1..720: note = Description of Artificial Sequence: Synthetic coding sequence
  source 1..720: mol_type = other DNA
atggcccacgccggcagaaccggctacgacaacagagagatcgtgatgaagtacatccactacaagctgagccagagaggctacgagtgggacgccggcgacgtgggcgccgccccccccggcgccgcccccgcccccggcatcttcagcagccagcccggccacaccccccaccccgccgccagcagagaccccgtggccagaaccagccccctgcagacccccgccgcccccggcgccgccgccggccccgccctgagccccgtgccccccgtggtgcacctgaccctgagacaggccggcgacgacttcagcagaagatacagaagagacttcgccgagatgagcagccagctgcacctgacccccttcaccgccagaggcagattcgccaccgtggtggaggagctgttcagagacggcgtgaactggggcagaatcgtggccttcttcgagttcggcggcgtgatgtgcgtggagagcgtgaacagagagatgagccccctggtggacaacatcgccctgtggatgaccgagtacctgaacagacacctgcacacctggatccaggacaacggcggctgggacgccttcgtggagctgtacggccccagcatgagacccctgttcgacttcagctggctgagcctgaagaccctgctgagcctggccctggtgggcgcctgcatcaccctgggcgcctacctgggccacaagtag

SEQ ID NO: 9498 - DNA, 720 bp, synthetic construct; identical to SEQ ID NO: 9497
  misc_feature 1..720: note = Description of Artificial Sequence: Synthetic coding sequence
  source 1..720: mol_type = other DNA

SEQ ID NO: 9499 - DNA, 618 bp, synthetic construct
  misc_feature 1..618: note = Description of Artificial Sequence: Synthetic coding sequence
  source 1..618: mol_type = other DNA
atggcccacgccggcagaaccggctacgacaacagagagatcgtgatgaagtacatccactacaagctgagccagagaggctacgagtgggacgccggcgacgtgggcgccgccccccccggcgccgcccccgcccccggcatcttcagcagccagcccggccacaccccccaccccgccgccagcagagaccccgtggccagaaccagccccctgcagacccccgccgcccccggcgccgccgccggccccgccctgagccccgtgccccccgtggtgcacctgaccctgagacaggccggcgacgacttcagcagaagatacagaagagacttcgccgagatgagcagccagctgcacctgacccccttcaccgccagaggcagattcgccaccgtggtggaggagctgttcagagacggcgtgaactggggcagaatcgtggccttcttcgagttcggcggcgtgatgtgcgtggagagcgtgaacagagagatgagccccctggtggacaacatcgccctgtggatgaccgagtacctgaacagacacctgcacacctggatccaggacaacggcggctgggtgggcgccctgggcgacgtgagcctgggctag

SEQ ID NO: 9500 - DNA, 1578 bp, synthetic construct
  misc_feature 1..1578: note = Description of Artificial Sequence: Synthetic coding sequence
  source 1..1578: mol_type = other DNA
atgaaggccctgatcgccgccctgctgctgatcaccctgcagtacagctgcgccgtgagccccaccgactgcagcgccgtggagcccgaggccgagaaggccctggacctgatcaacaagagaagaagagacggctacctgttccagctgctgagaatcgccgacgcccacctggacagagtggagaacaccaccgtgtactacctggtgctggacgtgcaggagagcgactgcagcgtgctgagcagaaagtactggaacgactgcgagccccccgacagcagaagacccagcgagatcgtgatcggccagtgcaaggtgatcgccaccagacacagccacgagagccaggacctgagagtgatcgacttcaactgcaccaccagcagcgtgagcagcgccctggccaacaccaaggacagccccgtgctgatcgacttcttcgaggacaccgagagatacagaaagcaggccaacaaggccctggagaagtacaaggaggagaacgacgacttcgccagcttcagagtggacagaatcgagagagtggccagagtgagaggcggcgagggcaccggctacttcgtggacttcagcgtgagaaactgccccagacaccacttccccagacaccccaacgtgttcggcttctgcagagccgacctgttctacgacgtggaggccctggacctggagagccccaagaacctggtgatcaactgcgaggtgttcgacccccaggagcacgagaacatcaacggcgtgcccccccacctgggccaccccttccactggggcggccacgagagaagcagcaccaccaagccccccttcaagccccacggcagcagagaccaccaccacccccacaagccccacgagcacggccccccccccccccccgacgagagagaccacagccacggcccccccctgccccagggccccccccccctgctgcccatgagctgcagcagctgccagcacgccaccttcggcaccaacggcgcccagagacacagccacaacaacaacagcagcgacctgcacccccacaagcaccacagccacgagcagcacccccacggccaccacccccacgcccaccacccccacgagcacgacacccacagacagcacccccacggccaccacccccacggccaccacccccacggccaccacccccacggccaccacccccacggccaccacccccactgccacgacttccaggactacggcccctgcgacccccccccccacaaccagggccactgctgccacggccacggccccccccccggccacctgagaagaagaggccccggcaagggccccagacccttccactgcagacagatcggcagcgtgtacagactgccccccctgagaaagggcgaggtgctgcccctgcccgaggccaacttccccagcttccccctgccccaccacaagcaccccctgaagcccgacaaccagcccttcccccagagcgtgagcgagagctgccccggcaagttcaagagcggcttcccccaggtgagcatgttcttcacccacaccttccccaagtag

SEQ ID NO: 9501 - DNA, 2121 bp, synthetic construct
  misc_feature 1..2121: note = Description of Artificial Sequence: Synthetic coding sequence
  source 1..2121: mol_type = other DNA
atggccagccccgccgacagctgcatccagttcaccagacacgccagcgacgtgctgctgaacctgaacagactgagaagcagagacatcctgaccgacgtggtgatcgtggtgagcagagagcagttcagagcccacaagaccgtgctgatggcctgcagcggcctgttctacagcatcttcaccgaccagctgaagtgcaacctgagcgtgatcaacctggaccccgagatcaaccccgagggcttctgcatcctgctggacttcatgtacaccagcagactgaacctgagagagggcaacatcatggccgtgatggccaccgccatgtacctgcagatggagcacgtggtggacacctgcagaaagttcatcaaggccagcgaggccgagatggtgagcgccatcaagccccccagagaggagttcctgaacagcagaatgctgatgccccaggacatcatggcctacagaggcagagaggtggtggagaacaacctgcccctgagaagcgcccccggctgcgagagcagagccttcgcccccagcctgtacagcggcctgagcaccccccccgccagctacagcatgtacagccacctgcccgtgagcagcctgctgttcagcgacgaggagttcagagacgtgagaatgcccgtggccaaccccttccccaaggagagagccctgccctgcgacagcgccagacccgtgcccggcgagtacagcagacccaccctggaggtgagccccaacgtgtgccacagcaacatctacagccccaaggagaccatccccgaggaggccagaagcgacatgcactacagcgtggccgagggcctgaagcccgccgcccccagcgccagaaacgccccctacttcccctgcgacaaggccagcaaggaggaggagagacccagcagcgaggacgagatcgccctgcacttcgagccccccaacgcccccctgaacagaaagggcctggtgagcccccagagcccccagaagagcgactgccagcccaacagccccaccgagagctgcagcagcaagaacgcctgcatcctgcaggccagcggcagcccccccgccaagagccccaccgaccccaaggcctgcaactggaagaagtacaagttcatcgtgctgaacagcctgaaccagaacgccaagcccgagggccccgagcaggccgagctgggcagactgagccccagagcctacaccgccccccccgcctgccagccccccatggagcccgagaacctggacctgcagagccccaccaagctgagcgccagcggcgaggacagcaccatcccccaggccagcagactgaacaacatcgtgaacagaagcatgaccggcagccccagaagcagcagcgagagccacagccccctgtacatgcacccccccaagtgcaccagctgcggcagccagagcccccagcacgccgagatgtgcctgcacaccgccggccccaccttccccgaggagatgggcgagacccagagcgagtacagcgacagcagctgcgagaacggcgccttcttctgcaacgagtgcgactgcagattcagcgaggaggccagcctgaagagacacaccctgcagacccacagcgacaagccctacaagtgcgacagatgccaggccagcttcagatacaagggcaacctggccagccacaagaccgtgcacaccggcgagaagccctacagatgcaacatctgcggcgcccagttcaacagacccgccaacctgaagacccacaccagaatccacagcggcgagaagccctacaagtgcgagacctgcggcgccagattcgtgcaggtggcccacctgagagcccacgtgctgatccacaccggcgagaagccctacccctgcgagatctgcggcaccagattcagacacctgcagaccctgaagagccacctgagaatccacaccggcgagaagccctaccactgcgagaagtgcaacctgcacttcagacacaagagccagctgagactgcacctgagacagaagcacggcgccatcaccaacaccaaggtgcagtacagagtgagcgccaccgacctgccccccgagctgcccaaggcctgctag

SEQ ID NO: 9502 - DNA, 369 bp, synthetic construct
  misc_feature 1..369: note = Description of Artificial Sequence: Synthetic coding sequence
  source 1..369: mol_type = other DNA
atggccagccccgccgacagctgcatccagttcaccagacacgccagcgacgtgctgctgaacctgaacagactgagaagcagagacatcctgaccgacgtggtgatcgtggtgagcagagagcagttcagagcccacaagaccgtgctgatggcctgcagcggcctgttctacagcatcttcaccgaccagctgaagtgcaacctgagcgtgatcaacctggaccccgagatcaaccccgagggcttctgcatcctgctggacttcatgtacaccagcagactgaacctgagagagggcaacatcatggccgtgatggccaccgccatgtacctgcagatggagcacgtggtggacacctgcagatag

SEQ ID NO: 9503 - DNA, 315 bp, synthetic construct
  misc_feature 1..315: note = Description of Artificial Sequence: Synthetic coding sequence
  source 1..315: mol_type = other DNA
atggccagccccgccgacagctgcatccagttcaccagacacgccagcgacgtgctgctgaacctgaacagactgagaagcagagacatcctgaccgacgtggtgatcgtggtgagcagagagcagttcagagcccacaagaccgtgctgatggcctgcagcggcctgttctacagcatcttcaccgaccagctgaagtgcaacctgagcgtgatcaacctggaccccgagatcaaccccgagggcttctgcatcctgctggacttcatgtacaccagcagactgaacctgagagagggcaacatcatggcctag

SEQ ID NO: 9504 - DNA, 1953 bp, synthetic construct
  misc_feature 1..1953: note = Description of Artificial Sequence: Synthetic coding sequence
  source 1..1953: mol_type = other DNA
atggccagccccgccgacagctgcatccagttcaccagacacgccagcgacgtgctgctgaacctgaacagactgagaagcagagacatcctgaccgacgtggtgatcgtggtgagcagagagcagttcagagcccacaagaccgtgctgatggcctgcagcggcctgttctacagcatcttcaccgaccagctgaagtgcaacctgagcgtgatcaacctggaccccgagatcaaccccgagggcttctgcatcctgctggacttcatgtacaccagcagactgaacctgagagagggcaacatcatggccgtgatggccaccgccatgtacctgcagatggagcacgtggtggacacctgcagaaagttcatcaaggccagcgaggccgagatggtgagcgccatcaagccccccagagaggagttcctgaacagcagaatgctgatgccccaggacatcatggcctacagaggcagagaggtggtggagaacaacctgcccctgagaagcgcccccggctgcgagagcagagccttcgcccccagcctgtacagcggcctgagcaccccccccgccagctacagcatgtacagccacctgcccgtgagcagcctgctgttcagcgacgaggagttcagagacgtgagaatgcccgtggccaaccccttccccaaggagagagccctgccctgcgacagcgccagacccgtgcccggcgagtacagcagacccaccctggaggtgagccccaacgtgtgccacagcaacatctacagccccaaggagaccatccccgaggaggccagaagcgacatgcactacagcgtggccgagggcctgaagcccgccgcccccagcgccagaaacgccccctacttcccctgcgacaaggccagcaaggaggaggagagacccagcagcgaggacgagatcgccctgcacttcgagccccccaacgcccccctgaacagaaagggcctggtgagcccccagagcccccagaagagcgactgccagcccaacagccccaccgagagctgcagcagcaagaacgcctgcatcctgcaggccagcggcagcccccccgccaagagccccaccgaccccaaggcctgcaactggaagaagtacaagttcatcgtgctgaacagcctgaaccagaacgccaagcccgagggccccgagcaggccgagctgggcagactgagccccagagcctacaccgccccccccgcctgccagccccccatggagcccgagaacctggacctgcagagccccaccaagctgagcgccagcggcgaggacagcaccatcccccaggccagcagactgaacaacatcgtgaacagaagcatgaccggcagccccagaagcagcagcgagagccacagccccctgtacatgcacccccccaagtgcaccagctgcggcagccagagcccccagcacgccgagatgtgcctgcacaccgccggccccaccttccccgaggagatgggcgagacccagagcgagtacagcgacagcagctgcggcgagaagccctacagatgcaacatctgcggcgcccagttcaacagacccgccaacctgaagacccacaccagaatccacagcggcgagaagccctacaagtgcgagacctgcggcgccagattcgtgcaggtggcccacctgagagcccacgtgctgatccacaccggcgagaagccctacccctgcgagatctgcggcaccagattcagacacctgcagaccctgaagagccacctgagaatccacaccggcgagaagccctaccactgcgagaagtgcaacctgcacttcagacacaagagccagctgagactgcacctgagacagaagcacggcgccatcaccaacaccaaggtgcagtacagagtgagcgccaccgacctgccccccgagctgcccaaggcctgctag

SEQ ID NO: 9505 - DNA, 306 bp, synthetic construct
  misc_feature 1..306: note = Description of Artificial Sequence: Synthetic coding sequence
  source 1..306: mol_type = other DNA
atgaagttcggcatgggcagcgcccaggcctgcccctgccaggtgcccagagccgccagcaccacctgggtgccctgccagatctgcgagaccagaggcgccgccgccgccccccccctgaccctggagggccccgtgcagagccaccacggcacccccgccctgacccagggcccccagagccccagagacggcgcccagctgggcgcctgcaccagacccgtggacgtgagagacagcggcggcagacccctgcccccccccgacaccctggccagcgccggcgacttcctgtgcaccatgtag

SEQ ID NO: 9506 - DNA, 396 bp, synthetic construct
  misc_feature 1..396: note = Description of Artificial Sequence: Synthetic coding sequence
  source 1..396: mol_type = other DNA
atgaagttcggcatgggcagcgcccaggcctgcccctgccaggtgcccagagccgccagcaccacctgggtgccctgccagatctgcggcccccagcccagcctgagcctggccgagcagcacctggagagccccgtgcccagcgcccccggcgccctggccggcggccccacccaggccgcccccggcgtgagaggcgaggaggagcagtgggccagagagatcggcgcccagctgagaagaatggccgacgacctgaacgcccagtacgagagaagaagacaggaggagcagcagagacacagacccagcccctggagagtgctgtacaacctgatcatgggcctgctgcccctgcccagaggccacagagcccccgagatggagcccaactag

SEQ ID NO: 9507 - DNA, 582 bp, synthetic construct
  misc_feature 1..582: note = Description of Artificial Sequence: Synthetic coding sequence
  source 1..582: mol_type = other DNA
atggccagagccagacaggagggcagcagccccgagcccgtggagggcctggccagagacggccccagacccttccccctgggcagactggtgcccagcgccgtgagctgcggcctgtgcgagcccggcctggccgccgcccccgccgcccccaccctgctgcccgccgcctacctgtgcgcccccaccgccccccccgccgtgaccgccgccctgggcggcagcagatggcccggcggccccagaagcagacccagaggccccagacccgacggcccccagcccagcctgagcctggccgagcagcacctggagagccccgtgcccagcgcccccggcgccctggccggcggccccacccaggccgcccccggcgtgagaggcgaggaggagcagtgggccagagagatcggcgcccagctgagaagaatggccgacgacctgaacgcccagtacgagagaagaagacaggaggagcagcagagacacagacccagcccctggagagtgctgtacaacctgatcatgggcctgctgcccctgcccagaggccacagagcccccgagatggagcccaactag

SEQ ID NO: 9508 - DNA, 786 bp, synthetic construct
  misc_feature 1..786: note = Description of Artificial Sequence: Synthetic coding sequence
  source 1..786: mol_type = other DNA
atgaagttcggcatgggcagcgcccaggcctgcccctgccaggtgcccagagccgccagcaccacctgggtgccctgccagatctgcggccccagagagagacacggccccagaacccccggcggccagctgcccggcgccagaagaggccccggccccagaagacccgcccccctgcccgccagaccccccggcgccctgggcagcgtgctgagacccctgagagccagacccggctgcagacccagaagaccccaccccgccgccagatgcctgcccctgagaccccacagacccaccagaagacacagaagacccggcggcttccccctggcctggggcagcccccagcccgcccccagacccgcccccggcagaagcagcgccctggccctggccggcggcgccgcccccggcgtggccagagcccagagacccggcggcagcggcggcagaagccaccccggcggccccggcagccccagaggcggcggcaccgtgggccccggcgacagaggccccgccgccgccgacggcggcagaccccagagaaccgtgagagccgccgagaccagaggcgccgccgccgccccccccctgaccctggagggccccgtgcagagccaccacggcacccccgccctgacccagggcccccagagccccagagacggcgcccagctgggcgcctgcaccagacccgtggacgtgagagacagcggcggcagacccctgcccccccccgacaccctggccagcgccggcgacttcctgtgcaccatgtag

SEQ ID NO: 9509 - DNA, 1308 bp, synthetic construct
  misc_feature 1..1308: note = Description of Artificial Sequence: Synthetic coding sequence
  source 1..1308: mol_type = other DNA
atgctgtgcggcttccaggaggacgccacccccccccccccccccagacccagaagactgcacagaagactgcccagacccgaggaggtgggcatgctgagcctgccccccggcctgctgaccgtgagcggcagcgccgccgccgccgacgccgtgcccctgagacccggcgactgggccggcgtgagcaccgccgacagaggcgagagagcccccctgggccccgccttctgcgacctggccgtgagccccaccagccccgcctggagaggcgaggaggacgagggcgccaaggccagcagcggcgacatcggcagcctggactaccaggagttcgtggtggacatcgagagcagactgagaatggagggcgtggagctgaaggaggagtggcaggacgaggacttccccatccccctgcccgaggacgacagcatcgaggccgacatcctggccatcaccggccccgaggaccagcccggcagcctggaggtgaacggcaacaaggtgagaaagaagctgatggcccccgacatcagcctgaccctggaccccagcgacggcagcgtgctgagcgacgacctggacgagagcggcgagatcgacctggacggcctggacacccccagcgagaacagcaacgagttcgagtgggaggacgacctgcccaagcccaagaccaccgaggtgatcagaaagggcagcatcaccgagtacaccgccgccgaggagaaggaggacggcagaagatggagaatgttcagaatcggcgagcaggaccacagagtggacatgaaggccatcgagccctacaagaaggtgatcagccacggcggctactacggcgacggcctgaacgccatcgtggtgttcgccgtgtgcttcatgcccgagagcagccagcccaactacagatacctgatggacaacctgttcaagtacgtgatcggcaccctggagctgctggtggccgagaactacatgatcgtgtacctgaacggcgccaccaccagaagaaagatgcccagcctgggctggctgagaaagtgctaccagcagatcgacagaagactgagaaagaacctgaagagcctgatcatcgtgcaccccagctggttcatcagaaccctgctggccgtgaccagacccttcatcagcagcaagttcagccagaagatcagatacgtgttcaacctggccgagctggccgagctggtgcccatggagtacgtgggcatccccgagtgcatcaagcaggtggaccaggagctgaacggcaagcaggacgagcccaagaacgagcagtag

SEQ ID NO: 9510 - DNA, 1131 bp, synthetic construct
  misc_feature 1..1131: note = Description of Artificial Sequence: Synthetic coding sequence
  source 1..1131: mol_type = other DNA
atggagccctgccccagcagcgcccccccccccttctaccccggcgtgggcgaggtggccggcctgagatggttcagcatctacgaccagagacccagctggtacagaaccaagaagctgggcctgctggacatcggcagcctggactaccaggagttcgtggtggacatcgagagcagactgagaatggagggcgtggagctgaaggaggagtggcaggacgaggacttccccatccccctgcccgaggacgacagcatcgaggccgacatcctggccatcaccggccccgaggaccagcccggcagcctggaggtgaacggcaacaaggtgagaaagaagctgatggcccccgacatcagcctgaccctggaccccagcgacggcagcgtgctgagcgacgacctggacgagagcggcgagatcgacctggacggcctggacacccccagcgagaacagcaacgagttcgagtgggaggacgacctgcccaagcccaagaccaccgaggtgatcagaaagggcagcatcaccgagtacaccgccgccgaggagaaggaggacggcagaagatggagaatgttcagaatcggcgagcaggaccacagagtggacatgaaggccatcgagccctacaagaaggtgatcagccacggcggctactacggcgacggcctgaacgccatcgtggtgttcgccgtgtgcttcatgcccgagagcagccagcccaactacagatacctgatggacaacctgttcaagtacgtgatcggcaccctggagctgctggtggccgagaactacatgatcgtgtacctgaacggcgccaccaccagaagaaagatgcccagcctgggctggctgagaaagtgctaccagcagatcgacagaagactgagaaagaacctgaagagcctgatcatcgtgcaccccagctggttcatcagaaccctgctggccgtgaccagacccttcatcagcagcaagttcagccagaagatcagatacgtgttcaacctggccgagctggccgagctggtgcccatggagtacgtgggcatccccgagtgcatcaagcaggtggaccaggagctgaacggcaagcaggacgagcccaagaacgagcagtag

SEQ ID NO: 9511 - DNA, 939 bp, synthetic construct
  misc_feature 1..939: note = Description of Artificial Sequence: Synthetic coding sequence
  source 1..939: mol_type = other DNA
atggccaaggtgttcagcttcatcctggtgaccaccgccctgaccatgggcagagagatcagcgccctggaggactgcgcccaggagcagatgagactgagagcccaggtgagactgctggagaccagagtgaagcagcagcaggtgaagatcaagcagctgctgcaggagaacgaggtgcagttcctggacaagggcgacgagaacaccgtgatcgacctgggcagcaagagacagtacgccgactgcagcgagatcttcaacgacggctacaagctgagcggcttctacaagatcaagcccctgcagagccccgccgagttcagcgtgtactgcgacatgagcgacggcggcggctggaccgtgatccagagaagaagcgacggcagcgagaacttcaacagaggctggaaggactacgagaacggcttcggcaacttcgtgcagaagcacggcgagtactggctgggcaacaagaacctgcacttcctgaccacccaggaggactacaccctgaagatcgacctggccgacttcgagaagaacagcagatacgcccagtacaagaacttcaaggtgggcgacgagaagaacttctacgagctgaacatcggcgagtacagcggcaccgccggcgacagcctggccggcaacttccaccccgaggtgcagtggtgggccagccaccagagaatgaagttcagcacctgggacagagaccacgacaactacgagggcaactgcgccgaggaggaccagagcggctggtggttcaacagatgccacagcgccaacctgaacggcgtgtactacagcggcccctacaccgccaagaccgacaacggcatcgtgtggtacacctggcacggctggtggtacagcctgaagagcgtggtgatgaagatcagacccaacgacttcatccccaacgtgatctag

SEQ ID NO: 9512 - DNA, 660 bp, synthetic construct
  misc_feature 1..660: note = Description of Artificial Sequence: Synthetic coding sequence
  source 1..660: mol_type = other DNA
atgagcagccacctggtggagccccccccccccctgcacaacaacaacaacaactgcgaggagaacgagcagagcctgcccccccccgccggcctgaacagcagctgggtggagctgcccatgaacagcagcaacggcaacgacaacggcaacggcaagaacggcggcctggagcacgtgcccagcagcagcagcatccacaacggcgacatggagaagatcctgctggacgcccagcacgagagcggccagagcagcagcagaggcagcagccactgcgacagccccagcccccaggaggacggccagatcatgttcgacgtggagatgcacaccagcagagaccacagcagccagagcgaggaggaggtggtggagggcgagaaggaggtggaggccctgaagaagagcgccgactgggtgagcgactggagcagcagacccgagaacatcccccccaaggagttccacttcagacaccccaagagaagcgtgagcctgagcatgagaaagagcggcgccatgaagaagggcggcatcttcagcgccgagttcctgaaggtgttcatccccagcctgttcctgagccacgtgctggccctgggcctgggcatctacatcggcaagagactgagcacccccagcgccagcacctactag

SEQ ID NO: 9513 - DNA, 540 bp, synthetic construct
  misc_feature 1..540: note = Description of Artificial Sequence: Synthetic coding sequence
  source 1..540: mol_type = other DNA
atgaacagcagcaacggcaacgacaacggcaacggcaagaacggcggcctggagcacgtgcccagcagcagcagcatccacaacggcgacatggagaagatcctgctggacgcccagcacgagagcggccagagcagcagcagaggcagcagccactgcgacagccccagcccccaggaggacggccagatcatgttcgacgtggagatgcacaccagcagagaccacagcagccagagcgaggaggaggtggtggagggcgagaaggaggtggaggccctgaagaagagcgccgactgggtgagcgactggagcagcagacccgagaacatcccccccaaggagttccacttcagacaccccaagagaagcgtgagcctgagcatgagaaagagcggcgccatgaagaagggcggcatcttcagcgccgagttcctgaaggtgttcatccccagcctgttcctgagccacgtgctggccctgggcctgggcatctacatcggcaagagactgagcacccccagcgccagcacctactag

SEQ ID NO: 9514 - DNA, 540 bp, synthetic construct; identical to SEQ ID NO: 9513
  misc_feature 1..540: note = Description of Artificial Sequence: Synthetic coding sequence
  source 1..540: mol_type = other DNA

SEQ ID NO: 9515 - DNA, 540 bp, synthetic construct; identical to SEQ ID NO: 9513
  misc_feature 1..540: note = Description of Artificial Sequence: Synthetic coding sequence
  source 1..540: mol_type = other DNA

SEQ ID NO: 9516 - DNA, 636 bp, synthetic construct
  misc_feature 1..636: note = Description of Artificial Sequence: Synthetic coding sequence
  source 1..636: mol_type = other DNA
atggccagcggccagggccccggcccccccagacaggagtgcggcgagcccgccctgcccagcgccagcgaggagcaggtggcccaggacaccgaggaggtgttcagaagctacgtgttctacagacaccagcaggagcaggaggccgagggcgtggccgcccccgccgaccccgagatggtgaccctgcccctgcagcccagcagcaccatgggccaggtgggcagacagctggccatcatcggcgacgacatcaacagaagatacgacagcgagttccagaccatgctgcagcacctgcagcccaccgccgagaacgcctacgagtacttcaccaagatcgccaccagcctgttcgagagcggcatcaactggggcagagtggtggccctgctgggcttcggctacagactggccctgcacgtgtaccagcacggcctgaccggcttcctgggccaggtgaccagattcgtggtggacttcatgctgcaccactgcatcgccagatggatcgcccagagaggcggctgggtggccgccctgaacctgggcaacggccccatcctgaacgtgctggtggtgctgggcgtggtgctgctgggccagttcgtggtgagaagattcttcaagagctag

SEQ ID NO: 9517 - DNA, 576 bp, synthetic construct
  misc_feature 1..576: note = Description of Artificial Sequence: Synthetic coding sequence
  source 1..576: mol_type = other DNA
atggccagcggccagggccccggcccccccagacaggagtgcggcgagcccgccctgcccagcgccagcgaggagcaggtggcccaggacaccgaggaggtgttcagaagctacgtgttctacagacaccagcagcagcccagcagcaccatgggccaggtgggcagacagctggccatcatcggcgacgacatcaacagaagatacgacagcgagttccagaccatgctgcagcacctgcagcccaccgccgagaacgcctacgagtacttcaccaagatcgccaccagcctgttcgagagcggcatcaactggggcagagtggtggccctgctgggcttcggctacagactggccctgcacgtgtaccagcacggcctgaccggcttcctgggccaggtgaccagattcgtggtggacttcatgctgcaccactgcatcgccagatggatcgcccagagaggcggctgggtggccgccctgaacctgggcaacggccccatcctgaacgtgctggtggtgctgggcgtggtgctgctgggccagttcgtggtgagaagattcttcaagagctag

SEQ ID NO: 9518 - DNA, 636 bp, synthetic construct; identical to SEQ ID NO: 9516
  misc_feature 1..636: note = Description of Artificial Sequence: Synthetic coding sequence
  source 1..636: mol_type = other DNA

SEQ ID NO: 9519 - DNA, 462 bp, synthetic construct
  misc_feature 1..462: note = Description of Artificial Sequence: Synthetic coding sequence
  source 1..462: mol_type = other DNA
atggccagcggccagggccccggcccccccagacaggagtgcggcgagcccgccctgcccagcgccagcgaggagcaggtggcccaggacaccgaggaggtgttcagaagctacgtgttctacagacaccagcaggagcaggaggccgagggcgtggccgcccccgccgaccccgagatggtgaccctgcccctgcagcccagcagcaccatgggccaggtgggcagacagctggccatcatcggcgacgacatcaacagaagatacgacagcgagttccagaccatgctgcagcacctgcagcccaccgccgagaacgcctacgagtacttcaccaagatcgccaccagacccgccgccacccccaccgcctgcctgagagtggccagcatcggcgccgtgtggtggctgttctgggccagcgccaccgtgtggccctacaccagcaccagcatggcctag

SEQ ID NO: 9520 - DNA, 507 bp, synthetic construct
  misc_feature 1..507: note = Description of Artificial Sequence: Synthetic coding sequence
  source 1..507: mol_type = other DNA
atgttccagatccccgagttcgagcccagcgagcaggaggacagcagcagcgccgagagaggcctgggccccagccccgccggcgacggccccagcggcagcggcaagcaccacagacaggcccccggcctgctgtgggacgccagccaccagcaggagcagcccaccagcagcagccaccacggcggcgccggcgccgtggagatcagaagcagacacagcagctaccccgccggcaccgaggacgacgagggcatgggcgaggagcccagccccttcagaggcagaagcagaagcgccccccccaacctgtgggccgcccagagatacggcagagagctgagaagaatgagcgacgagttcgtggacagcttcaagaagggcctgcccagacccaagagcgccggcaccgccacccagatgagacagagcagcagctggaccagagtgttccagagctggtgggacagaaacctgggcagaggcagcagcgcccccagccagtag

SEQ ID NO: 9521 - DNA, 507 bp, synthetic construct; identical to SEQ ID NO: 9520
  misc_feature 1..507: note = Description of Artificial Sequence: Synthetic coding sequence
  source 1..507: mol_type = other DNA

SEQ ID NO: 9522 - DNA, 450 bp, synthetic construct
  misc_feature 1..450: note = Description of Artificial Sequence: Synthetic coding sequence
  source 1..450: mol_type = other DNA
atgttccagatccccgagttcgagcccagcgagcaggaggacagcagcagcgccgagagaggcctgggccccagccccgccggcgacggccccagcggcagcggcaagcaccacagacaggcccccggcctgctgtgggacgccagccaccagcaggagcagcccaccagcagcagccaccacggcggcgccggcgccgtggagatcagaagcagacacagcagctaccccgccggcaccgaggacgacgagggcatgggcgaggagcccagccccttcagaggcagaagcagaagcgccccccccaacctgtgggccgcccagagatacggcagagagctgagaagaatgagcgacgagttcgtggacagcttcaagaagggcctgcccagacccaagagcgccggcaccgccacccagatgagacagagcagcagaagactgagatag

SEQ ID NO: 9523 - DNA, 591 bp, synthetic construct
  misc_feature 1..591: note = Description of Artificial Sequence: Synthetic coding sequence
  source 1..591: mol_type = other DNA
atgaacagaagccaggaggtgaccagagacgaggagagcaccagaagcgaggaggtgaccagagaggagatggccgccgccggcctgaccgtgaccgtgacccacagcaacgagaagcacgacctgcacgtgaccagccagcagggcagcagcgagcccgtggtgcaggacctggcccaggtggtggaggaggtgatcggcgtgccccagagcttccagaagctgatcttcaagggcaagagcctgaaggagatggagacccccctgagcgccctgggcatccaggacggctgcagagtgatgctgatcggcaagaagaacagcccccaggaggaggtggagctgaagaagctgaagcacctggagaagagcgtggagaagatcgccgaccagctggaggagctgaacaaggagctgaccggcatccagcagggcttcctgcccaaggacctgcaggccgaggccctgtgcaagctggacagaagagtgaaggccaccatcgagcagttcatgaagatcctggaggagatcgacaccctgatcctgcccgagaacttccccaccctgaccctggtgctgaacgagaagtag

SEQ ID NO: 9524 - DNA, 693 bp, synthetic construct
  misc_feature 1..693: note = Description of Artificial Sequence: Synthetic coding sequence
  source 1..693: mol_type = other DNA
atgaacagaagccaggaggtgaccagagacgaggagagcaccagaagcgaggaggtgaccagagaggagatggccgccgccggcctgaccgtgaccgtgacccacagcaacgagaagcacgacctgcacgtgaccagccagcagggcagcagcgagcccgtggtgcaggacctggcccaggtggtggaggaggtgatcggcgtgccccagagcttccagaagctgatcttcaagggcaagagcctgaaggagatggagacccccctgagcgccctgggcatccaggacggctgcagagtgatgctgatcggcaagaagaacagcccccaggaggaggtggagctgaagaagctgaagcacctggagaagagcgtggagaagatcgccgaccagctggaggagctgaacaaggagctgaccggcatccagcagggcttcctgcccaaggacctgcaggccgaggccctgtgcaagctggacagaagagtgaaggccaccatcgagcagttcatgaagatcctggaggagatcgacaccctgatcctgcccgagaacttcaaggacagcagactgaagagaaagggcctggtgaagaaggtgcaggccttcctggccgagtgcgacaccgtggagcagaacatctgccaggagaccgagagactgcagagcaccaacttcgccctggccgagtag

SEQ ID NO: 9525 - DNA, 1038 bp, synthetic construct
  misc_feature 1..1038: note = Description of Artificial Sequence: Synthetic coding sequence
  source 1..1038: mol_type = other DNA
ctggcccagagaggcggcgccagaagacccagaggcgacagagagagactgggcagcagactgagagccctgagacccggcagagagcccagacagagcgagccccccgcccagagaggccccccccccagcggcagaccccccgccagaagcaccgccagcggccacgacagacccaccagaggcgccgccgccggcgccagaagacccagaatgaagaagaagaccagaagaagaagcaccagaagcgaggagctgaccagaagcgaggagctgaccctgagcgaggaggccacctggagcgaggaggccacccagagcgaggaggccacccagggcgaggagatgaacagaagccaggaggtgaccagagacgaggagagcaccagaagcgaggaggtgaccagagaggagatggccgccgccggcctgaccgtgaccgtgacccacagcaacgagaagcacgacctgcacgtgaccagccagcagggcagcagcgagcccgtggtgcaggacctggcccaggtggtggaggaggtgatcggcgtgccccagagcttccagaagctgatcttcaagggcaagagcctgaaggagatggagacccccctgagcgccctgggcatccaggacggctgcagagtgatgctgatcggcaagaagaacagcccccaggaggaggtggagctgaagaagctgaagcacctggagaagagcgtggagaagatcgccgaccagctggaggagctgaacaaggagctgaccggcatccagcagggcttcctgcccaaggacctgcaggccgaggccctgtgcaagctggacagaagagtgaaggccaccatcgagcagttcatgaagatcctggaggagatcgacaccctgatcctgcccgagaacttcaaggacagcagactgaagagaaagggcctggtgaagaaggtgcaggccttcctggccgagtgcgacaccgtggagcagaacatctgccaggagaccgagagactgcagagcaccaacttcgccctggccgagtag

SEQ ID NO: 9526 - DNA, 1728 bp, synthetic construct
  misc_feature 1..1728: note = Description of Artificial Sequence: Synthetic coding sequence
  source 1..1728: mol_type = other DNA
atgagcgccgccacccacagccccatgatgcaggtggccagcggcaacggcgacagagaccccctgccccccggctgggagatcaagatcgacccccagaccggctggcccttcttcgtggaccacaacagcagaaccaccacctggaacgaccccagagtgcccagcgagggccccaaggagacccccagcagcgccaacggccccagcagagagggcagcagactgccccccgccagagagggccaccccgtgtacccccagctgagacccggctacatccccatccccgtgctgcacgagggcgccgagaacagacaggtgcaccccttccacgtgtacccccagcccggcatgcagagattcagaaccgaggccgccgccgccgccccccagagaagccagagccccctgagaggcatgcccgagaccacccagcccgacaagcagtgcggccaggtggccgccgccgccgccgcccagccccccgccagccacggccccgagagaagccagagccccgccgccagcgactgcagcagcagcagcagcagcgccagcctgcccagcagcggcagaagcagcctgggcagccaccagctgcccagaggctacatcagcatccccgtgatccacgagcagaacgtgaccagacccgccgcccagcccagcttccaccaggcccagaagacccactaccccgcccagcagggcgagtaccagacccaccagcccgtgtaccacaagatccagggcgacgactgggagcccagacccctgagagccgccagccccttcagaagcagcgtgcagggcgccagcagcagagagggcagccccgccagaagcagcacccccctgcacagccccagccccatcagagtgcacaccgtggtggacagaccccagcagcccatgacccacagagagaccgcccccgtgagccagcccgagaacaagcccgagagcaagcccggccccgtgggccccgagctgccccccggccacatccccatccaggtgatcagaaaggaggtggacagcaagcccgtgagccagaagccccccccccccagcgagaaggtggaggtgaaggtgccccccgcccccgtgccctgccccccccccagccccggccccagcgccgtgcccagcagccccaagagcgtggccaccgaggagagagccgcccccagcaccgcccccgccgaggccaccccccccaagcccggcgaggccgaggccccccccaagcaccccggcgtgctgaaggtggaggccatcctggagaaggtgcagggcctggagcaggccgtggacaacttcgagggcaagaagaccgacaagaagtacctgatgatcgaggagtacctgaccaaggagctgctggccctggacagcgtggaccccgagggcagagccgacgtgagacaggccagaagagacggcgtgagaaaggtgcagaccatcctggagaagctggagcagaaggccatcgacgtgcccggccaggtgcaggtgtacgagctgcagcccagcaacctggaggccgaccagcccctgcaggccatcatggagatgggcgccgtggccgccgacaagggcaagaagaacgccggcaacgccgaggacccccacaccgagacccagcagcccgaggccaccgccgccgccaccagcaaccccagcagcatgaccgacacccccggcaaccccgccgccccctag

SEQ ID NO: 9527 - DNA, 978 bp, synthetic construct
  misc_feature 1..978: note = Description of Artificial Sequence: Synthetic coding sequence
  source 1..978: mol_type = other DNA
atgcaggagacccccagcagcgccaacggccccagcagagagggcagcagactgccccccgccagagagggccaccccgtgtacccccagctgagacccggctacatccccatccccgtgctgcacgagggcgccgagaacagacaggtgcaccccttccacgtgtacccccagcccggcatgcagagattcagaaccgaggccgccgccgccgccccccagagaagccagagccccctgagaggcatgcccgagaccacccagcccgacaagcagtgcggccaggtggccgccgccgccgccgcccagccccccgccagccacggccccgagagaagccagagccccgccgccagcgactgcagcagcagcagcagcagcgccagcctgcccagcagcggcagaagcagcctgggcagccaccagctgcccagaggctacatcagcatccccgtgatccacgagcagaacgtgaccagacccgccgcccagcccagcttccaccaggcccagaagacccactaccccgcccagcagggcgagtaccagacccaccagcccgtgtaccacaagatccagggcgacgactgggagcccagacccctgagagccgccagccccttcagaagcagcgtgcagggcgccagcagcagagagggcagccccgccagaagcagcacccccctgcacagccccagccccatcagagtgcacaccgtggtggacagaccccagcccatgacccacagagagaccgcccccgtgagccagcccgagaacaagcccgagagcaagcccggccccgtgggccccgagctgccccccggccacatccccatccaggtgatcagaaaggaggtggacagcaagcccgtgagccagaagccccccccccccagcgagaaggtggaggtgaaggtgccccccgcccccgtgccctgccccccccccagccccggccccagcgccgtgccctag

SEQ ID NO: 9528 - DNA, 657 bp, synthetic construct
  misc_feature 1..657: note = Description of Artificial Sequence: Synthetic coding sequence
  source 1..657: mol_type = other DNA
atggacggcagcggcgagcagcccagaggcggcggccccaccagcagcgagcagatcatgaagaccggcgccctgctgctgcagggcttcatccaggacagagccggcagaatgggcggcgaggcccccgagctggccctggaccccgtgccccaggacgccagcaccaagaagctgagcgagtgcctgaagagaatcggcgacgagctggacagcaacatggagctgcagagaatgatcgccgccgtggacaccgacagccccagagaggtgttcttcagagtggccgccgacatgttcagcgacggcaacttcaactggggcagagtggtggccctgttctacttcgccagcaagctggtgctgaaggccctgtgcaccaaggtgcccgagctgatcagaaccatcatgggctggaccctggacttcctgagagagagactgctgggctggatccaggaccagggcggctgggtgagactgctgaagcccccccacccccaccacagagccctgaccaccgcccccgccccccccagcctgccccccgccacccccctgggcccctgggccttctggagcagaagccagtggtgccccctgcccatcttcagaagcagcgacgtggtgtacaacgccttcagcctgagagtgtag

SEQ ID NO: 9529 - DNA, 579 bp, synthetic construct
  misc_feature 1..579: note = Description of Artificial Sequence: Synthetic coding sequence
  source 1..579: mol_type = other DNA
atggacggcagcggcgagcagcccagaggcggcggccccaccagcagcgagcagatcatgaagaccggcgccctgctgctgcagggcttcatccaggacagagccggcagaatgggcggcgaggcccccgagctggccctggaccccgtgccccaggacgccagcaccaagaagctgagcgagtgcctgaagagaatcggcgacgagctggacagcaacatggagctgcagagaatgatcgccgccgtggacaccgacagccccagagaggtgttcttcagagtggccgccgacatgttcagcgacggcaacttcaactggggcagagtggtggccctgttctacttcgccagcaagctggtgctgaaggccctgtgcaccaaggtgcccgagctgatcagaaccatcatgggctggaccctggacttcctgagagagagactgctgggctggatccaggaccagggcggctgggacggcctgctgagctacttcggcacccccacctggcagaccgtgaccatcttcgtggccggcgtgctgaccgccagcctgaccatctggaagaagatgggctag

SEQ ID NO: 9530 - DNA, 432 bp, synthetic construct
  misc_feature 1..432: note = Description of Artificial Sequence: Synthetic coding sequence
  source 1..432: mol_type = other DNA
atggacggcagcggcgagcagcccagaggcggcggccccaccagcagcgagcagatcatgaagaccggcgccctgctgctgcagggcatgatcgccgccgtggacaccgacagccccagagaggtgttcttcagagtggccgccgacatgttcagcgacggcaacttcaactggggcagagtggtggccctgttctacttcgccagcaagctggtgctgaaggccctgtgcaccaaggtgcccgagctgatcagaaccatcatgggctggaccctggacttcctgagagagagactgctgggctggatccaggaccagggcggctgggacggcctgctgagctacttcggcacccccacctggcagaccgtgaccatcttcgtggccggcgtgctgaccgccagcctgaccatctggaagaagatgggctag

SEQ ID NO: 9531 - DNA, 126 bp, synthetic construct
  misc_feature 1..126: note = Description of Artificial Sequence: Synthetic coding sequence
  source 1..126: mol_type = other DNA
atggacggcagcggcgagcagcccagaggcggcgtgagcagcagaatcgagcagggcgagtggggcggcagacaccccagctggccctggaccagatgcctgagaatgagaccccccagaagctag

SEQ ID NO: 9532 - DNA, 540 bp, synthetic construct
  misc_feature 1..540: note = Description of Artificial Sequence: Synthetic coding sequence
  source 1..540: mol_type = other DNA
atggacggcagcggcgagcagcccagaggcggcggccccaccagcagcgagcagatcatgaagaccggcgccctgctgctgcagggcttcatccaggacagagccggcagaatgggcggcgaggcccccgagctggccctggaccccgtgccccaggacgccagcaccaagaagctgagcgagtgcctgaagagaatcggcgacgagctggacagcaacatggagctgcagagaatgatcgccgccgtggacaccgacagccccagagaggtgttcttcagagtggccgccgacatgttcagcgacggcaacttcaactggggcagagtggtggccctgttctacttcgccagcaagctggtgctgaaggccctgtgcaccaaggtgcccgagctgatcagaaccatcatgggctggaccctggacttcctgagagagagactgctgggctggatccaggaccagggcggctggaccgtgaccatcttcgtggccggcgtgctgaccgccagcctgaccatctggaagaagatgggctag

SEQ ID NO: 9533 - DNA, 495 bp, synthetic construct
  misc_feature 1..495: note = Description of Artificial Sequence: Synthetic coding sequence
  source 1..495: mol_type = other DNA
atggacggcagcggcgagcagcccagaggcggcggccccaccagcagcgagcagatcatgaagaccggcgccctgctgctgcagggcttcatccaggacagagccggcagaatgggcggcgaggcccccgagctggccctggaccccgtgccccaggacgccagcaccaagaagctgagcgagtgcctgaagagaatcggcgacgagctggacagcaacatggagctgcagagaatgatcgccgccgtggacaccgacagccccagagaggtgttcttcagagtggccgccgacatgttcagcgacggcaacttcaactggggcagagtggtggccctgttctacttcgccagcaagctggtgctgaaggccggcgtgaagtggagagacctgggcagcctgcagcccctgccccccggcttcaagagattcacctgcctgagcatccccagaagctgggactacagaccctgcgcccccagatgcagaaactag

SEQ ID NO: 9534 - DNA, 1806 bp, synthetic construct
  misc_feature 1..1806: note = Description of Artificial Sequence: Synthetic coding sequence
  source 1..1806: mol_type = other DNA
atggcctacgacgacagcgtgaagaaggaggactgcttcgacggcgaccacaccttcgaggacatcggcctggccgccggcagaagccagagagagaagaagagaagctacaaggacttcctgagagaggaggaggagatcgccgcccaggtgagaaacagcagcaagaagaagctgaaggacagcgagctgtacttcctgggcaccgacacccacaagaagaagagaaagcacagcagcgacgactactactacggcgacatcagcagcctggagagcagccagaagaagaagaagaagagcagcccccagagcaccgacaccgccatggacctgctgaaggccatcaccagccccctggccgccggcagcaagcccagcaagaagaccggcgagaagagcagcggcagcagcagccacagcgagagcaagaaggagcaccacagaaagaaggtgagcggcagcagcggcgagctgcccctggaggacggcggcagccacaagagcaagaagatgaagcccctgtacgtgaacaccgagaccctgaccctgagagagcccgacggcctgaagatgaagctgatcctgagccccaaggagaagggcagcagcagcgtggacgaggagagcttccagtaccccagccagcaggccaccgtgaagaagagcagcaagaagagcgccagagacgagcagggcgccctgctgctgggccacgagctgcagagcttcctgaagaccgccagaaagaagcacaagagcagcagcgacgcccacagcagccccggccccgagggctgcggcagcgacgccagccagttcgccgagagccacagcgccaacctggacctgagcggcctggagcccatcctggtggagagcgacagcagcagcggcggcgagctggaggccggcgagctggtgatcgacgacagctacagagagatcaagaagaagaagaagagcaagaagagcaagaagaagaaggacaaggagaagcacaaggagaagagacacagcaagagcaagagaagcctgggcctgagcgccgtgcccgtgggcgaggtgaccgtgaccagcggccccccccccagcatcccctacgccggcgccgccgccccccccctgcccctgcccggcctgcacaccgacggccacagcgagaagaagaagaagaaggaggagaaggacaaggagagagagagaggcgagaagcccaagaagaagaacatgagcgcctaccaggtgttctgcaaggagtacagagtgaccatcgtggccgaccaccccggcatcgacttcggcgagctgagcaagaagctggccgaggtgtggaagcagctgcccgagaaggacaagctgatctggaagcagaaggcccagtacctgcagcacaagcagaacaaggccgaggccaccaccgtgaagagaaaggccagcagcagcgagggcagcatgaaggtgaaggccagcagcgtgggcgtgctgagcccccagaagaagagcccccccaccaccatgctgctgcccgccagccccgccaaggcccccgagaccgagcccatcgacgtggccgcccacctgcagctgctgggcgagagcctgagcctgatcggccacagactgcaggagaccgagggcatggtggccgtgagcggcagcctgagcgtgctgctggacagcatcatctgcgccctgggccccctggcctgcctgaccacccagctgcccgagctgaacggctgccccaagcaggtgctgagcaacaccctggacaacatcgcctacatcatgcccggcctgtag

SEQ ID NO: 9535 - DNA, 702 bp, synthetic construct
  misc_feature 1..702: note = Description of Artificial Sequence: Synthetic coding sequence
  source 1..702: mol_type = other DNA
atgagccagagcaacagagagctggtggtggacttcctgagctacaagctgagccagaagggctacagctggagccagttcagcgacgtggaggagaacagaaccgaggcccccgagggcaccgagagcgagatggagacccccagcgccatcaacggcaaccccagctggcacctggccgacagccccgccgtgaacggcgccaccggccacagcagcagcctggacgccagagaggtgatccccatggccgccgtgaagcaggccctgagagaggccggcgacgagttcgagctgagatacagaagagccttcagcgacctgaccagccagctgcacatcacccccggcaccgcctaccagagcttcgagcaggtggtgaacgagctgttcagagacggcgtgaactggggcagaatcgtggccttcttcagcttcggcggcgccctgtgcgtggagagcgtggacaaggagatgcaggtgctggtgagcagaatcgccgcctggatggccacctacctgaacgaccacctggagccctggatccaggagaacggcggctgggacaccttcgtggagctgtacggcaacaacgccgccgccgagagcagaaagggccaggagagattcaacagatggttcctgaccggcatgaccgtggccggcgtggtgctgctgggcagcctgttcagcagaaagtag

SEQ ID NO: 9536 - DNA, 513 bp, synthetic construct
  misc_feature 1..513: note = Description of Artificial Sequence: Synthetic coding sequence
  source 1..513: mol_type = other DNA
atgagccagagcaacagagagctggtggtggacttcctgagctacaagctgagccagaagggctacagctggagccagttcagcgacgtggaggagaacagaaccgaggcccccgagggcaccgagagcgagatggagacccccagcgccatcaacggcaaccccagctggcacctggccgacagccccgccgtgaacggcgccaccggccacagcagcagcctggacgccagagaggtgatccccatggccgccgtgaagcaggccctgagagaggccggcgacgagttcgagctgagatacagaagagccttcagcgacctgaccagccagctgcacatcacccccggcaccgcctaccagagcttcgagcaggacaccttcgtggagctgtacggcaacaacgccgccgccgagagcagaaagggccaggagagattcaacagatggttcctgaccggcatgaccgtggccggcgtggtgctgctgggcagcctgttcagcagaaagtag

SEQ ID NO: 9537 - DNA, 702 bp, synthetic construct; identical to SEQ ID NO: 9535
  misc_feature 1..702: note = Description of Artificial Sequence: Synthetic coding sequence
  source 1..702: mol_type = other DNA

SEQ ID NO: 9538 - DNA, 567 bp, synthetic construct
  misc_feature 1..567: note = Description of Artificial Sequence: Synthetic coding sequence
  source 1..567: mol_type = other DNA
atgagccagagcaacagagagctggtggtggacttcctgagctacaagctgagccagaagggctacagctggagccagttcagcgacgtggaggagaacagaaccgaggcccccgagggcaccgagagcgagatggagacccccagcgccatcaacggcaaccccagctggcacctggccgacagccccgccgtgaacggcgccaccggccacagcagcagcctggacgccagagaggtgatccccatggccgccgtgaagcaggccctgagagaggccggcgacgagttcgagctgagatacagaagagccttcagcgacctgaccagccagctgcacatcacccccggcaccgcctaccagagcttcgagcaggtggtgaacgagctgttcagagacggcgtgaactggggcagaatcgtggccttcttcagcttcggcggcgccctgtgcgtggagagcgtggacaaggagatgcaggtgctggtgagcagaatcgccgcctggatggccacctacctgaacgaccacctggagccctggatccaggagaacggcggctggtag

SEQ ID NO: 9539 - DNA, 702 bp, synthetic construct; identical to SEQ ID NO: 9535
  misc_feature 1..702: note = Description of Artificial Sequence: Synthetic coding sequence
  source 1..702: mol_type = other DNA

SEQ ID NO: 9540 - DNA, 567 bp, synthetic construct; identical to SEQ ID NO: 9538
  misc_feature 1..567: note = Description of Artificial Sequence: Synthetic coding sequence
  source 1..567: mol_type = other DNA

SEQ ID NO: 9541 - DNA, 147 bp, synthetic construct
  misc_feature 1..147: note = Description of Artificial Sequence: Synthetic coding sequence
  source 1..147: mol_type = other DNA
atgagccagagcaacagagagctggtggtggacttcctgagctacaagctgagccagaagggctacagctggagccagttcagcgacgtggaggagaacagaaccgaggcccccgagggcaccgagagcgagatggagaccccctag

SEQ ID NO: 9542 - DNA, 546 bp, synthetic construct
  misc_feature 1..546: note = Description of Artificial Sequence: Synthetic coding sequence
  source 1..546: mol_type = other DNA
atgagccagagcaacagagagctggtggtggacttcctgagctacaagctgagccagaagggctacagctggagccagttcagcgacgtggaggagaacagaaccgaggcccccgagggcaccgagagcgagatggagacccccagcgccatcaacggcaaccccagctggcacctggccgacagccccgccgtgaacggcgccaccggccacagcagcagcctggacgccagagaggtgatccccatggccgccgtgaagcaggccctgagagaggccggcgacgagttcgagctgagatacagaagagccttcagcgacctgaccagccagctgcacatcacccccggcaccgcctaccagagcttcgagcaggtggtgaacgagctgttcagagacggcgtgaactggggcagaatcgtggccttcttcagcttcggcggcgccctgtgcgtggagagcgtggacaaggagatgcaggtgctggtgagcagaatcgccgcctggatggccacctacctgaacgaccacctggagccctggtag

SEQ ID NO: 9543 - DNA, 618 bp, synthetic construct
  misc_feature 1..618: note = Description of Artificial Sequence: Synthetic coding sequence
  source 1..618: mol_type = other DNA
atgagccagagcaacagagagctggtggtggacttcctgagctacaagctgagccagaagggctacagctggagccagttcagcgacgtggaggagaacagaaccgaggcccccgagggcaccgagagcgagatggagacccccagcgccatcaacggcaaccccagctggcacctggccgacagccccgccgtgaacggcgccaccggccacagcagcagcctggacgccagagaggtgatccccatggccgccgtgaagcaggccctgagagaggccggcgacgagttcgagctgagatacagaagagccttcagcgacctgaccagccagctgcacatcacccccggcaccgcctaccagagcttcgagcaggtggtgaacgagctgttcagagacggcgtgaactggggcagaatcgtggccttcttcagcttcggcggcgccctgtgcgtggagagcgtggacaaggagatgcaggtgctggtgagcagaatcgccgcctggatggccacctacctgaacgaccacctggagccctggatccaggagaacggcggctgggacaccttcgtggagctgtacggcaacaacgccgccgccgagagcagaaagtag

SEQ ID NO: 9544 - DNA, 567 bp, synthetic construct; identical to SEQ ID NO: 9538
  misc_feature 1..567: note = Description of Artificial Sequence: Synthetic coding sequence
  source 1..567: mol_type = other DNA

SEQ ID NO: 9545 - DNA, 615 bp, synthetic construct
  misc_feature 1..615: note = Description of Artificial Sequence: Synthetic coding sequence
  source 1..615: mol_type = other DNA
atggtggaccagctgagagagagaaccaccatggccgaccccctgagagagagaaccgagctgctgctggccgactacctgggctactgcgccagagagcccggcacccccgagcccgcccccagcacccccgaggccgccgtgctgagaagcgccgccgccagactgagacagatccacagaagcttcttcagcgcctacctgggctaccccggcaacagattcgagctggtggccctgatggccgacagcgtgctgagcgacagccccggccccacctggggcagagtggtgaccctggtgaccttcgccggcaccctgctggagagaggccccctggtgaccgccagatggaagaagtggggcttccagcccagactgaaggagcaggagggcgacgtggccagagactgccagagactggtggccctgctgagcagcagactgatgggccagcacagagcctggctgcaggcccagggcggctgggacggcttctgccacttcttcagaacccccttccccctggccttctggagaaagcagctggtgcaggccttcctgagctgcctgctgaccaccgccttcatctacctgtggaccagactgctgtag

SEQ ID NO: 9546 - DNA, 417 bp, synthetic construct
  misc_feature 1..417: note = Description of Artificial Sequence: Synthetic coding sequence
  source 1..417: mol_type = other DNA
atggccaagcagcccagcgacgtgagcagcgagtgcgacagagagggcagacagctgcagcccgccgagagacccccccagctgagacccggcgcccccaccagcctgcagaccgagccccaggacagaagccccgcccccatgagctgcgacaagagcacccagacccccagccccccctgccaggccttcaaccactacctgagcgccatggccagcatgagacaggccgagcccgccgacatgagacccgagatctggatcgcccaggagctgagaagaatcggcgacgagttcaacgcctactacgccagaagagtgttcctgaacaactaccaggccgccgaggaccaccccagaatggtgatcctgagactgctgagatacatcgtgagactggtgtggagaatgcactag

SEQ ID NO: 9547 - DNA, 339 bp, synthetic construct
  misc_feature 1..339: note = Description of Artificial Sequence: Synthetic coding sequence
  source 1..339: mol_type = other DNA
atggccaagcagcccagcgacgtgagcagcgagtgcgacagagagggcagacagctgcagcccgccgagagacccccccagctgagacccggcgcccccaccagcctgcagaccgagccccaggacagaagccccgcccccatgagctgcgacaagagcacccagacccccagccccccctgccaggccttcaaccactacctgagcgccatggtggtgatcctggaggacatcggcgacctgagcctgtgcttcggcttcatcttcaccggcctggacctgtacggccaccaccacagccaggacaccgagcagctgaaccacaaggacttcagctag

SEQ ID NO: 9548 - DNA, 519 bp, synthetic construct
  misc_feature 1..519: note = Description of Artificial Sequence: Synthetic coding sequence
  source 1..519: mol_type = other DNA
atggccaagcagcccagcgacgtgagcagcgagtgcgacagagagggcagacagctgcagcccgccgagagacccccccagctgagacccggcgcccccaccagcctgcagaccgagccccagggcaaccccgagggcaaccacggcggcgagggcgacagctgcccccacggcagcccccagggccccctggccccccccgccagccccggccccttcgccaccagaagccccctgttcatcttcatgagaagaagcagcctgctgagcagaagcagcagcggctacttcagcttcgacaccgacagaagccccgcccccatgagctgcgacaagagcacccagacccccagccccccctgccaggccttcaaccactacctgagcgccatggccagcatgagacaggccgagcccgccgacatgagacccgagatctggatcgcccaggagctgagaagaatcggcgacgagttcaacgcctactacgccagaagaatgcccctgccccccgactag

SEQ ID NO: 9549 - DNA, 219 bp, synthetic construct
  misc_feature 1..219: note = Description of Artificial Sequence: Synthetic coding sequence
  source 1..219: mol_type = other DNA
atggccaagcagcccagcgacgtgagcagcgagtgcgacagagagggcagacagctgcagcccgccgagagacccccccagctgagacccggcgcccccaccagcctgcagaccgagccccagggcaaccccgagggcaaccacggcggcgagggcgacagctgcccccacggcagcccccagggccccctggccccccccgccagccccggcccctag

SEQ ID NO: 9550 - DNA, 258 bp, synthetic construct
  misc_feature 1..258: note = Description of Artificial Sequence: Synthetic coding sequence
  source 1..258: mol_type = other DNA
atggccaagcagcccagcgacgtgagcagcgagtgcgacagagagggcagacagctgcagcccgccgagagacccccccagctgagacccggcgcccccaccagcctgcagaccgagccccaggccagcatgagacaggccgagcccgccgacatgagacccgagatctggatcgcccaggagctgagaagaatcggcgacgagttcaacgcctactacgccagaagactggccaagctgctggccagcagcacctag

SEQ ID NO: 9551 - DNA, 597 bp, synthetic construct
  misc_feature 1..597: note = Description of Artificial Sequence: Synthetic coding sequence
  source 1..597: mol_type = other DNA
atggccaagcagcccagcgacgtgagcagcgagtgcgacagagagggcagacagctgcagcccgccgagagacccccccagctgagacccggcgcccccaccagcctgcagaccgagccccagggcaaccccgagggcaaccacggcggcgagggcgacagctgcccccacggcagcccccagggccccctggccccccccgccagccccggccccttcgccaccagaagccccctgttcatcttcatgagaagaagcagcctgctgagcagaagcagcagcggctacttcagcttcgacaccgacagaagccccgcccccatgagctgcgacaagagcacccagacccccagccccccctgccaggccttcaaccactacctgagcgccatggccagcatgagacaggccgagcccgccgacatgagacccgagatctggatcgcccaggagctgagaagaatcggcgacgagttcaacgcctactacgccagaagagtgttcctgaacaactaccaggccgccgaggaccaccccagaatggtgatcctgagactgctgagatacatcgtgagactggtgtggagaatgcactag

SEQ ID NO: 9552 - DNA, 369 bp, synthetic construct
  misc_feature 1..369: note = Description of Artificial Sequence: Synthetic coding sequence
  source 1..369: mol_type = other DNA
atggccaagcagcccagcgacgtgagcagcgagtgcgacagagagggcagacagctgcagcccgccgagagacccccccagctgagacccggcgcccccaccagcctgcagaccgagccccagggcaaccccgagggcaaccacggcggcgagggcgacagctgcccccacggcagcccccagggccccctggccccccccgccagccccggccccttcgccaccagaagccccctgttcatcttcatgagaagaagcagcctgctgagcagaagcagcagcggctacttcagcttcgacaccgacagaagccccgcccccatgagctgcgacaagagcacccagacccccagccccccctgccagtag

SEQ ID NO: 9553 - DNA, 222 bp, synthetic construct
  misc_feature 1..222: note = Description of Artificial Sequence: Synthetic coding sequence
  source 1..222: mol_type = other DNA
atgagacaggccgagcccgccgacatgagacccgagatctggatcgcccaggagctgagaagaatcggcgacgagttcaacgcctactacgccagaagagtgatgatgttcagcctgcccgccttcctgctgacccccagccccagcaccctgtacttcttcaagaagaccgtgaccagctgcaactacatgctgatcctggagatgatcaccgtggcctag

SEQ ID NO: 9554 - DNA, 243 bp, synthetic construct
  misc_feature 1..243: note = Description of Artificial Sequence: Synthetic coding sequence
  source 1..243: mol_type = other DNA
atggccaagcagcccagcgacgtgagcagcgagtgcgacagagagggcagacagctgcagcccgccgagagacccccccagctgagacccggcgcccccaccagcctgcagaccgagccccaggacagaagccccgcccccatgagctgcgacaagagcacccagacccccagccccccctgccaggccttcaaccactacctgagcgccatggtgagagagatcgaggaggtggtggtgtag

SEQ ID NO: 9555 - DNA, 408 bp, synthetic construct
  misc_feature 1..408: note = Description of Artificial Sequence: Synthetic coding sequence
  source 1..408: mol_type = other DNA
atggccaagcagcccagcgacgtgagcagcgagtgcgacagagagggcagacagctgcagcccgccgagagacccccccagctgagacccggcgcccccaccagcctgcagaccgagccccagggcaaccccgagggcaaccacggcggcgagggcgacagctgcccccacggcagcccccagggccccctggccccccccgccagccccggccccttcgccaccagaagccccctgttcatcttcatgagaagaagcagcctgctgagcagaagcagcagcggctacttcagcttcgacaccgacagaagccccgcccccatgagctgcgacaagagcacccagacccccagccccccctgccaggccttcaaccactacctgagcgccatggccaactgggactag

SEQ ID NO: 9556 - DNA, 423 bp, synthetic construct
  misc_feature 1..423: note = Description of Artificial Sequence: Synthetic coding sequence
  source 1..423: mol_type = other DNA
atggccaagcagcccagcgacgtgagcagcgagtgcgacagagagggcagacagctgcagcccgccgagagacccccccagctgagacccggcgcccccaccagcctgcagaccgagccccagggcaaccccgagggcaaccacggcggcgagggcgacagctgcccccacggcagcccccagggccccctggccccccccgccagccccggccccttcgccaccagaagccccctgttcatcttcatgagaagaagcagcctgctgagcagaagcagcagcggctacttcagcttcgacaccgacagaagccccgcccccatgagctgcgacaagagcacccagacccccagccccccctgccaggccttcaaccactacctgagcgccatggtgagagagatcgaggaggtggtggtgtag

SEQ ID NO: 9557 - DNA, 291 bp, synthetic construct
  misc_feature 1..291: note = Description of Artificial Sequence: Synthetic coding sequence
  source 1..291: mol_type = other DNA
aagcagcccagcgacgtgagcagcgagtgcgacagagagggcagacagctgcagcccgccgagagacccccccagctgagacccggcgcccccaccagcctgcagaccgagccccaggacagaagccccgcccccatgagctgcgacaagagcacccagacccccagccccccctgccaggccttcaaccactacctgagcgccatggacgacagcgccggcagcagcctgagaatcgccctgcacagagaggtgcagtggcccctgaagtggctggccaagagcagctag

SEQ ID NO: 9558 - DNA, 249 bp, synthetic construct
  misc_feature 1..249: note = Description of Artificial Sequence: Synthetic coding sequence
  source 1..249: mol_type = other DNA
atggccaagcagcccagcgacgtgagcagcgagtgcgacagagagggcagacagctgcagcccgccgagagacccccccagctgagacccggcgcccccaccagcctgcagaccgagccccaggccagcatgagacaggccgagcccgccgacatgagacccgagatctggatcgcccaggagctgagaagaatcggcgacgagttcaacgcctactacgccagaagaatgcccctgccccccgactag

SEQ ID NO: 9559 - DNA, 582 bp, synthetic construct
  misc_feature 1..582: note = Description of Artificial Sequence: Synthetic coding sequence
  source 1..582: mol_type = other DNA
atggccacccccgccagcgcccccgacaccagagccctggtggccgacttcgtgggctacaagctgagacagaagggctacgtgtgcggcgccggccccggcgagggccccgccgccgaccccctgcaccaggccatgagagccgccggcgacgagttcgagaccagattcagaagaaccttcagcgacctggccgcccagctgcacgtgacccccggcagcgcccagcagagattcacccaggtgagcgacgagctgttccagggcggccccaactggggcagactggtggccttcttcgtgttcggcgccgccctgtgcgccgagagcgtgaacaaggagatggagcccctggtgggccaggtgcaggagtggatggtggcctacctggagacccagctggccgactggatccacagcagcggcggctgggccgagttcaccgccctgtacggcgacggcgccctggaggaggccagaagactgagagagggcaactgggccagcgtgagaaccgtgctgaccggcgccgtggccctgggcgccctggtgaccgtgggcgccttcttcgccagcaagtag

SEQ ID NO: 9560 - DNA, 156 bp, synthetic construct
  misc_feature 1..156: note = Description of Artificial Sequence: Synthetic coding sequence
  source 1..156: mol_type = other DNA
atggccacccccgccagcgcccccgacaccagagccctggtggccgacttcgtgggctacaagctgagacagaagggctacgtgtgcggcgccggccccggcgagggccccgccgccgaccccctgcaccaggccatgagagccgccggcgactag

SEQ ID NO: 9561 - DNA, 219 bp, synthetic construct
  misc_feature 1..219: note = Description of Artificial Sequence: Synthetic coding sequence
  source 1..219: mol_type = other DNA
atggccacccccgccagcgcccccgacaccagagccctggtggccgacttcgtgggctacaagctgagacagaagggctacgtgtgcggcgccggccccggcgagggccccgccgccgaccccctgcaccaggccatgagagccgccggcgacgagttcgagaccagattcagaagaaccttcagcgacctggccgcccagctgcacgtgaccccctag

SEQ ID NO: 9562 - DNA, 450 bp, synthetic construct
  misc_feature 1..450: note = Description of Artificial Sequence: Synthetic coding sequence
  source 1..450: mol_type = other DNA
atggccacccccgccagcgcccccgacaccagagccctggtggccgacttcgtgggctacaagctgagacagaagggctacgtgtgcggcgccggccccggcgagggccccgccgccgaccccctgcaccaggccatgagagccgccggcgacgagttcgagaccagattcagaagaaccttcagcgacctggccgcccagctgcacgtgacccccggcagcgcccagcagagattcacccaggtgagcgacgagctgttccagggcggccccaactggggcagactggtggccttcttcgtgttcggcgccgccctgtgcgccgagagcgtgaacaaggagatggagcccctggtgggccaggtgcaggagtggatggtggcctacctggagacccagctggccgactggatccacagcagcggcggctgggccgagttcaccgcctag

SEQ ID NO: 9563 - DNA, 435 bp, synthetic construct
  misc_feature 1..435: note = Description of Artificial Sequence: Synthetic coding sequence
  source 1..435: mol_type = other DNA
atggccacccccgccagcgcccccgacaccagagccctggtggccgacttcgtgggctacaagctgagacagaagggctacgtgtgcggcgccggccccggcgagggccccgccgccgaccccctgcaccaggccatgagagccgccggcgacgagttcgagaccagattcagaagaaccttcagcgacctggccgcccagctgcacgtgacccccggcagcgcccagcagagattcacccaggtgagcgacgagctgttccagggcggccccaactggggcagactggtggccttcttcgtgttcggcgccgccctgtgcgccgagagcgtgaacaaggagatggagcccctggtgggccaggtgcaggagtggatggtggcctacctggagacccagctggccgactggatccacagcagcggcggctggtag

SEQ ID NO: 9564 - DNA, 528 bp, synthetic construct
  misc_feature 1..528: note = Description of Artificial Sequence: Synthetic coding sequence
  source 1..528: mol_type = other DNA
atgaccgactgcgagttcggctacatctacagactggcccaggactacctgcagtgcgtgctgcagatcccccagcccggcagcggccccagcaagaccagcagagtgctgcagaacgtggccttcagcgtgcagaaggaggtggagaagaacctgaagagctgcctggacaacgtgaacgtggtgagcgtggacaccgccagaaccctgttcaaccaggtgatggagaaggagttcgaggacggcatcatcaactggggcagaatcgtgaccatcttcgccttcgagggcatcctgatcaagaagctgctgagacagcagatcgcccccgacgtggacacctacaaggagatcagctacttcgtggccgagttcatcatgaacaacaccggcgagtggatcagacagaacggcggctgggagaacggcttcgtgaagaagttcgagcccaagagcggctggatgaccttcctggaggtgaccggcaagatctgcgagatgctgagcctgctgaagcagtactgctag

SEQ ID NO: 9565 - DNA, 492 bp, synthetic construct
  misc_feature 1..492: note = Description of Artificial Sequence: Synthetic coding sequence
  source 1..492: mol_type = other DNA
atgaccgactgcgagttcggctacatctacagactggcccaggactacctgcagtgcgtgctgcagatcccccagcccggcagcggccccagcaagaccagcagagtgctgcagaacgtggccttcagcgtgcagaaggaggtggagaagaacctgaagagctgcctggacaacgtgaacgtggtgagcgtggacaccgccagaaccctgttcaaccaggtgatggagaaggagttcgaggacggcatcatcaactggggcagaatcgtgaccatcttcgccttcgagggcatcctgatcaagaagctgctgagacagcagatcgcccccgacgtggacacctacaaggagatcagctacttcgtggccgagttcatcatgaacaacaccggcgagtggatcagacagaacggcggctggggcaagtggcacaaccacacccccatgctggtggagagcgtggcccacaagaagagaaagatggccctgtag

SEQ ID NO: 9566 - DNA, 726 bp, synthetic construct
  misc_feature 1..726: note = Description of Artificial Sequence: Synthetic coding sequence
  source 1..726: mol_type = other DNA
atgtgcagcggcgccggcgtgatgatggccagatgggccgccagaggcagagccggctggagaagcaccgtgagaatcctgagccccctgggccactgcgagcccggcgtgagcagaagctgcagagccgcccaggccatggactgcgaggtgaacaacggcagcagcctgagagacgagtgcatcaccaacctgctggtgttcggcttcctgcagagctgcagcgacaacagcttcagaagagagctggacgccctgggccacgagctgcccgtgctggccccccagtgggagggctacgacgagctgcagaccgacggcaacagaagcagccacagcagactgggcagaatcgaggccgacagcgagagccaggaggacatcatcagaaacatcgccagacacctggcccaggtgggcgacagcatggacagaagcatcccccccggcctggtgaacggcctggccctgcagctgagaaacaccagcagaagcgaggaggacagaaacagagacctggccaccgccctggagcagctgctgcaggcctaccccagagacatggagaaggagaagaccatgctggtgctggccctgctgctggccaagaaggtggccagccacacccccagcctgctgagagacgtgttccacaccaccgtgaacttcatcaaccagaacctgagaacctacgtgagaagcctggccagaaacggcatggactag

SEQ ID NO: 9567 - DNA, 414 bp, synthetic construct
  misc_feature 1..414: note = Description of Artificial Sequence: Synthetic coding sequence
  source 1..414: mol_type = other DNA
atggactgcgaggtgaacaacggcagcagcctgagagacgagtgcatcaccaacctgctggtgttcggcttcctgcagagctgcagcgacaacagcttcagaagagagctggacgccctgggccacgagctgcccgtgctggccccccagtgggagggctacgacgagctgcagaccgacggcaacagaagcagccacagcagactgggcagaatcgaggccggcgccagcgacaacaacaccgccagcgccgaggaggagaccgaggccgccggcagcgtggccgtggagagaggcctgcacggcgccgccaccgtgatcctgaaggtgaagaagaccagcagcggcatcctgcccggcaccagccccagaagcggcaccgcctggaccgtggccagcctgagagcctggtag

SEQ ID NO: 9568 - DNA, 300 bp, synthetic construct
  misc_feature 1..300: note = Description of Artificial Sequence: Synthetic coding sequence
  source 1..300: mol_type = other DNA
atggacagaagcatcccccccggcctggtgaacggcctggccctgcagctgagaaacaccagcagaagcgaggaggacagaaacagagacctggccaccgccctggagcagctgctgcaggcctaccccagagacatggagaaggagaagaccatgctggtgctggccctgctgctggccaagaaggtggccagccacacccccagcctgctgagagacgtgttccacaccaccgtgaacttcatcaaccagaacctgagaacctacgtgagaagcctggccagaaacggcatggactag

SEQ ID NO: 9569 - DNA, 300 bp, synthetic construct; identical to SEQ ID NO: 9568
  misc_feature 1..300: note = Description of Artificial Sequence: Synthetic coding sequence
  source 1..300: mol_type = other DNA

SEQ ID NO: 9570 - DNA, 588 bp, synthetic construct
  misc_feature 1..588: note = Description of Artificial Sequence: Synthetic coding sequence
  source 1..588: mol_type = other DNA
atggactgcgaggtgaacaacggcagcagcctgagagacgagtgcatcaccaacctgctggtgttcggcttcctgcagagctgcagcgacaacagcttcagaagagagctggacgccctgggccacgagctgcccgtgctggccccccagtgggagggctacgacgagctgcagaccgacggcaacagaagcagccacagcagactgggcagaatcgaggccgacagcgagagccaggaggacatcatcagaaacatcgccagacacctggcccaggtgggcgacagcatggacagaagcatcccccccggcctggtgaacggcctggccctgcagctgagaaacaccagcagaagcgaggaggacagaaacagagacctggccaccgccctggagcagctgctgcaggcctaccccagagacatggagaaggagaagaccatgctggtgctggccctgctgctggccaagaaggtggccagccacacccccagcctgctgagagacgtgttccacaccaccgtgaacttcatcaaccagaacctgagaacctacgtgagaagcctggccagaaacggcatggactag

SEQ ID NO: 9571 - DNA, 588 bp, synthetic construct; identical to SEQ ID NO: 9570
  misc_feature 1..588: note = Description of Artificial Sequence: Synthetic coding sequence
  source 1..588: mol_type = other DNA

SEQ ID NO: 9572 - DNA, 1353 bp, synthetic construct
  misc_feature 1..1353: note = Description of Artificial Sequence: Synthetic coding sequence
  source 1..1353: mol_type = other DNA
atggaggagccccagaagagctacgtgaacaccatggacctggagagagacgagcccctgaagagcaccggcccccagatcagcgtgagcgagttcagctgccactgctgctacgacatcctggtgaaccccaccaccctgaactgcggccacagcttctgcagacactgcctggccctgtggtgggccagcagcaagaagaccgagtgccccgagtgcagagagaagtgggagggcttccccaaggtgagcatcctgctgagagacgccatcgagaagctgttccccgacgccatcagactgagattcgaggacatccagcagaacaacgacatcgtgcagagcctggccgccttccagaagtacggcaacgaccagatccccctggcccccaacaccggcagagccaaccagcagatgggcggcggcttcttcagcggcgtgctgaccgccctgaccggcgtggccgtggtgctgctggtgtaccactggagcagcagagagagcgagcacgacctgctggtgcacaaggccgtggccaagtggaccgccgaggaggtggtgctgtggctggagcagctgggcccctgggccagcctgtacagagagagattcctgagcgagagagtgaacggcagactgctgctgaccctgaccgaggaggagttcagcaagaccccctacaccatcgagaacagcagccacagaagagccatcctgatggagctggagagagtgaaggccctgggcgtgaagcccccccagaacctgtgggagtacaaggccgtgaaccccggcagaagcctgttcctgctgtacgccctgaagagcagccccagactgagcctgctgtacctgtacctgttcgactacaccgacaccttcctgcccttcatccacaccatctgccccctgcaggaggacagcagcggcgaggacatcgtgaccaagctgctggacctgaaggagcccacctggaagcagtggagagagttcctggtgaagtacagcttcctgccctaccagctgatcgccgagttcgcctgggactggctggaggtgcactactggaccagcagattcctgatcatcaacgccatgctgctgagcgtgctggagctgttcagcttctggagaatctggagcagaagcgagctgaagaccgtgccccagagaatgtggagccacttctggaaggtgagcacccagggcctgttcgtggccatgttctggcccctgatcccccagttcgtgtgcaactgcctgttctactgggccctgtacttcaaccccatcatcaacatcgacctggtggtgaaggagctgagaagactggagacccaggtgctgtag

SEQ ID NO: 9573 - DNA, 969 bp, synthetic construct
  misc_feature 1..969: note = Description of Artificial Sequence: Synthetic coding sequence
  source 1..969: mol_type = other DNA
atggtgggcatcttcaaggagaacagaatgagcagaatgcagagaaagatgggcagattcccccagagccagtacagcccccaggtggtgctgctggtgtaccactggagcagcagagagagcgagcacgacctgctggtgcacaaggccgtggccaagtggaccgccgaggaggtggtgctgtggctggagcagctgggcccctgggccagcctgtacagagagagattcctgagcgagagagtgaacggcagactgctgctgaccctgaccgaggaggagttcagcaagaccccctacaccatcgagaacagcagccacagaagagccatcctgatggagctggagagagtgaaggccctgggcgtgaagcccccccagaacctgtgggagtacaaggccgtgaaccccggcagaagcctgttcctgctgtacgccctgaagagcagccccagactgagcctgctgtacctgtacctgttcgactacaccgacaccttcctgcccttcatccacaccatctgccccctgcaggaggacagcagcggcgaggacatcgtgaccaagctgctggacctgaaggagcccacctggaagcagtggagagagttcctggtgaagtacagcttcctgccctaccagctgatcgccgagttcgcctgggactggctggaggtgcactactggaccagcagattcctgatcatcaacgccatgctgctgagcgtgctggagctgttcagcttctggagaatctggagcagaagcgagctgaagaccgtgccccagagaatgtggagccacttctggaaggtgagcacccagggcctgttcgtggccatgttctggcccctgatcccccagttcgtgtgcaactgcctgttctactgggccctgtacttcaaccccatcatcaacatcgacctggtggtgaaggagctgagaagactggagacccaggtgctgtag

SEQ ID NO: 9574 - DNA, 4254 bp, synthetic construct
  misc_feature 1..4254: note = Description of Artificial Sequence: Synthetic coding sequence
  source 1..4254: mol_type = other DNA
atggccgccgtgccccagaacaacctgcaggagcagctggagagacacagcgccagaaccctgaacaacaagctgagcctgagcaagcccaagttcagcggcttcaccttcaagaagaagaccagcagcgacaacaacgtgagcgtgaccaacgtgagcgtggccaagacccccgtgctgagaaacaaggacgtgaacgtgaccgaggacttcagcttcagcgagcccctgcccaacaccaccaaccagcagagagtgaaggacttcttcaagaacgcccccgccggccaggagacccagagaggcggcagcaagagcctgctgcccgacttcctgcagacccccaaggaggtggtgtgcaccacccagaacacccccaccgtgaagaagagcagagacaccgccctgaagaagctggagttcagcagcagccccgacagcctgagcaccatcaacgactgggacgacatggacgacttcgacaccagcgagaccagcaagagcttcgtgacccccccccagagccacttcgtgagagtgagcaccgcccagaagagcaagaagggcaagagaaacttcttcaaggcccagctgtacaccaccaacaccgtgaagaccgacctgcccccccccagcagcgagagcgagcagatcgacctgaccgaggagcagaaggacgacagcgagtggctgagcagcgacgtgatctgcatcgacgacggccccatcgccgaggtgcacatcaacgaggacgcccaggagagcgacagcctgaagacccacctggaggacgagagagacaacagcgagaagaagaagaacctggaggaggccgagctgcacagcaccgagaaggtgccctgcatcgagttcgacgacgacgactacgacaccgacttcgtgccccccagccccgaggagatcatcagcgccagcagcagcagcagcaagtgcctgagcaccctgaaggacctggacaccagcgacagaaaggaggacgtgctgagcaccagcaaggacctgctgagcaagcccgagaagatgagcatgcaggagctgaaccccgagaccagcaccgactgcgacgccagacagatcagcctgcagcagcagctgatccacgtgatggagcacatctgcaagctgatcgacaccatccccgacgacaagctgaagctgctggactgcggcaacgagctgctgcagcagagaaacatcagaagaaagctgctgaccgaggtggacttcaacaagagcgacgccagcctgctgggcagcctgtggagatacagacccgacagcctggacggccccatggagggcgacagctgccccaccggcaacagcatgaaggagctgaacttcagccacctgcccagcaacagcgtgagccccggcgactgcctgctgaccaccaccctgggcaagaccggcttcagcgccaccagaaagaacctgttcgagagacccctgttcaacacccacctgcagaagagcttcgtgagcagcaactgggccgagacccccagactgggcaagaagaacgagagcagctacttccccggcaacgtgctgaccagcaccgccgtgaaggaccagaacaagcacaccgccagcatcaacgacctggagagagagacccagcccagctacgacatcgacaacttcgacatcgacgacttcgacgacgacgacgactgggaggacatcatgcacaacctggccgccagcaagagcagcaccgccgcctaccagcccatcaaggagggcagacccatcaagagcgtgagcgagagactgagcagcgccaagaccgactgcctgcccgtgagcagcaccgcccagaacatcaacttcagcgagagcatccagaactacaccgacaagagcgcccagaacctggccagcagaaacctgaagcacgagagattccagagcctgagcttcccccacaccaaggagatgatgaagatcttccacaagaagttcggcctgcacaacttcagaaccaaccagctggaggccatcaacgccgccctgctgggcgaggactgcttcatcctgatgcccaccggcggcggcaagagcctgtgctaccagctgcccgcctgcgtgagccccggcgtgaccgtggtgatcagccccctgagaagcctgatcgtggaccaggtgcagaagctgaccagcctggacatccccgccacctacctgaccggcgacaagaccgacagcgaggccaccaacatctacctgcagctgagcaagaaggaccccatcatcaagctgctgtacgtgacccccgagaagatctgcgccagcaacagactgatcagcaccctggagaacctgtacgagagaaagctgctggccagattcgtgatcgacgaggcccactgcgtgagccagtggggccacgacttcagacaggactacaagagaatgaacatgctgagacagaagttccccagcgtgcccgtgatggccctgaccgccaccgccaaccccagagtgcagaaggacatcctgacccagctgaagatcctgagaccccaggtgttcagcatgagcttcaacagacacaacctgaagtactacgtgctgcccaagaagcccaagaaggtggccttcgactgcctggagtggatcagaaagcaccacccctacgacagcggcatcatctactgcctgagcagaagagagtgcgacaccatggccgacaccctgcagagagacggcctggccgccctggcctaccacgccggcctgagcgacagcgccagagacgaggtgcagcagaagtggatcaaccaggacggctgccaggtgatctgcgccaccatcgccttcggcatgggcatcgacaagcccgacgtgagattcgtgatccacgccagcctgcccaagagcgtggagggctactaccaggagagcggcagagccggcagagacggcgagatcagccactgcctgctgttctacacctaccacgacgtgaccagactgaagagactgatcatgatggagaaggacggcaaccaccacaccagagagacccacttcaacaacctgtacagcatggtgcactactgcgagaacatcaccgagtgcagaagaatccagctgctggcctacttcggcgagaacggcttcaaccccgacttctgcaagaagcaccccgacgtgagctgcgacaactgctgcaagaccaaggactacaagaccagagacgtgaccgacgacgtgaagagcatcgtgagattcgtgcaggagcacagcagcagccagggcatgagaaacatcaagcacgtgggccccagcggcagattcaccatgaacatgctggtggacatcttcctgggcagcaagagcgccaagatccagagcggcatcttcggcaagggcagcgcctacagcagacacaacgccgagagactgttcaagaagctgatcctggacaagatcctggacgaggacctgtacatcaacgccaacgaccaggccatcgcctacgtgatgctgggcaacaaggcccagaccgtgctgaacggcaacctgaaggtggacttcatggagaccgagaacagcagcagcgtgaagaagcagaaggccctggtggccaaggtgagccagagagaggagatggtgaagaagtgcctgggcgagctgaccgaggtgtgcaagagcctgggcaaggtgttcggcgtgcactacttcaacatcttcaacaccgtgaccctgaagaagctggccgagagcctgagcagcgaccccgaggtgctgctgcagatcgacggcgtgaccgaggacaagctggagaagtacggcgccgaggtgatcagcgtgctgcagaagtacagcgagtggaccagccccgccgaggacagcagccccggcatcagcctgagcagcagcagaggccccggcagaagcgccgccgaggagctggacgaggagatccccgtgagcagccactacttcgccagcaagaccagaaacgagagaaagagaaagaagatgcccgccagccagagaagcaagagaagaaagaccgccagcagcggcagcaaggccaagggcggcagcgccacctgcagaaagatcagcagcaagaccaagagcagcagcatcatcggcagcagcagcgccagccacaccagccaggccaccagcggcgccaacagcaagctgggcatcatggccccccccaagcccatcaacagacccttcctgaagcccagctacgccttcagctag

SEQ ID NO: 9575 - DNA, 3144 bp, synthetic construct
  misc_feature 1..3144: note = Description of Artificial Sequence: Synthetic coding sequence
  source 1..3144: mol_type = other DNA
atgagcatgcaggagctgaaccccgagaccagcaccgactgcgacgccagacagatcagcctgcagcagcagctgatccacgtgatggagcacatctgcaagctgatcgacaccatccccgacgacaagctgaagctgctggactgcggcaacgagctgctgcagcagagaaacatcagaagaaagctgctgaccgaggtggacttcaacaagagcgacgccagcctgctgggcagcctgtggagatacagacccgacagcctggacggccccatggagggcgacagctgccccaccggcaacagcatgaaggagctgaacttcagccacctgcccagcaacagcgtgagccccggcgactgcctgctgaccaccaccctgggcaagaccggcttcagcgccaccagaaagaacctgttcgagagacccctgttcaacacccacctgcagaagagcttcgtgagcagcaactgggccgagacccccagactgggcaagaagaacgagagcagctacttccccggcaacgtgctgaccagcaccgccgtgaaggaccagaacaagcacaccgccagcatcaacgacctggagagagagacccagcccagctacgacatcgacaacttcgacatcgacgacttcgacgacgacgacgactgggaggacatcatgcacaacctggccgccagcaagagcagcaccgccgcctaccagcccatcaaggagggcagacccatcaagagcgtgagcgagagactgagcagcgccaagaccgactgcctgcccgtgagcagcaccgcccagaacatcaacttcagcgagagcatccagaactacaccgacaagagcgcccagaacctggccagcagaaacctgaagcacgagagattccagagcctgagcttcccccacaccaaggagatgatgaagatcttccacaagaagttcggcctgcacaacttcagaaccaaccagctggaggccatcaacgccgccctgctgggcgaggactgcttcatcctgatgcccaccggcggcggcaagagcctgtgctaccagctgcccgcctgcgtgagccccggcgtgaccgtggtgatcagccccctgagaagcctgatcgtggaccaggtgcagaagctgaccagcctggacatccccgccacctacctgaccggcgacaagaccgacagcgaggccaccaacatctacctgcagctgagcaagaaggaccccatcatcaagctgctgtacgtgacccccgagaagatctgcgccagcaacagactgatcagcaccctggagaacctgtacgagagaaagctgctggccagattcgtgatcgacgaggcccactgcgtgagccagtggggccacgacttcagacaggactacaagagaatgaacatgctgagacagaagttccccagcgtgcccgtgatggccctgaccgccaccgccaaccccagagtgcagaaggacatcctgacccagctgaagatcctgagaccccaggtgttcagcatgagcttcaacagacacaacctgaagtactacgtgctgcccaagaagcccaagaaggtggccttcgactgcctggagtggatcagaaagcaccacccctacgacagcggcatcatctactgcctgagcagaagagagtgcgacaccatggccgacaccctgcagaagtggatcaaccaggacggctgccaggtgatctgcgccaccatcgccttcggcatgggcatcgacaagcccgacgtgagattcgtgatccacgccagcctgcccaagagcgtggagggctactaccaggagagcggcagagccggcagagacggcgagatcagccactgcctgctgttctacacctaccacgacgtgaccagactgaagagactgatcatgatggagaaggacggcaaccaccacaccagagagacccacttcaacaacctgtacagcatggtgcactactgcgagaacatcaccgagtgcagaagaatccagctgctggcctacttcggcgagaacggcttcaaccccgacttctgcaagaagcaccccgacgtgagctgcgacaactgctgcaagaccaaggactacaagaccagagacgtgaccgacgacgtgaagagcatcgtgagattcgtgcaggagcacagcagcagccagggcatgagaaacatcaagcacgtgggccccagcggcagattcaccatgaacatgctggtggacatcttcctgggcagcaagagcgccaagatccagagcggcatcttcggcaagggcagcgcctacagcagacacaacgccgagagactgttcaagaagctgatcctggacaagatcctggacgaggacctgtacatcaacgccaacgaccaggccatcgcctacgtgatgctgggcaacaaggcccagaccgtgctgaacggcaacctgaaggtggacttcatggagaccgagaacagcagcagcgtgaagaagcagaaggccctggtggccaaggtgagccagagagaggagatggtgaagaagtgcctgggcgagctgaccgaggtgtgcaagagcctgggcaaggtgttcggcgtgcactacttcaacatcttcaacaccgtgaccctgaagaagctggccgagagcctgagcagcgaccccgaggtgctgctgcagatcgacggcgtgaccgaggacaagctggagaagtacggcgccgaggtgatcagcgtgctgcagaagtacagcgagtggaccagccccgccgaggacagcagccccggcatcagcctgagcagcagcagaggccccggcagaagcgccgccgaggagctggacgaggagatccccgtgagcagccactacttcgccagcaagaccagaaacgagagaaagagaaagaagatgcccgccagccagagaagcaagagaagaaagaccgccagcagcggcagcaaggccaagggcggcagcgccacctgcagaaagatcagcagcaagaccaagagcagcagcatcatcggcagcagcagcgccagccacaccagccaggccaccagcggcgccaacagcaagctgggcatcatggccccccccaagcccatcaacagacccttcctgaagcccagctacgccttcagctag

SEQ ID NO: 9576 - DNA, 1560 bp, synthetic construct
  misc_feature 1..1560: note = Description of Artificial Sequence: Synthetic coding sequence
  source 1..1560: mol_type = other DNA
atgaacatgctgagacagaagttccccagcgtgcccgtgatggccctgaccgccaccgccaaccccagagtgcagaaggacatcctgacccagctgaagatcctgagaccccaggtgttcagcatgagcttcaacagacacaacctgaagtactacgtgctgcccaagaagcccaagaaggtggccttcgactgcctggagtggatcagaaagcaccacccctacgacagcggcatcatctactgcctgagcagaagagagtgcgacaccatggccgacaccctgcagagagacggcctggccgccctggcctaccacgccggcctgagcgacagcgccagagacgaggtgcagcagaagtggatcaaccaggacggctgccaggtgatctgcgccaccatcgccttcggcatgggcatcgacaagcccgacgtgagattcgtgatccacgccagcctgcccaagagcgtggagggctactaccaggagagcggcagagccggcagagacggcgagatcagccactgcctgctgttctacacctaccacgacgtgaccagactgaagagactgatcatgatggagaaggacggcaaccaccacaccagagagacccacttcaacaacctgtacagcatggtgcactactgcgagaacatcaccgagtgcagaagaatccagctgctggcctacttcggcgagaacggcttcaaccccgacttctgcaagaagcaccccgacgtgagctgcgacaactgctgcaagaccaaggactacaagaccagagacgtgaccgacgacgtgaagagcatcgtgagattcgtgcaggagcacagcagcagccagggcatgagaaacatcaagcacgtgggccccagcggcagattcaccatgaacatgctggtggacatcttcctgggcagcaagagcgccaagatccagagcggcatcttcggcaagggcagcgcctacagcagacacaacgccgagagactgttcaagaagctgatcctggacaagatcctggacgaggacctgtacatcaacgccaacgaccaggccatcgcctacgtgatgctgggcaacaaggcccagaccgtgctgaacggcaacctgaaggtggacttcatggagaccgagaacagcagcagcgtgaagaagcagaaggccctggtggccaaggtgagccagagagaggagatggtgaagaagtgcctgggcgagctgaccgaggtgtgcaagagcctgggcaaggtgttcggcgtgcactacttcaacatcttcaacaccgtgaccctgaagaagctggccgagagcctgagcagcgaccccgaggtgctgctgcagatcgacggcgtgaccgaggacaagctggagaagtacggcgccgaggtgatcagcgtgctgcagaagtacagcgagtggaccagccccgccgaggacagcagccccggcatcagcctgagcagcagcagaggccccggcagaagcgccgccgaggagctggacgaggagatccccgtgagcagccactacttcgccagcaagaccagaaactag

SEQ ID NO: 9577 - DNA, 981 bp, synthetic construct
  misc_feature 1..981: note = Description of Artificial Sequence: Synthetic coding sequence
  source 1..981: mol_type = other DNA
atgcacagaaccaccagaatcaagatcaccgagctgaacccccacctgatgtgcgtgctgtgcggcggctacttcatcgacgccaccaccatcatcgagtgcctgcacagcttctgcaagacctgcatcgtgagatacctggagaccagcaagtactgccccatctgcgacgtgcaggtgcacaagaccagacccctgctgaacatcagaagcgacaagaccctgcaggacatcgtgtacaagctggtgcccggcctgttcaagaacgagatgaagagaagaagagacttctacgccgcccaccccagcgccgacgccgccaacggcagcaacgaggacagaggcgaggtggccgacgaggacaagagaatcatcaccgacgacgagatcatcagcctgagcatcgagttcttcgaccagaacagactggacagaaaggtgaacaaggacaaggagaagagcaaggaggaggtgaacgacaagagatacctgagatgccccgccgccatgaccgtgatgcacctgagaaagttcctgagaagcaagatggacatccccaacaccttccagatcgacgtgatgtacgaggaggagcccctgaaggactactacaccctgatggacatcgcctacatctacacctggagaagaaacggccccctgcccctgaagtacagagtgagacccacctgcaagagaatgaagatcagccaccagagagacggcctgaccaacgccggcgagctggagagcgacagcggcagcgacaaggccaacagccccgccggcggcatccccagcaccagcagctgcctgcccagccccagcacccccgtgcagagcccccacccccagttcccccacatcagcagcaccatgaacggcaccagcaacagccccagcggcaaccaccagagcagcttcgccaacagacccagaaagagcagcgtgaacggcagcagcgccaccagcagcggctag

SEQ ID NO: 9578 - DNA, 717 bp, synthetic construct
  misc_feature 1..717: note = Description of Artificial Sequence: Synthetic coding sequence
  source 1..717: mol_type = other DNA
atgtgcgtgctgtgcggcggctacttcatcgacgccaccaccatcatcgagtgcctgcacagcttctgcaagacctgcatcgtgagatacctggagaccagcaagtactgccccatctgcgacgtgcaggtgcacaagaccagacccctgctgaacatcagactggacagaaaggtgaacaaggacaaggagaagagcaaggaggaggtgaacgacaagagatacctgagatgccccgccgccatgaccgtgatgcacctgagaaagttcctgagaagcaagatggacatccccaacaccttccagatcgacgtgatgtacgaggaggagcccctgaaggactactacaccctgatggacatcgcctacatctacacctggagaagaaacggccccctgcccctgaagtacagagtgagacccacctgcaagagaatgaagatcagccaccagagagacggcctgaccaacgccggcgagctggagagcgacagcggcagcgacaaggccaacagccccgccggcggcatccccagcaccagcagctgcctgcccagccccagcacccccgtgcagagcccccacccccagttcccccacatcagcagcaccatgaacggcaccagcaacagccccagcggcaaccaccagagcagcttcgccaacagacccagaaagagcagcgtgaacggcagcagcgccaccagcagcggctag

SEQ ID NO: 9579 - DNA, 318 bp, synthetic construct
  misc_feature 1..318: note = Description of Artificial Sequence: Synthetic coding sequence
  source 1..318: mol_type = other DNA
atgcacagaaccaccagaatcaagatcaccgagctgaacccccacctgatgtgcgtgctgtgcggcggctacttcatcgacgccaccaccatcatcgagtgcctgcacagcttctgcaagacctgcatcgtgagatacctggagaccagcaagtactgccccatctgcgacgtgcaggtgcacaagaccagacccctgctgaacatcagaagcgacaagaccctgcaggacatcgtgtacaagctggtgcccggcctgttcaagaacgagatgaagagaagaagagacttctacgccgcccaccccagcgccgactag

SEQ ID NO: 9580 - DNA, 624 bp, synthetic construct
  misc_feature 1..624: note = Description of Artificial Sequence: Synthetic coding sequence
  source 1..624: mol_type = other DNA
atgcacagaaccaccagaatcaagatcaccgagctgaacccccacctgatgtgcgtgctgtgcggcggctacttcatcgacgccaccaccatcatcgagtgcctgcacagcttctgcaagacctgcatcgtgagatacctggagaccagcaagtactgccccatctgcgacgtgcaggtgcacaagaccagacccctgctgaacatcagaagcgacaagaccctgcaggacatcgtgtacaagctggtgcccggcctgttcaagaacgagatgaagagaagaagagacttctacgccgcccaccccagcgccgacgccgccaacggcagcaacgaggacagaggcgaggtggccgacgaggacaagagaatcatcaccgacgacgagatcatcagcctgagcatcgagttcttcgaccagaacagactggacagaaaggtgaacaaggacaaggagaagagcaaggaggaggtgaacgacaagagatacctgagatgccccgccgccatgaccgtgatgcacctgagaaagttcctgagaagcaagatggacatccccaacaccttccagatcgacgtgatgtacgaggaggagcccctgaaggactactacaccctgatgtag

SEQ ID NO: 9581 - DNA, 453 bp, synthetic construct
  misc_feature 1..453: note = Description of Artificial Sequence: Synthetic coding sequence
  source 1..453: mol_type = other DNA
atgcacagaaccaccagaatcaagatcaccgagctgaacccccacctgatgtgcgtgctgtgcggcggctacttcatcgacgccaccaccatcatcgagtgcctgcacagcttctgcaagacctgcatcgtgagatacctggagaccagcaagtactgccccatctgcgacgtgcaggtgcacaagaccagacccctgctgaacatcagaagcgacaagaccctgcaggacatcgtgtacaagctggtgcccggcctgttcaagaacgagatgaagagaagaagagacttctacgccgcccaccccagcgccgacgccgccaacggcagcaacgaggacagaggcgaggtggccgacgaggacaagagaatcatcaccgacgacgagatcatcagcctgagcatcgagttcttcgaccagaacagactggacagaaaggtgaacaaggactag

SEQ ID NO: 9582 - DNA, 555 bp, synthetic construct
  misc_feature 1..555: note = Description of Artificial Sequence: Synthetic coding sequence
  source 1..555: mol_type = other DNA
tacttcatcgacgccaccaccatcatcgagtgcctgcacagcttctgcaagacctgcatcgtgagatacctggagaccagcaagtactgccccatctgcgacgtgcaggtgcacaagaccagacccctgctgaacatcagactggacagaaaggtgaacaaggacaaggagaagagcaaggaggaggtgaacgacaagagatacctgagatgccccgccgccatgaccgtgatgcacctgagaaagttcctgagaagcaagatggacatccccaacaccttccagatcgacgtgatgtacgaggaggagcccctgaaggactactacaccctgatggacatcgcctacatctacacctggagaagaaacggccccctgcccctgaagtacagagtgagacccacctgcaagagaatgaagatcagccaccagagagacggcctgaccaacgccggcgagctggagagcgacagcggcagcgacaaggccaacagccccgccggcggcatccccagcaccagcagctgcctgcccagccccagcacccccgtgtag

SEQ ID NO: 9583 - DNA, 279 bp, synthetic construct
  misc_feature 1..279: note = Description of Artificial Sequence: Synthetic coding sequence
  source 1..279: mol_type = other DNA
atgcacagaaccaccagaatcaagatcaccgagctgaacccccacctgatgtgcgtgctgtgcggcggctacttcatcgacgccaccaccatcatcgagtgcctgcacagcttctgcaagacctgcatcgtgagatacctggagaccagcaagtactgccccatctgcgacgtgcaggtgcacaagaccagacccctgctgaacatcagaagcgacaagaccctgcaggacatcgtgtacaagctggtgcccggcctgttcaccgccaacggcagctag

SEQ ID NO: 9584 - DNA, 2193 bp, synthetic construct
  misc_feature 1..2193: note = Description of Artificial Sequence: Synthetic coding sequence
  source 1..2193: mol_type = other DNA
atgcccggcgtggccagactgcccctgctgctgggcctgctgctgctgcccagacccggcagacccctggacctggccgactacacctacgacctggccgaggaggacgacagcgagcccctgaactacaaggacccctgcaaggccgccgccttcctgggcgacatcgccctggacgaggaggacctgagagccttccaggtgcagcaggccgtggacctgagaagacacaccgccagaaagagcagcatcaaggccgccgtgcccggcaacaccagcacccccagctgccagagcaccaacggccagccccagagaggcgcctgcggcagatggagaggcagaagcagaagcagaagagccgccaccagcagacccgagagagtgtggcccgacggcgtgatccccttcgtgatcggcggcaacttcaccggcagccagagagccgtgttcagacaggccatgagacactgggagaagcacacctgcgtgaccttcctggagagaaccgacgaggacagctacatcgtgttcacctacagaccctgcggctgctgcagctacgtgggcagaagaggcggcggcccccaggccatcagcatcggcaagaactgcgacaagttcggcatcgtggtgcacgagctgggccacgtggtgggcttctggcacgagcacaccagacccgacagagacagacacgtgagcatcgtgagagagaacatccagcccggccaggagtacaacttcctgaagatggagccccaggaggtggagagcctgggcgagacctacgacttcgacagcatcatgcactacgccagaaacaccttcagcagaggcatcttcctggacaccatcgtgcccaagtacgaggtgaacggcgtgaagccccccatcggccagagaaccagactgagcaagggcgacatcgcccaggccagaaagctgtacaagtgccccgcctgcggcgagaccctgcaggacagcaccggcaacttcagcagccccgagtaccccaacggctacagcgcccacatgcactgcgtgtggagaatcagcgtgacccccggcgagaagatcatcctgaacttcaccagcctggacctgtacagaagcagactgtgctggtacgactacgtggaggtgagagacggcttctggagaaaggcccccctgagaggcagattctgcggcagcaagctgcccgagcccatcgtgagcaccgacagcagactgtgggtggagttcagaagcagcagcaactgggtgggcaagggcttcttcgccgtgtacgaggccatctgcggcggcgacgtgaagaaggactacggccacatccagagccccaactaccccgacgactacagacccagcaaggtgtgcatctggagaatccaggtgagcgagggcttccacgtgggcctgaccttccagagcttcgagatcgagagacacgacagctgcgcctacgactacctggaggtgagagacggccacagcgagagcagcaccctgatcggcagatactgcggctacgagaagcccgacgacatcaagagcaccagcagcagactgtggctgaagttcgtgagcgacggcagcatcaacaaggccggcttcgccgtgaacttcttcaaggaggtggacgagtgcagcagacccaacagaggcggctgcgagcagagatgcctgaacaccctgggcagctacaagtgcagctgcgaccccggctacgagctggcccccgacaagagaagatgcgaggccgcctgcggcggcttcctgaccaagctgaacggcagcatcaccagccccggctggcccaaggagtacccccccaacaagaactgcatctggcagctggtggcccccacccagtacagaatcagcctgcagttcgacttcttcgagaccgagggcaacgacgtgtgcaagtacgacttcgtggaggtgagaagcggcctgaccgccgacagcaagctgcacggcaagttctgcggcagcgagaagcccgaggtgatcaccagccagtacaacaacatgagagtggagttcaagagcgacaacaccgtgagcaagaagggcttcaaggcccacttcttcagcgagaagagacccgccctgcagccccccagaggcagaccccaccagctgaagttcagagtgcagaagagaaacagaaccccccagtag

SEQ ID NO: 9585 - DNA, 2961 bp, synthetic construct
  misc_feature 1..2961: note = Description of Artificial Sequence: Synthetic coding sequence
  source 1..2961: mol_type = other DNA
atgcccggcgtggccagactgcccctgctgctgggcctgctgctgctgcccagacccggcagacccctggacctggccgactacacctacgacctggccgaggaggacgacagcgagcccctgaactacaaggacccctgcaaggccgccgccttcctgggcgacatcgccctggacgaggaggacctgagagccttccaggtgcagcaggccgtggacctgagaagacacaccgccagaaagagcagcatcaaggccgccgtgcccggcaacaccagcacccccagctgccagagcaccaacggccagccccagagaggcgcctgcggcagatggagaggcagaagcagaagcagaagagccgccaccagcagacccgagagagtgtggcccgacggcgtgatccccttcgtgatcggcggcaacttcaccggcagccagagagccgtgttcagacaggccatgagacactgggagaagcacacctgcgtgaccttcctggagagaaccgacgaggacagctacatcgtgttcacctacagaccctgcggctgctgcagctacgtgggcagaagaggcggcggcccccaggccatcagcatcggcaagaactgcgacaagttcggcatcgtggtgcacgagctgggccacgtggtgggcttctggcacgagcacaccagacccgacagagacagacacgtgagcatcgtgagagagaacatccagcccggccaggagtacaacttcctgaagatggagccccaggaggtggagagcctgggcgagacctacgacttcgacagcatcatgcactacgccagaaacaccttcagcagaggcatcttcctggacaccatcgtgcccaagtacgaggtgaacggcgtgaagccccccatcggccagagaaccagactgagcaagggcgacatcgcccaggccagaaagctgtacaagtgccccgcctgcggcgagaccctgcaggacagcaccggcaacttcagcagccccgagtaccccaacggctacagcgcccacatgcactgcgtgtggagaatcagcgtgacccccggcgagaagatcatcctgaacttcaccagcctggacctgtacagaagcagactgtgctggtacgactacgtggaggtgagagacggcttctggagaaaggcccccctgagaggcagattctgcggcagcaagctgcccgagcccatcgtgagcaccgacagcagactgtgggtggagttcagaagcagcagcaactgggtgggcaagggcttcttcgccgtgtacgaggccatctgcggcggcgacgtgaagaaggactacggccacatccagagccccaactaccccgacgactacagacccagcaaggtgtgcatctggagaatccaggtgagcgagggcttccacgtgggcctgaccttccagagcttcgagatcgagagacacgacagctgcgcctacgactacctggaggtgagagacggccacagcgagagcagcaccctgatcggcagatactgcggctacgagaagcccgacgacatcaagagcaccagcagcagactgtggctgaagttcgtgagcgacggcagcatcaacaaggccggcttcgccgtgaacttcttcaaggaggtggacgagtgcagcagacccaacagaggcggctgcgagcagagatgcctgaacaccctgggcagctacaagtgcagctgcgaccccggctacgagctggcccccgacaagagaagatgcgaggccgcctgcggcggcttcctgaccaagctgaacggcagcatcaccagccccggctggcccaaggagtacccccccaacaagaactgcatctggcagctggtggcccccacccagtacagaatcagcctgcagttcgacttcttcgagaccgagggcaacgacgtgtgcaagtacgacttcgtggaggtgagaagcggcctgaccgccgacagcaagctgcacggcaagttctgcggcagcgagaagcccgaggtgatcaccagccagtacaacaacatgagagtggagttcaagagcgacaacaccgtgagcaagaagggcttcaaggcccacttcttcagcgacaaggacgagtgcagcaaggacaacggcggctgccagcaggactgcgtgaacaccttcggcagctacgagtgccagtgcagaagcggcttcgtgctgcacgacaacaagcacgactgcaaggaggccggctgcgaccacaaggtgaccagcaccagcggcaccatcaccagccccaactggcccgacaagtaccccagcaagaaggagtgcacctgggccatcagcagcacccccggccacagagtgaagctgaccttcatggagatggacatcgagagccagcccgagtgcgcctacgaccacctggaggtgttcgacggcagagacgccaaggcccccgtgctgggcagattctgcggcagcaagaagcccgagcccgtgctggccaccggcagcagaatgttcctgagattctacagcgacaacagcgtgcagagaaagggcttccaggccagccacgccaccgagtgcggcggccaggtgagagccgacgtgaagaccaaggacctgtacagccacgcccagttcggcgacaacaactaccccggcggcgtggactgcgagtgggtgatcgtggccgaggagggctacggcgtggagctggtgttccagaccttcgaggtggaggaggagaccgactgcggctacgactacatggagctgttcgacggctacgacagcaccgcccccagactgggcagatactgcggcagcggcccccccgaggaggtgtacagcgccggcgacagcgtgctggtgaagttccacagcgacgacaccatcaccaagaagggcttccacctgagatacaccagcaccaagttccaggacaccctgcacagcagaaagtag

SEQ ID NO: 9586 - DNA, 909 bp, synthetic construct
  misc_feature 1..909: note = Description of Artificial Sequence: Synthetic coding sequence
  source 1..909: mol_type = other DNA
atgcccggcgtggccagactgcccctgctgctgggcctgctgctgctgcccagacccggcagacccctggacctggccgactacacctacgacctggccgaggaggacgacagcgagcccctgaactacaaggacccctgcaaggccgccgccttcctgggcgacatcgccctggacgaggaggacctgagagccttccaggtgcagcaggccgtggacctgagaagacacaccgccagaaagagcagcatcaaggccgccgtgcccggcaacaccagcacccccagctgccagagcaccaacggccagccccagagaggcgcctgcggcagatggagaggcagaagcagaagcagaagagccgccaccagcagacccgagagagtgtggcccgacggcgtgatccccttcgtgatcggcggcaacttcaccggcagccagagagccgtgttcagacaggccatgagacactgggagaagcacacctgcgtgaccttcctggagagaaccgacgaggacagctacatcgtgttcacctacagaccctgcggctgctgcagctacgtgggcagaagaggcggcggcccccaggccatcagcatcggcaagaactgcgacaagttcggcatcgtggtgcacgagctgggccacgtggtgggcttctggcacgagcacaccagacccgacagagacagacacgtgagcatcgtgagagagaacatccagcccggcgtgctgcacagcagcctgctgctgctgagctgcggcagcagaaacggcgccagcttcccctgcagcctggagagcagcatccaccaggccctgtgctggaccggcctgttcctgagacccagccccttccccagactgcccctggccgcccccagaaccctgagagccggcgtgtag

SEQ ID NO: 9587 - DNA, 1869 bp, synthetic construct
  misc_feature 1..1869: note = Description of Artificial Sequence: Synthetic coding sequence
  source 1..1869: mol_type = other DNA
atgcccggcgtggccagactgcccctgctgctgggcctgctgctgctgcccagacccggcagacccctggacctggccgactacacctacgacctggccgaggaggacgacagcgagcccctgaactacaaggacccctgcaaggccgccgccttcctgggcgacatcgccctggacgaggaggacctgagagccttccaggtgcagcaggccgtggacctgagaagacacaccgccagaaagagcagcatcaaggccgccgtgcccggcaacaccagcacccccagctgccagagcaccaacggccagccccagagaggcgcctgcggcagatggagaggcagaagcagaagcagaagagccgccaccagcagacccgagagagtgtggcccgacggcgtgatccccttcgtgatcggcggcaacttcaccggcagccagagagccgtgttcagacaggccatgagacactgggagaagcacacctgcgtgaccttcctggagagaaccgacgaggacagctacatcgtgttcacctacagaccctgcggctgctgcagctacgtgggcagaagaggcggcggcccccaggccatcagcatcggcaagaactgcgacaagttcggcatcgtggtgcacgagctgggccacgtggtgggcttctggcacgagcacaccagacccgacagagacagacacgtgagcatcgtgagagagaacatccagcccggccaggagtacaacttcctgaagatggagccccaggaggtggagagcctgggcgagacctacgacttcgacagcatcatgcactacgccagaaacaccttcagcagaggcatcttcctggacaccatcgtgcccaagtacgaggtgaacggcgtgaagccccccatcggccagagaaccagactgagcaagggcgacatcgcccaggccagaaagctgtacaagtgccccgcctgcggcgagaccctgcaggacagcaccggcaacttcagcagccccgagtaccccaacggctacagcgcccacatgcactgcgtgtggagaatcagcgtgacccccggcgagaagatcatcctgaacttcaccagcctggacctgtacagaagcagactgtgctggtacgactacgtggaggtgagagacggcttctggagaaaggcccccctgagaggcagattctgcggcagcaagctgcccgagcccatcgtgagcaccgacagcagactgtgggtggagttcagaagcagcagcaactgggtgggcaagggcttcttcgccgtgtacgaggccatctgcggcggcgacgtgaagaaggactacggccacatccagagccccaactaccccgacgactacagacccagcaaggtgtgcatctggagaatccaggtgagcgagggcttccacgtgggcctgaccttccagagcttcgagatcgagagacacgacagctgcgcctacgactacctggaggtgagagacggccacagcgagagcagcaccctgatcggcagatactgcggctacgagaagcccgacgacatcaagagcaccagcagcagactgtggctgaagttcgtgagcgacggcagcatcaacaaggccggcttcgccgtgaacttcttcaaggaggtggacgagtgcagcagacccaacagaggcggctgcgagcagagatgcctgaacaccctgggcagctacaagtgcagctgcgaccccggctacgagctggcccccgacaagagaagatgcgagggctgctacgacctgcaggtgggcaagcccctgctgtgggacagacactgcttcagactgagcacccacggccccgagatgctgggcaccgccctgagaggctag

SEQ ID NO: 9588 - DNA, 2472 bp, synthetic construct
  misc_feature 1..2472: note = Description of Artificial Sequence: Synthetic coding sequence
  source 1..2472: mol_type = other DNA
atgcccggcgtggccagactgcccctgctgctgggcctgctgctgctgcccagacccggcagacccctggacctggccgactacacctacgacctggccgaggaggacgacagcgagcccctgaactacaaggacccctgcaaggccgccgccttcctgggcgacatcgccctggacgaggaggacctgagagccttccaggtgcagcaggccgtggacctgagaagacacaccgccagaaagagcagcatcaaggccgccgtgcccggcaacaccagcacccccagctgccagagcaccaacggccagccccagagaggcgcctgcggcagatggagaggcagaagcagaagcagaagagccgccaccagcagacccgagagagtgtggcccgacggcgtgatccccttcgtgatcggcggcaacttcaccggcagccagagagccgtgttcagacaggccatgagacactgggagaagcacacctgcgtgaccttcctggagagaaccgacgaggacagctacatcgtgttcacctacagaccctgcggctgctgcagctacgtgggcagaagaggcggcggcccccaggccatcagcatcggcaagaactgcgacaagttcggcatcgtggtgcacgagctgggccacgtggtgggcttctggcacgagcacaccagacccgacagagacagacacgtgagcatcgtgagagagaacatccagcccggccaggagtacaacttcctgaagatggagccccaggaggtggagagcctgggcgagacctacgacttcgacagcatcatgcactacgccagaaacaccttcagcagaggcatcttcctggacaccatcgtgcccaagtacgaggtgaacggcgtgaagccccccatcggccagagaaccagactgagcaagggcgacatcgcccaggccagaaagctgtacaagtgccccgcctgcggcgagaccctgcaggacagcaccggcaacttcagcagccccgagtaccccaacggctacagcgcccacatgcactgcgtgtggagaatcagcgtgacccccggcgagaagatcatcctgaacttcaccagcctggacctgtacagaagcagactgtgctggtacgactacgtggaggtgagagacggcttctggagaaaggcccccctgagaggcagattctgcggcagcaagctgcccgagcccatcgtgagcaccgacagcagactgtgggtggagttcagaagcagcagcaactgggtgggcaagggcttcttcgccgtgtacgaggccatctgcggcggcgacgtgaagaaggactacggccacatccagagccccaactaccccgacgactacagacccagcaaggtgtgcatctggagaatccaggtgagcgagggcttccacgtgggcctgaccttccagagcttcgagatcgagagacacgacagctgcgcctacgactacctggaggtgagagacggccacagcgagagcagcaccctgatcggcagatactgcggctacgagaagcccgacgacatcaagagcaccagcagcagactgtggctgaagttcgtgagcgacggcagcatcaacaaggccggcttcgccgtgaacttcttcaaggaggtggacgagtgcagcagacccaacagaggcggctgcgagcagagatgcctgaacaccctgggcagctacaagtgcagctgcgaccccggctacgagctggcccccgacaagagaagatgcgaggccgcctgcggcggcttcctgaccaagctgaacggcagcatcaccagccccggctggcccaaggagtacccccccaacaagaactgcatctggcagctggtggcccccacccagtacagaatcagcctgcagttcgacttcttcgagaccgagggcaacgacgtgtgcaagtacgacttcgtggaggtgagaagcggcctgaccgccgacagcaagctgcacggcaagttctgcggcagcgagaagcccgaggtgatcaccagccagtacaacaacatgagagtggagttcaagagcgacaacaccgtgagcaagaagggcttcaaggcccacttcttcagcgtgctggagggcgccggcgacagacacagccacctgagcggcctggagctgctgctgtgcccccacgccctggtggacaccgtgcccgccccccccagcgccctgcacggcgacacccacgcccacacccacacccacgtgcacacccactgccccatcgcccaggagacctgcagaggcccccccctgggcgccagcagactgagcccccagggccccggccacctgaccctggccccccaggagggcagctacctggacttctgggacacccacagaggcgaccccaagcccagaagaagaagaaagagcctgaagaccttcagcctgacccccgccaccttcagaggcatctgggccctgtag

SEQ ID NO: 9589 - DNA, 2193 bp, synthetic construct; identical to SEQ ID NO: 9584
  misc_feature 1..2193: note = Description of Artificial Sequence: Synthetic coding sequence
  source 1..2193: mol_type = other DNA

SEQ ID NO: 9590 - DNA, 1509 bp, synthetic construct
  misc_feature 1..1509: note = Description of Artificial Sequence: Synthetic coding sequence
  source 1..1509: mol_type = other DNA
atgctgctgagaagcgccggcaagctgaacgtgggcaccaagaaggaggacggcgagagcaccgcccccacccccagacccaaggtgctgagatgcaagtgccaccaccactgccccgaggacagcgtgaacaacatctgcagcaccgacggctactgcttcaccatgatcgaggaggacgacagcggcctgcccgtggtgaccagcggctgcctgggcctggagggcagcgacttccagtgcagagacacccccatcccccaccagagaagaagcatcgagtgctgcaccgagagaaacgagtgcaacaaggacctgcaccccaccctgccccccctgaagaacagagacttcgtggacggccccatccaccacagagccctgctgatcagcgtgaccgtgtgcagcctgctgctggtgctgatcatcctgttctgctacttcagatacaagagacaggagaccagacccagatacagcatcggcctggagcaggacgagacctacatcccccccggcgagagcctgagagacctgatcgagcagagccagagcagcggcagcggcagcggcctgcccctgctggtgcagagaaccatcgccaagcagatccagatggtgaagcagatcggcaagggcagatacggcgaggtgtggatgggcaagtggagaggcgagaaggtggccgtgaaggtgttcttcaccaccgaggaggccagctggttcagagagaccgagatctaccagaccgtgctgatgagacacgagaacatcctgggcttcatcgccgccgacatcaagggcaccggcagctggacccagctgtacctgatcaccgactaccacgagaacggcagcctgtacgactacctgaagagcaccaccctggacgccaagagcatgctgaagctggcctacagcagcgtgagcggcctgtgccacctgcacaccgagatcttcagcacccagggcaagcccgccatcgcccacagagacctgaagagcaagaacatcctggtgaagaagaacggcacctgctgcatcgccgacctgggcctggccgtgaagttcatcagcgacaccaacgaggtggacatcccccccaacaccagagtgggcaccaagagatacatgccccccgaggtgctggacgagagcctgaacagaaaccacttccagagctacatcatggccgacatgtacagcttcggcctgatcctgtgggaggtggccagaagatgcgtgagcggcggcatcgtggaggagtaccagctgccctaccacgacctggtgcccagcgaccccagctacgaggacatgagagagatcgtgtgcatcaagaagctgagacccagcttccccaacagatggagcagcgacgagtgcctgagacagatgggcaagctgatgaccgagtgctgggcccacaaccccgccagcagactgaccgccctgagagtgaagaagaccctggccaagatgagcgagagccaggacatcaagctgtag

SEQ ID NO: 9591 - DNA, 1509 bp, synthetic construct; identical to SEQ ID NO: 9590
  misc_feature 1..1509: note = Description of Artificial Sequence: Synthetic coding sequence
  source 1..1509: mol_type = other DNA

SEQ ID NO: 9592 - DNA, 1599 bp, synthetic construct
  misc_feature 1..1599: note = Description of Artificial Sequence: Synthetic coding sequence
  source 1..1599: mol_type = other DNA
atgggctggctggaggagctgaactggcagctgcacatcttcctgctgatcctgctgagcatgcacaccagagccaacttcctggacaacatgctgctgagaagcgccggcaagctgaacgtgggcaccaagaaggaggacggcgagagcaccgcccccacccccagacccaaggtgctgagatgcaagtgccaccaccactgccccgaggacagcgtgaacaacatctgcagcaccgacggctactgcttcaccatgatcgaggaggacgacagcggcctgcccgtggtgaccagcggctgcctgggcctggagggcagcgacttccagtgcagagacacccccatcccccaccagagaagaagcatcgagtgctgcaccgagagaaacgagtgcaacaaggacctgcaccccaccctgccccccctgaagaacagagacttcgtggacggccccatccaccacagagccctgctgatcagcgtgaccgtgtgcagcctgctgctggtgctgatcatcctgttctgctacttcagatacaagagacaggagaccagacccagatacagcatcggcctggagcaggacgagacctacatcccccccggcgagagcctgagagacctgatcgagcagagccagagcagcggcagcggcagcggcctgcccctgctggtgcagagaaccatcgccaagcagatccagatggtgaagcagatcggcaagggcagatacggcgaggtgtggatgggcaagtggagaggcgagaaggtggccgtgaaggtgttcttcaccaccgaggaggccagctggttcagagagaccgagatctaccagaccgtgctgatgagacacgagaacatcctgggcttcatcgccgccgacatcaagggcaccggcagctggacccagctgtacctgatcaccgactaccacgagaacggcagcctgtacgactacctgaagagcaccaccctggacgccaagagcatgctgaagctggcctacagcagcgtgagcggcctgtgccacctgcacaccgagatcttcagcacccagggcaagcccgccatcgcccacagagacctgaagagcaagaacatcctggtgaagaagaacggcacctgctgcatcgccgacctgggcctggccgtgaagttcatcagcgacaccaacgaggtggacatcccccccaacaccagagtgggcaccaagagatacatgccccccgaggtgctggacgagagcctgaacagaaaccacttccagagctacatcatggccgacatgtacagcttcggcctgatcctgtgggaggtggccagaagatgcgtgagcggcggcatcgtggaggagtaccagctgccctaccacgacctggtgcccagcgaccccagctacgaggacatgagagagatcgtgtgcatcaagaagctgagacccagcttccccaacagatggagcagcgacgagtgcctgagacagatgggcaagctgatgaccgagtgctgggcccacaaccccgccagcagactgaccgccctgagagtgaagaagaccctggccaagatgagcgagagccaggacatcaagctgtag

SEQ ID NO: 9593 - DNA, 345 bp, synthetic construct
  misc_feature 1..345: note = Description of Artificial Sequence: Synthetic coding sequence
  source 1..345: mol_type = other DNA
atgctgctgagaagcgccggcaagctgaacgtgggcaccaagaaggaggacggcgagagcaccgcccccacccccagacccaaggtgctgagatgcaagtgccaccaccactgccccgaggacagcgtgaacaacatctgcagcaccgacggctactgcttcaccatgatcgaggaggacgacagcggcctgcccgtggtgaccagcggctgcctgggcctggagggcagcgacttccagtgcagagtgagaaccctgcccttcctgatcaaggaggaccagctgaacgccgcccagaagggcaccaacgtgatcaagacctacaccctgcactgcctgcactag

SEQ ID NO: 9594 - DNA, 378 bp, synthetic construct
  misc_feature 1..378: note = Description of Artificial Sequence: Synthetic coding sequence
  source 1..378: mol_type = other DNA
atgctgctgagaagcgccggcaagctgaacgtgggcaccaagaaggaggacggcgagagcaccgcccccacccccagacccaaggtgctgagatgcaagtgccaccaccactgccccgaggacagcgtgaacaacatctgcagcaccgacggctactgcttcaccatgatcgaggaggacgacagcggcctgcccgtggtgaccagcggctgcctgggcctggagggcagcgacttccagtgcagagacacccccatcccccaccagagaagaagcatcgagtgctgcaccgagagaaacgagtgcaacaaggacctgcaccccaccctgccccccctgaagaacagagacttcgtggacggccccatccaccactag

SEQ ID NO: 9595 - DNA, 1509 bp, synthetic construct; identical to SEQ ID NO: 9590
  misc_feature 1..1509: note = Description of Artificial Sequence: Synthetic coding sequence
  source 1..1509: mol_type = other DNA

SEQ ID NO: 9596 - DNA, 1509 bp, synthetic construct; identical to SEQ ID NO: 9590
  misc_feature 1..1509: note = Description of Artificial Sequence: Synthetic coding sequence
  source 1..1509: mol_type = other DNA

SEQ ID NO: 9597 - DNA, 1509 bp, synthetic construct; identical to SEQ ID NO: 9590
  misc_feature 1..1509: note = Description of Artificial Sequence: Synthetic coding sequence
  source 1..1509: mol_type = other DNA

SEQ ID NO: 9598 - DNA, 4755 bp, synthetic construct
  misc_feature 1..4755: note = Description of Artificial Sequence: Synthetic coding sequence
  source 1..4755: mol_type = other DNA
atgagaggccaggccgccgcccccggccccgtgtggatcctggcccccctgctgctgctgctgctgctgctgggcagaagagccagagccgccgccggcgccgacgccggccccggccccgagccctgcgccaccctggtgcagggcaagttcttcggctacttcagcgccgccgccgtgttccccgccaacgccagcagatgcagctggaccctgagaaaccccgaccccagaagatacaccctgtacatgaaggtggccaaggcccccgtgccctgcagcggccccggcagagtgagaacctaccagttcgacagcttcctggagagcaccagaacctacctgggcgtggagagcttcgacgaggtgctgagactgtgcgaccccagcgcccccctggccttcctgcaggccagcaagcagttcctgcagatgagaagacagcagcccccccagcacgacggcctgagacccagagccggcccccccggccccaccgacgacttcagcgtggagtacctggtggtgggcaacagaaaccccagcagagccgcctgccagatgctgtgcagatggctggacgcctgcctggccggcagcagaagcagccacccctgcggcatcatgcagaccccctgcgcctgcctgggcggcgaggccggcggccccgccgccggccccctggcccccagaggcgacgtgtgcctgagagacgccgtggccggcggccccgagaactgcctgaccagcctgacccaggacagaggcggccacggcgccaccggcggctggaagctgtggagcctgtggggcgagtgcaccagagactgcggcggcggcctgcagaccagaaccagaacctgcctgcccgcccccggcgtggagggcggcggctgcgagggcgtgctggaggagggcagacagtgcaacagagaggcctgcggccccgccggcagaaccagcagcagaagccagagcctgagaagcaccgacgccagaagaagagaggagctgggcgacgagctgcagcagttcggcttccccgccccccagaccggcgaccccgccgccgaggagtggagcccctggagcgtgtgcagcagcacctgcggcgagggctggcagaccagaaccagattctgcgtgagcagcagctacagcacccagtgcagcggccccctgagagagcagagactgtgcaacaacagcgccgtgtgccccgtgcacggcgcctgggacgagtggagcccctggagcctgtgcagcagcacctgcggcagaggcttcagagacagaaccagaacctgcagacccccccagttcggcggcaacccctgcgagggccccgagaagcagaccaagttctgcaacatcgccctgtgccccggcagagccgtggacggcaactggaacgagtggagcagctggagcgcctgcagcgccagctgcagccagggcagacagcagagaaccagagagtgcaacggccccagctacggcggcgccgagtgccagggccactgggtggagaccagagactgcttcctgcagcagtgccccgtggacggcaagtggcaggcctgggccagctggggcagctgcagcgtgacctgcggcgccggcagccagagaagagagagagtgtgcagcggccccttcttcggcggcgccgcctgccagggcccccaggacgagtacagacagtgcggcacccagagatgccccgagccccacgagatctgcgacgaggacaacttcggcgccgtgatctggaaggagacccccgccggcgaggtggccgccgtgagatgccccagaaacgccaccggcctgatcctgagaagatgcgagctggacgaggagggcatcgcctactgggagccccccacctacatcagatgcgtgagcatcgactacagaaacatccagatgatgaccagagagcacctggccaaggcccagagaggcctgcccggcgagggcgtgagcgaggtgatccagaccctggtggagatcagccaggacggcaccagctacagcggcgacctgctgagcaccatcgacgtgctgagaaacatgaccgagatcttcagaagagcctactacagccccacccccggcgacgtgcagaacttcgtgcagatcctgagcaacctgctggccgaggagaacagagacaagtgggaggaggcccagctggccggccccaacgccaaggagctgttcagactggtggaggacttcgtggacgtgatcggcttcagaatgaaggacctgagagacgcctaccaggtgaccgacaacctggtgctgagcatccacaagctgcccgccagcggcgccaccgacatcagcttccccatgaagggctggagagccaccggcgactgggccaaggtgcccgaggacagagtgaccgtgagcaagagcgtgttcagcaccggcctgaccgaggccgacgaggccagcgtgttcgtggtgggcaccgtgctgtacagaaacctgggcagcttcctggccctgcagagaaacaccaccgtgctgaacagcaaggtgatcagcgtgaccgtgaagcccccccccagaagcctgagaacccccctggagatcgagttcgcccacatgtacaacggcaccaccaaccagacctgcatcctgtgggacgagaccgacgtgcccagcagcagcgcccccccccagctgggcccctggagctggagaggctgcagaaccgtgcccctggacgccctgagaaccagatgcctgtgcgacagactgagcaccttcgccatcctggcccagctgagcgccgacgccaacatggagaaggccaccctgcccagcgtgaccctgatcgtgggctgcggcgtgagcagcctgaccctgctgatgctggtgatcatctacgtgagcgtgtggagatacatcagaagcgagagaagcgtgatcctgatcaacttctgcctgagcatcatcagcagcaacgccctgatcctgatcggccagacccagaccagaaacaaggtggtgtgcaccctggtggccgccttcctgcacttcttcttcctgagcagcttctgctgggtgctgaccgaggcctggcagagctacatggccgtgaccggccacctgagaaacagactgatcagaaagagattcctgtgcctgggctggggcctgcccgccctggtggtggccatcagcgtgggcttcaccaaggccaagggctacagcaccatgaactactgctggctgagcctggagggcggcctgctgtacgccttcgtgggccccgccgccgccgtggtgctggtgaacatggtgatcggcatcctggtgttcaacaagctggtgagcaaggacggcatcaccgacaagaagctgaaggagagagccggcgccagcctgtggagcagctgcgtggtgctgcccctgctggccctgacctggatgagcgccgtgctggccgtgaccgacagaagaagcgccctgttccagatcctgttcgccgtgttcgacagcctggagggcttcgtgatcgtgatggtgcactgcatcctgagaagagaggtgcaggacgccgtgaagtgcagagtggtggacagacaggaggagggcaacggcgacagcggcggcagcttccagaacggccacgcccagctgatgaccgacttcgagaaggacgtggacctggcctgcagaagcgtgctgaacaaggacatcgccgcctgcagaaccgccaccatcaccggcaccctgaagagacccagcctgcccgaggaggagaagctgaagctggcccacgccaagggcccccccaccaacttcaacagcctgcccgccaacgtgagcaagctgcacctgcacggcagccccagataccccggcggccccctgcccgacttccccaaccacagcctgaccctgaagagagacaaggcccccaagagcagcttcgtgggcgacggcgacatcttcaagaagctggacagcgagctgagcagagcccaggagaaggccctggacaccagctacgtgatcctgcccaccgccaccgccaccctgagacccaagcccaaggaggagcccaagtacagcatccacatcgaccagatgccccagaccagactgatccacctgagcaccgcccccgaggccagcctgcccgccagaagcccccccagcagacagccccccagcggcggcccccccgaggccccccccgcccagcccccccccccccccccccccccccccccccccccccagcagcccctgccccccccccccaacctggagcccgccccccccagcctgggcgaccccggcgagcccgccgcccaccccggccccagcaccggccccagcaccaagaacgagaacgtggccaccctgagcgtgagcagcctggagagaagaaagagcagatacgccgagctggacttcgagaagatcatgcacaccagaaagagacaccaggacatgttccaggacctgaacagaaagctgcagcacgccgccgagaaggacaaggaggtgctgggccccgacagcaagcccgagaagcagcagacccccaacaagagaccctgggagagcctgagaaaggcccacggcacccccacctgggtgaagaaggagctggagcccctgcagcccagccccctggagctgagaagcgtggagtgggagagaagcggcgccaccatccccctggtgggccaggacatcatcgacctgcagaccgaggtgtag

SEQ ID NO: 9599 - DNA, 4755 bp, synthetic construct; identical to SEQ ID NO: 9598
  misc_feature 1..4755: note = Description of Artificial Sequence: Synthetic coding sequence
  source 1..4755: mol_type = other DNA

SEQ ID NO: 9600 - DNA, 2334 bp, synthetic construct
  misc_feature 1..2334: note = Description of Artificial Sequence: Synthetic coding sequence
  source 1..2334: mol_type = other DNA
atgcccgacaacagacagcccagaaacagacagcccagaatcagaagcggcaacgagcccagaagcgcccccgccatggagcccgacggcagaggcgcctgggcccacagcagagccgccctggacagactggagaagctgctgagatgcagcagatgcaccaacatcctgagagagcccgtgtgcctgggcggctgcgagcacatcttctgcagcaactgcgtgagcgactgcatcggcaccggctgccccgtgtgctacacccccgcctggatccaggacctgaagatcaacagacagctggacagcatgatccagctgtgcagcaagctgagaaacctgctgcacgacaacgagctgagcgacctgaaggaggacaagcccagaaagagcctgttcaacgacgccggcaacaagaagaacagcatcaagatgtggttcagccccagaagcaagaaggtgagatacgtggtgagcaaggccagcgtgcagacccagcccgccatcaagaaggacgccagcgcccagcaggacagctacgagttcgtgagccccagcccccccgccgacgtgagcgagagagccaagaaggccagcgccagaagcggcaagaagcagaagaagaagaccctggccgagatcaaccagaagtggaacctggaggccgagaaggaggacggcgagttcgacagcaaggaggagagcaagcagaagctggtgagcttctgcagccagcccagcgtgatcagcagcccccagatcaacggcgagatcgacctgctggccagcggcagcctgaccgagagcgagtgcttcggcagcctgaccgaggtgagcctgcccctggccgagcagatcgagagccccgacaccaagagcagaaacgaggtggtgacccccgagaaggtgtgcaagaactacctgaccagcaagaagagcctgcccctggagaacaacggcaagagaggccaccacaacagactgagcagccccatcagcaagagatgcagaaccagcatcctgagcaccagcggcgacttcgtgaagcagaccgtgcccagcgagaacatccccctgcccgagtgcagcagcccccccagctgcaagagaaaggtgggcggcaccagcggcagaaagaacagcaacatgagcgacgagttcatcagcctgagccccggcaccccccccagcaccctgagcagcagcagctacagaagagtgatgagcagccccagcgccatgaagctgctgcccaacatggccgtgaagagaaaccacagaggcgagaccctgctgcacatcgccagcatcaagggcgacatccccagcgtggagtacctgctgcagaacggcagcgaccccaacgtgaaggaccacgccggctggacccccctgcacgaggcctgcaaccacggccacctgaaggtggtggagctgctgctgcagcacaaggccctggtgaacaccaccggctaccagaacgacagccccctgcacgacgccgccaagaacggccacgtggacatcgtgaagctgctgctgagctacggcgccagcagaaacgccgtgaacatcttcggcctgagacccgtggactacaccgacgacgagagcatgaagagcctgctgctgctgcccgagaagaacgagagcagcagcgccagccactgcagcgtgatgaacaccggccagagaagagacggccccctggtgctgatcggcagcggcctgagcagcgagcagcagaagatgctgagcgagctggccgtgatcctgaaggccaagaagtacaccgagttcgacagcaccgtgacccacgtggtggtgcccggcgacgccgtgcagagcaccctgaagtgcatgctgggcatcctgaacggctgctggatcctgaagttcgagtgggtgaaggcctgcctgagaagaaaggtgtgcgagcaggaggagaagtacgagatccccgagggccccagaagaagcagactgaacagagagcagctgctgcccaagctgttcgacggctgctacttctacctgtggggcaccttcaagcaccaccccaaggacaacctgatcaagctggtgaccgccggcggcggccagatcctgagcagaaagcccaagcccgacagcgacgtgacccagaccatcaacaccgtggcctaccacgccagacccgacagcgaccagagattctgcacccagtacatcatctacgaggacctgtgcaactaccaccccgagagagtgagacagggcaaggtgtggaaggcccccagcagctggttcatcgactgcgtgatgagcttcgagctgctgcccctggacagctag

SEQ ID NO: 9601 - DNA, 1704 bp, synthetic construct
  misc_feature 1..1704: note = Description of Artificial Sequence: Synthetic coding sequence
  source 1..1704: mol_type = other DNA
atgtggttcagccccagaagcaagaaggtgagatacgtggtgagcaaggccagcgtgcagacccagcccgccatcaagaaggacgccagcgcccagcaggacagctacgagttcgtgagccccagcccccccgccgacgtgagcgagagagccaagaaggccagcgccagaagcggcaagaagcagaagaagaagaccctggccgagatcaaccagaagtggaacctggaggccgagaaggaggacggcgagttcgacagcaaggaggagagcaagcagaagctggtgagcttctgcagccagcccagcgtgatcagcagcccccagatcaacggcgagatcgacctgctggccagcggcagcctgaccgagagcgagtgcttcggcagcctgaccgaggtgagcctgcccctggccgagcagatcgagagccccgacaccaagagcagaaacgaggtggtgacccccgagaaggtgtgcaagaactacctgaccagcaagaagagcctgcccctggagaacaacggcaagagaggccaccacaacagactgagcagccccatcagcaagagatgcagaaccagcatcctgagcaccagcggcgacttcgtgaagcagaccgtgcccagcgagaacatccccctgcccgagtgcagcagcccccccagctgcaagagaaaggtgggcggcaccagcggcagaaagaacagcaacatgagcgacgagttcatcagcctgagccccggcaccccccccagcaccctgagcagcagcagctacagaagagtgatgagcagccccagcgccatgaagctgctgcccaacatggccgtgaagagaaaccacagaggcgagaccctgctgcacatcgccagcatcaagggcgacatccccagcgtggagtacctgctgcagaacggcagcgaccccaacgtgaaggaccacgccggctggacccccctgcacgaggcctgcaaccacggccacctgaaggtggtggagctgctgctgcagcacaaggccctggtgaacaccaccggctaccagaacgacagccccctgcacgacgccgccaagaacggccacgtggacatcgtgaagctgctgctgagctacggcgccagcagaaacgccgtgaacatcttcggcctgagacccgtggactacaccgacgacgagagcatgaagagcctgctgctgctgcccgagaagaacgagagcagcagcgccagccactgcagcgtgatgaacaccggccagagaagagacggccccctggtgctgatcggcagcggcctgagcagcgagcagcagaagatgctgagcgagctggccgtgatcctgaaggccaagaagtacaccgagttcgacagcaccgtgacccacgtggtggtgcccggcgacgccgtgcagagcaccctgaagtgcatgctgggcatcctgaacggctgctggatcctgaagttcgagtgggtgaaggcctgcctgagaagaaaggtgtgcgagcaggaggagaagtacgagatccccgagggccccagaagaagcagactgaacagagagcactgccagagctgcctgatggacgccaccagcatctgcggcgagcccagcaacaccatccagagaaccaccctgctgagcagcagcctgcaggtgggcgccagaagcagcgtggagagccccagccagaccgtgacctag

SEQ ID NO: 9602 - DNA, 3750 bp, synthetic construct
  misc_feature 1..3750: note = Description of Artificial Sequence: Synthetic coding sequence
  source 1..3750: mol_type = other DNA
atgagcagcatgtggagcgagtacaccatcggcggcgtgaagatctacttcccctacaaggcctaccccagccagctggccatgatgaacagcatcctgagaggcctgaacagcaagcagcactgcctgctggagagccccaccggcagcggcaagagcctggccctgctgtgcagcgccctggcctggcagcagagcctgagcggcaagcccgccgacgagggcgtgagcgagaaggccgaggtgcagctgagctgctgctgcgcctgccacagcaaggacttcaccaacaacgacatgaaccagggcaccagcagacacttcaactaccccagcaccccccccagcgagagaaacggcaccagcagcacctgccaggacagccccgagaagaccaccctggccgccaagctgagcgccaagaagcaggccagcatctacagagacgagaacgacgacttccaggtggagaagaagagaatcagacccctggagaccacccagcagatcagaaagagacactgcttcggcaccgaggtgcacaacctggacgccaaggtggacagcggcaagaccgtgaagctgaacagccccctggagaagatcaacagcttcagcccccagaagccccccggccactgcagcagatgctgctgcagcaccaagcagggcaacagccaggagagcagcaacaccatcaagaaggaccacaccggcaagagcaagatccccaagatctacttcggcaccagaacccacaagcagatcgcccagatcaccagagagctgagaagaaccgcctacagcggcgtgcccatgaccatcctgagcagcagagaccacacctgcgtgcaccccgaggtggtgggcaacttcaacagaaacgagaagtgcatggagctgctggacggcaagaacggcaagagctgctacttctaccacggcgtgcacaagatcagcgaccagcacaccctgcagaccttccagggcatgtgcaaggcctgggacatcgaggagctggtgagcctgggcaagaagctgaaggcctgcccctactacaccgccagagagctgatccaggacgccgacatcatcttctgcccctacaactacctgctggacgcccagatcagagagagcatggacctgaacctgaaggagcaggtggtgatcctggacgaggcccacaacatcgaggactgcgccagagagagcgccagctacagcgtgaccgaggtgcagctgagattcgccagagacgagctggacagcatggtgaacaacaacatcagaaagaaggaccacgagcccctgagagccgtgtgctgcagcctgatcaactggctggaggccaacgccgagtacctggtggagagagactacgagagcgcctgcaagatctggagcggcaacgagatgctgctgaccctgcacaagatgggcatcaccaccgccaccttccccatcctgcagggccacttcagcgccgtgctgcagaaggaggagaagatcagccccatctacggcaaggaggaggccagagaggtgcccgtgatcagcgccagcacccagatcatgctgaagggcctgttcatggtgctggactacctgttcagacagaacagcagattcgccgacgactacaagatcgccatccagcagacctacagctggaccaaccagatcgacatcagcgacaagaacggcctgctggtgctgcccaagaacaagaagagaagcagacagaagaccgccgtgcacgtgctgaacttctggtgcctgaaccccgccgtggccttcagcgacatcaacggcaaggtgcagaccatcgtgctgaccagcggcaccctgagccccatgaagagcttcagcagcgagctgggcgtgaccttcaccatccagctggaggccaaccacatcatcaagaacagccaggtgtgggtgggcaccatcggcagcggccccaagggcagaaacctgtgcgccaccttccagaacaccgagaccttcgagttccaggacgaggtgggcgccctgctgctgagcgtgtgccagaccgtgagccagggcatcctgtgcttcctgcccagctacaagctgctggagaagctgaaggagagatggctgagcaccggcctgtggcacaacctggagctggtgaagaccgtgatcgtggagccccagggcggcgagaagaccaacttcgacgagctgctgcaggtgtactacgacgccatcaagtacaagggcgagaaggacggcgccctgctggtggccgtgtgcagaggcaaggtgagcgagggcctggacttcagcgacgacaacgccagagccgtgatcaccatcggcatccccttccccaacgtgaaggacctgcaggtggagctgaagagacagtacaacgaccaccacagcaagctgagaggcctgctgcccggcagacagtggtacgagatccaggcctacagagccctgaaccaggccctgggcagatgcatcagacacagaaacgactggggcgccctgatcctggtggacgacagattcagaaacaaccccagcagatacatcagcggcctgagcaagtgggtgagacagcagatccagcaccacagcaccttcgagagcgccctggagagcctggccgagttcagcaagaagcaccagaaggtgctgaacgtgagcatcaaggacagaaccaacatccaggacaacgagagcaccctggaggtgaccagcctgaagtacagcaccagcccctacctgctggaggccgccagccacctgagccccgagaacttcgtggaggacgaggccaagatctgcgtgcaggagctgcagtgccccaagatcatcaccaagaacagccccctgcccagcagcatcatcagcagaaaggagaagaacgaccccgtgttcctggaggaggccggcaaggccgagaagatcgtgatcagcagaagcaccagccccaccttcaacaagcagaccaagagagtgagctggagcagcttcaacagcctgggccagtacttcaccggcaagatccccaaggccacccccgagctgggcagcagcgagaacagcgccagcagcccccccagattcaagaccgagaagatggagagcaagaccgtgctgcccttcaccgacaagtgcgagagcagcaacctgaccgtgaacaccagcttcggcagctgcccccagagcgagaccatcatcagcagcctgaagatcgacgccaccctgaccagaaagaaccacagcgagcaccccctgtgcagcgaggaggccctggaccccgacatcgagctgagcctggtgagcgaggaggacaagcagagcaccagcaacagagacttcgagaccgaggccgaggacgagagcatctacttcacccccgagctgtacgaccccgaggacaccgacgaggagaagaacgacctggccgagaccgacagaggcaacagactggccaacaacagcgactgcatcctggccaaggacctgttcgagatcagaaccatcaaggaggtggacagcgccagagaggtgaaggccgaggactgcatcgacaccaagctgaacggcatcctgcacatcgaggagagcaagatcgacgacatcgacggcaacgtgaagaccacctggatcaacgagctggagctgggcaagacccacgagatcgagatcaagaacttcaagcccagccccagcaagaacaagggcatgttccccggcttcaagtag

SEQ ID NO: 9603 - DNA, 945 bp, synthetic construct
  misc_feature 1..945: note = Description of Artificial Sequence: Synthetic coding sequence
  source 1..945: mol_type = other DNA
atggccagcagaagcaagagaagagccgtggagagcggcgtgccccagccccccgacccccccgtgcagagagacgaggaggaggagaaggaggtggagaacgaggacgaggacgacgacgacagcgacaaggagaaggacgaggaggacgaggtgatcgacgaggaggtgaacatcgagttcgaggcctacagcctgagcgacaacgactacgacggcatcaagaagctgctgcagcagctgttcctgaaggcccccgtgaacaccgccgagctgaccgacctgctgatccagcagaaccacatcggcagcgtgatcaagcagaccgacgtgagcgaggacagcaacgacgacatggacgaggacgaggtgttcggcttcatcagcctgctgaacctgaccgagagaaagggcacccagtgcgtggagcagatccaggagctggtgctgagattctgcgagaagaactgcgagaagagcatggtggagcagctggacaagttcctgaacgacaccaccaagcccgtgggcctgctgctgagcgagagattcatcaacgtgcccccccagatcgccctgcccatgtaccagcagctgcagaaggagctggccggcgcccacagaaccaacaagccctgcggcaagtgctacttctacctgctgatcagcaagaccttcgtggaggccggcaagaacaacagcaagaagaagcccagcaacaagaagaaggccgccctgatgttcgccaacgccgaggaggagttcttctacgagaaggccatcctgaagttcaactacagcgtgcaggaggagagcgacacctgcctgggcggcaagtggagcttcgacgacgtgcccatgacccccctgagaaccgtgatgctgatccccggcgacaagatgaacgagatcatggacaagctgaaggagtacctgagcgtgtag

SEQ ID NO: 9604 - DNA, 879 bp, synthetic construct
  misc_feature 1..879: note = Description of Artificial Sequence: Synthetic coding sequence
  source 1..879: mol_type = other DNA
atggccagcagaagcaagagaagagccgtggagagcggcgtgccccagccccccgacccccccgtgcagagagacgaggaggaggagaaggaggtggagaacgaggacgaggacgacgacgacagcgacaaggagaaggacgaggaggacgaggtgatcgacgaggaggtgaacatcgagttcgaggcctacagcctgagcgacaacgactacgacggcatcaagaagctgctgcagcagctgttcctgaaggcccccgtgaacaccgccgagctgaccgacctgctgatccagcagaaccacatcggcagcgtgatcaagcagaccgacgtgagcgaggacagcaacgacgacatggacgaggacgaggtgttcggcttcatcagcctgctgaacctgaccgagagaaagggcacccagtgcgtggagcagatccaggagctggtgctgagattctgcgagaagaactgcgagaagagcatggtggagcagctggacaagttcctgaacgacaccaccaagcccgtgggcctgctgctgagcgagagattcatcaacgtgcccccccagatcgccctgcccatgtaccagcagctgcagaaggagctggccggcgcccacagaaccaacaagccctgcggcaagtgctacttctacctgctgatcagcaagaccttcgtggaggccggcaagaacaacagcaagaagaagcccagcaacaagaagaaggccgccctgatgttcgccaacgccgaggaggagttcttctacgaggagcagggcaagcccgaggtgctgggcggccccgacaccagaagaggcctggagcccgtgcccatccagcacaacggctggagcgtgccccccgtgctggagtag

SEQ ID NO: 9605 - DNA, 969 bp, synthetic construct
  misc_feature 1..969: note = Description of Artificial Sequence: Synthetic coding sequence
  source 1..969: mol_type = other DNA
atggccagcagaagcaagagaagagccgtggagagcggcgtgccccagccccccgacccccccgtgcagagagacgaggaggaggagaaggaggtggagaacgaggacgaggacgacgacgacagcgacaaggagaaggacgaggaggacgaggtgatcgacgaggaggtgaacatcgagttcgaggcctacagcctgagcgacaacgactacgacggcatcaagaagctgctgcagcagctgttcctgaaggcccccgtgaacaccgccgagctgaccgacctgctgatccagcagaaccacatcggcagcgtgatcaagcagaccgacgtgagcgaggacagcaacgacgacatggacgaggacgaggtgttcggcttcatcagcctgctgaacctgaccgagagaaagggcacccagtgcgtggagcagatccaggagctggtgctgagattctgcgagaagaactgcgagaagagcatggtggagcagctggacaagttcctgaacgacaccaccaagcccgtgggcctgctgctgagcgagagattcatcaacgtgcccccccagatcgccctgcccatgtaccagcagctgcagaaggagctggccggcgcccacagaaccaacaagccctgcggcaagtgctacttctacctgctgatcagcaagaccttcgtggaggccggcaagaacaacagcaagaagaagcccagcaacaagaagaaggccgccctgatgttcgccaacgccgaggaggagttcttctacgaggagcagggcaagcccgaggtgctgggcggccccgacaccagaagaggcctggagcccgtgcccatccagcacaacggcggcagcagaggccaggtgaccgccctggtgagcctgaaggccggcctgatccagagcagaagcaccctgagcgacttccagggcaccttcatgaccgtgggcatcgccctgagctag

SEQ ID NO: 9606 - DNA, 879 bp, synthetic construct
  misc_feature 1..879: note = Description of Artificial Sequence: Synthetic coding sequence
  source 1..879: mol_type = other DNA
atggccagcagaagcaagagaagagccgtggagagcggcgtgccccagccccccgacccccccgtgcagagagacgaggaggaggagaaggaggtggagaacgaggacgaggacgacgacgacagcgacaaggagaaggacgaggaggacgaggtgatcgacgaggaggtgaacatcgagttcgaggcctacagcctgagcgacaacgactacgacggcatcaagaagctgctgcagcagctgttcctgaaggcccccgtgaacaccgccgagctgaccgacctgctgatccagcagaaccacatcggcagcgtgatcaagcagaccgacgtgagcgaggacagcaacgacgacatggacgaggacgaggtgttcggcttcatcagcctgctgaacctgaccgagagaaagggcacccagtgcgtggagcagatccaggagctggtgctgagattctgcgagaagaactgcgagaagagcatggtggagcagctggacaagttcctgaacgacaccaccaagcccgtgggcctgctgctgagcgagagattcatcaacgtgcccccccagatcgccctgcccatgtaccagcagctgcagaaggagctggccggcgcccacagaaccaacaagccctgcggcaagtgctacttctacctgctgatcagcaagaccttcgtggaggccggcaagaacaacagcaagaagaagcccagcaacaagaagaaggccgccctgatgttcgccaacgccgaggaggagttcttctacgagaaggccatcctgaagttcaactacagcgtgcaggaggagagcgacacctgcctgggcggcaagtggagcttcgacgactggagcgtgccccccgtgctggagtag

SEQ ID NO: 9607 - DNA, 789 bp, synthetic construct
  misc_feature 1..789: note = Description of Artificial Sequence: Synthetic coding sequence
  source 1..789: mol_type = other DNA
atggccagcagaagcaagagaagagccgtggagagcggcgtgccccagccccccgacccccccgtgcagagagacgaggaggaggagaaggaggtggagaacgaggacgaggacgacgacgacagcgacaaggagaaggacgaggaggacgaggtgatcgacgaggaggtgaacatcgagttcgaggcctacagcctgagcgacaacgactacgacggcatcaagaagctgctgcagcagctgttcctgaaggcccccgtgaacaccgccgagctgaccgacctgctgatccagcagaaccacatcggcagcgtgatcaagggcacccagtgcgtggagcagatccaggagctggtgctgagattctgcgagaagaactgcgagaagagcatggtggagcagctggacaagttcctgaacgacaccaccaagcccgtgggcctgctgctgagcgagagattcatcaacgtgcccccccagatcgccctgcccatgtaccagcagctgcagaaggagctggccggcgcccacagaaccaacaagccctgcggcaagtgctacttctacctgctgatcagcaagaccttcgtggaggccggcaagaacaacagcaagaagaagcccagcaacaagaagaaggccgccctgatgttcgccaacgccgaggaggagttcttctacgaggagcagggcaagcccgaggtgctgggcggccccgacaccagaagaggcctggagcccgtgcccatccagcacaacggctggagcgtgccccccgtgctggagtag

SEQ ID NO: 9608 - DNA, 1398 bp, synthetic construct
  misc_feature 1..1398: note = Description of Artificial Sequence: Synthetic coding sequence
  source 1..1398: mol_type = other DNA
atggtggaccccgtgggcttcgccgaggcctggaaggcccagttccccgacagcgagccccccagaatggagctgagaagcgtgggcgacatcgagcaggagctggagagatgcaaggccagcatcagaagactggagcaggaggtgaaccaggagagattcagaatgatctacctgcagaccctgctggccaaggagaagaagagctacgacagacagagatggggcttcagaagagccgcccaggcccccgacggcgccagcgagcccagagccagcgccagcagaccccagcccgcccccgccgacggcgccgaccccccccccgccgaggagcccgaggccagacccgacggcgagggcagccccggcaaggccagacccggcaccgccagaagacccggcgccgccgccagcggcgagagagacgacagaggcccccccgccagcgtggccgccctgagaagcaacttcgagagaatcagaaagggccacggccagcccggcgccgacgccgagaagcccttctacgtgaacgtggagttccaccacgagagaggcctggtgaaggtgaacgacaaggaggtgagcgacagaatcagcagcctgggcagccaggccatgcagatggagagaaagaagagccagcacggcgccggcagcagcgtgggcgacgccagcagacccccctacagaggcagaagcagcgagagcagctgcggcgtggacggcgactacgaggacgccgagctgaaccccagattcctgaaggacaacctgatcgacgccaacggcggcagcagacccccctggccccccctggagtaccagccctaccagagcatctacgtgggcggcatgatggagggcgagggcaagggccccctgctgagaagccagagcaccagcgagcaggagaagagactgacctggcccagaagaagctacagccccagaagcttcgaggactgcggcggcggctacacccccgactgcagcagcaacgagaacctgaccagcagcgaggaggacttcagcagcggccagagcagcagagtgagccccagccccaccacctacagaatgttcagagacaagagcagaagccccagccagaacagccagcagagcttcgacagcagcagcccccccaccccccagtgccacaagagacacagacactgccccgtggtggtgagcgaggccaccatcgtgggcgtgagaaagaccggccagatctggcccaacgacggcgagggcgccttccacggcgagcaccccggcgccgccgaggaggtgttccagaagctgctgcccgacatcagaggcgccgccgacgccgaccagctggtgtgcgagacccccgactgcccccagcacagcgccgaccaccagtag

SEQ ID NO: 9609 - DNA, 1377 bp, synthetic construct
  misc_feature 1..1377: note = Description of Artificial Sequence: Synthetic coding sequence
  source 1..1377: mol_type = other DNA
atggtggaccccgtgggcttcgccgaggcctggaaggcccagttccccgacagcgagccccccagaatggagctgagaagcgtgggcgacatcgagcaggagctggagagatgcaaggccagcatcagaagactggagcaggaggtgaaccaggagagattcagaatgatctacctgcagaccctgctggccaaggagaagaagagctacgacagacagagatggggcttcagaagagccgcccaggcccccgacggcgccagcgagcccagagccagcgccagcagaccccagcccgcccccgccgacggcgccgaccccccccccgccgaggagcccgaggccagacccgacggcgagggcagccccggcaaggccagacccggcaccgccagaagacccggcgccgccgccagcggcgagagagacgacagaggcccccccgccagcgtggccgccctgagaagcaacttcgagagaatcagaaagggccacggccagcccggcgccgacgccgagaagcccttctacgtgaacgtggagttccaccacgagagaggcctggtgaaggtgaacgacaaggaggtgagcgacagaatcagcagcctgggcagccaggccatgcagatggagagaaagaagagccagcacggcgccggcagcagcgtgggcgacgccagcagacccccctacagaggcagaagcagcgagagcagctgcggcgtggacggcgactacgaggacgccgagctgaaccccagattcctgaaggacaacctgatcgacgccaacggcggcagcagacccccctggccccccctggagtaccagccctaccagagcatctacgtgggcggcatgatggagggcgagggcaagggccccctgctgagaagccagagcaccagcgagcaggagaagagactgacctggcccagaagaagctacagccccagaagcttcgaggactgcggcggcggctacacccccgactgcagcagcaacgagaacctgaccagcagcgaggaggacttcagcagcggccagagcagcagagtgagccccagccccaccacctacagaatgttcagagacaagagcagaagccccagccagaacagccagcagagcttcgacagcagcagcccccccaccccccagtgccacaagagacacagacactgccccgtggtggtgagcgaggccaccatcgtgggcgtgagaaagaccggccagatctggcccaacgacggcgagggcgccttccacggcgacgccgacggcagcttcggcaccccccccggctacggctgcctgtgcctgcccgcctggcccagcggctgcaccgccgccaccgccagagtgaccagaagctag

SEQ ID NO: 9610 - DNA, 3816 bp, synthetic construct
  misc_feature 1..3816: note = Description of Artificial Sequence: Synthetic coding sequence
  source 1..3816: mol_type = other DNA
atggtggaccccgtgggcttcgccgaggcctggaaggcccagttccccgacagcgagccccccagaatggagctgagaagcgtgggcgacatcgagcaggagctggagagatgcaaggccagcatcagaagactggagcaggaggtgaaccaggagagattcagaatgatctacctgcagaccctgctggccaaggagaagaagagctacgacagacagagatggggcttcagaagagccgcccaggcccccgacggcgccagcgagcccagagccagcgccagcagaccccagcccgcccccgccgacggcgccgaccccccccccgccgaggagcccgaggccagacccgacggcgagggcagccccggcaaggccagacccggcaccgccagaagacccggcgccgccgccagcggcgagagagacgacagaggcccccccgccagcgtggccgccctgagaagcaacttcgagagaatcagaaagggccacggccagcccggcgccgacgccgagaagcccttctacgtgaacgtggagttccaccacgagagaggcctggtgaaggtgaacgacaaggaggtgagcgacagaatcagcagcctgggcagccaggccatgcagatggagagaaagaagagccagcacggcgccggcagcagcgtgggcgacgccagcagacccccctacagaggcagaagcagcgagagcagctgcggcgtggacggcgactacgaggacgccgagctgaaccccagattcctgaaggacaacctgatcgacgccaacggcggcagcagacccccctggccccccctggagtaccagccctaccagagcatctacgtgggcggcatgatggagggcgagggcaagggccccctgctgagaagccagagcaccagcgagcaggagaagagactgacctggcccagaagaagctacagccccagaagcttcgaggactgcggcggcggctacacccccgactgcagcagcaacgagaacctgaccagcagcgaggaggacttcagcagcggccagagcagcagagtgagccccagccccaccacctacagaatgttcagagacaagagcagaagccccagccagaacagccagcagagcttcgacagcagcagcccccccaccccccagtgccacaagagacacagacactgccccgtggtggtgagcgaggccaccatcgtgggcgtgagaaagaccggccagatctggcccaacgacggcgagggcgccttccacggcgacgccgacggcagcttcggcaccccccccggctacggctgcgccgccgacagagccgaggagcagagaagacaccaggacggcctgccctacatcgacgacagccccagcagcagcccccacctgagcagcaagggcagaggcagcagagacgccctggtgagcggcgccctggagagcaccaaggccagcgagctggacctggagaagggcctggagatgagaaagtgggtgctgagcggcatcctggccagcgaggagacctacctgagccacctggaggccctgctgctgcccatgaagcccctgaaggccgccgccaccaccagccagcccgtgctgaccagccagcagatcgagaccatcttcttcaaggtgcccgagctgtacgagatccacaaggagttctacgacggcctgttccccagagtgcagcagtggagccaccagcagagagtgggcgacctgttccagaagctggccagccagctgggcgtgtacagagccttcgtggacaactacggcgtggccatggagatggccgagaagtgctgccaggccaacgcccagttcgccgagatcagcgagaacctgagagccagaagcaacaaggacgccaaggaccccaccaccaagaacagcctggagaccctgctgtacaagcccgtggacagagtgaccagaagcaccctggtgctgcacgacctgctgaagcacacccccgccagccaccccgaccaccccctgctgcaggacgccctgagaatcagccagaacttcctgagcagcatcaacgaggagatcacccccagaagacagagcatgaccgtgaagaagggcgagcacagacagctgctgaaggacagcttcatggtggagctggtggagggcgccagaaagctgagacacgtgttcctgttcaccgacctgctgctgtgcaccaagctgaagaagcagagcggcggcaagacccagcagtacgactgcaagtggtacatccccctgaccgacctgagcttccagatggtggacgagctggaggccgtgcccaacatccccctggtgcccgacgaggagctggacgccctgaagatcaagatcagccagatcaagaacgacatccagagagagaagagagccaacaagggcagcaaggccaccgagagactgaagaagaagctgagcgagcaggagagcctgctgctgctgatgagccccagcatggccttcagagtgcacagcagaaacggcaagagctacaccttcctgatcagcagcgactacgagagagccgagtggagagagaacatcagagagcagcagaagaagtgcttcagaagcttcagcctgaccagcgtggagctgcagatgctgaccaacagctgcgtgaagctgcagaccgtgcacagcatccccctgaccatcaacaaggaggacgacgagagccccggcctgtacggcttcctgaacgtgatcgtgcacagcgccaccggcttcaagcagagcagcaacctgtactgcaccctggaggtggacagcttcggctacttcgtgaacaaggccaagaccagagtgtacagagacaccgccgagcccaactggaacgaggagttcgagatcgagctggagggcagccagaccctgagaatcctgtgctacgagaagtgctacaacaagaccaagatccccaaggaggacggcgagagcaccgacagactgatgggcaagggccaggtgcagctggacccccaggccctgcaggacagagactggcagagaaccgtgatcgccatgaacggcatcgaggtgaagctgagcgtgaagttcaacagcagagagttcagcctgaagagaatgcccagcagaaagcagaccggcgtgttcggcgtgaagatcgccgtggtgaccaagagagagagaagcaaggtgccctacatcgtgagacagtgcgtggaggagatcgagagaagaggcatggaggaggtgggcatctacagagtgagcggcgtggccaccgacatccaggccctgaaggccgccttcgacgtgaacaacaaggacgtgagcgtgatgatgagcgagatggacgtgaacgccatcgccggcaccctgaagctgtacttcagagagctgcccgagcccctgttcaccgacgagttctaccccaacttcgccgagggcatcgccctgagcgaccccgtggccaaggagagctgcatgctgaacctgctgctgagcctgcccgaggccaacctgctgaccttcctgttcctgctggaccacctgaagagagtggccgagaaggaggccgtgaacaagatgagcctgcacaacctggccaccgtgttcggccccaccctgctgagacccagcgagaaggagagcaagctgcccgccaaccccagccagcccatcaccatgaccgacagctggagcctggaggtgatgagccaggtgcaggtgctgctgtacttcctgcagctggaggccatccccgcccccgacagcaagagacagagcatcctgttcagcaccgaggtgtag

SEQ ID NO: 9611 - DNA, 2811 bp, synthetic construct
  misc_feature 1..2811: note = Description of Artificial Sequence: Synthetic coding sequence
  source 1..2811: mol_type = other DNA
cccagcgcccccagagtgagcaccgtgggcctgctgtgcagcggcgccggcccccacctgtgcccctgcgccgaggagggcaccggcggcctggagagccagggcgagatcatccccagcagaggcagcagaaagcccgacggcgtgagcggcagcagaagactgttcagcagcctgtgcaagagccaggagggcagcagaaaggagtgcctgagaaagcacagaagactgggccccgccatgcccgtgagcagccccggcttccccggccccctggccagaagcgagcaccacctggacaccgccgccctgcagaccggccagagaagcagcgccggcaccaagatgggctgccccaccctgatgaccagacccccccacagacccaccagcgccgccagagccggcgccgccggcatgagatggagcagagagccctggagccccctgaagagaagcgagctggacctggagaagggcctggagatgagaaagtgggtgctgagcggcatcctggccagcgaggagacctacctgagccacctggaggccctgctgctgcccatgaagcccctgaaggccgccgccaccaccagccagcccgtgctgaccagccagcagatcgagaccatcttcttcaaggtgcccgagctgtacgagatccacaaggagttctacgacggcctgttccccagagtgcagcagtggagccaccagcagagagtgggcgacctgttccagaagctggccagccagctgggcgtgtacagagccttcgtggacaactacggcgtggccatggagatggccgagaagtgctgccaggccaacgcccagttcgccgagatcagcgagaacctgagagccagaagcaacaaggacgccaaggaccccaccaccaagaacagcctggagaccctgctgtacaagcccgtggacagagtgaccagaagcaccctggtgctgcacgacctgctgaagcacacccccgccagccaccccgaccaccccctgctgcaggacgccctgagaatcagccagaacttcctgagcagcatcaacgaggagatcacccccagaagacagagcatgaccgtgaagaagggcgagcacagacagctgctgaaggacagcttcatggtggagctggtggagggcgccagaaagctgagacacgtgttcctgttcaccgacctgctgctgtgcaccaagctgaagaagcagagcggcggcaagacccagcagtacgactgcaagtggtacatccccctgaccgacctgagcttccagatggtggacgagctggaggccgtgcccaacatccccctggtgcccgacgaggagctggacgccctgaagatcaagatcagccagatcaagaacgacatccagagagagaagagagccaacaagggcagcaaggccaccgagagactgaagaagaagctgagcgagcaggagagcctgctgctgctgatgagccccagcatggccttcagagtgcacagcagaaacggcaagagctacaccttcctgatcagcagcgactacgagagagccgagtggagagagaacatcagagagcagcagaagaagtgcttcagaagcttcagcctgaccagcgtggagctgcagatgctgaccaacagctgcgtgaagctgcagaccgtgcacagcatccccctgaccatcaacaaggaggacgacgagagccccggcctgtacggcttcctgaacgtgatcgtgcacagcgccaccggcttcaagcagagcagcaacctgtactgcaccctggaggtggacagcttcggctacttcgtgaacaaggccaagaccagagtgtacagagacaccgccgagcccaactggaacgaggagttcgagatcgagctggagggcagccagaccctgagaatcctgtgctacgagaagtgctacaacaagaccaagatccccaaggaggacggcgagagcaccgacagactgatgggcaagggccaggtgcagctggacccccaggccctgcaggacagagactggcagagaaccgtgatcgccatgaacggcatcgaggtgaagctgagcgtgaagttcaacagcagagagttcagcctgaagagaatgcccagcagaaagcagaccggcgtgttcggcgtgaagatcgccgtggtgaccaagagagagagaagcaaggtgccctacatcgtgagacagtgcgtggaggagatcgagagaagaggcatggaggaggtgggcatctacagagtgagcggcgtggccaccgacatccaggccctgaaggccgccttcgacgtgaacaacaaggacgtgagcgtgatgatgagcgagatggacgtgaacgccatcgccggcaccctgaagctgtacttcagagagctgcccgagcccctgttcaccgacgagttctaccccaacttcgccgagggcatcgccctgagcgaccccgtggccaaggagagctgcatgctgaacctgctgctgagcctgcccgaggccaacctgctgaccttcctgttcctgctggaccacctgaagagagtggccgagaaggaggccgtgaacaagatgagcctgcacaacctggccaccgtgttcggccccaccctgctgagacccagcgagaaggagagcaagctgcccgccaaccccagccagcccatcaccatgaccgacagctggagcctggaggtgatgagccaggtgcaggtgctgctgtacttcctgcagctggaggccatccccgcccccgacagcaagagacagagcatcctgttcagcaccgaggtgtag

SEQ ID NO: 9612 - DNA, 3684 bp, synthetic construct
  misc_feature 1..3684: note = Description of Artificial Sequence: Synthetic coding sequence
  source 1..3684: mol_type = other DNA
atggtggaccccgtgggcttcgccgaggcctggaaggcccagttccccgacagcgagccccccagaatggagctgagaagcgtgggcgacatcgagcaggagctggagagatgcaaggccagcatcagaagactggagcaggaggtgaaccaggagagattcagaatgatctacctgcagaccctgctggccaaggagaagaagagctacgacagacagagatggggcttcagaagagccgcccaggcccccgacggcgccagcgagcccagagccagcgccagcagaccccagcccgcccccgccgacggcgccgaccccccccccgccgaggagcccgaggccagacccgacggcgagggcagccccggcaaggccagacccggcaccgccagaagacccggcgccgccgccagcggcgagagagacgacagaggcccccccgccagcgtggccgccctgagaagcaacttcgagagaatcagaaagggccacggccagcccggcgccgacgccgagaagcccttctacgtgaacgtggagttccaccacgagagaggcctggtgaaggtgaacgacaaggaggtgagcgacagaatcagcagcctgggcagccaggccatgcagatggagagaaagaagagccagcacggcgccggcagcagcgtgggcgacgccagcagacccccctacagaggcagaagcagcgagagcagctgcggcgtggacggcgactacgaggacgccgagctgaaccccagattcctgaaggacaacctgatcgacgccaacggcggcagcagacccccctggccccccctggagtaccagccctaccagagcatctacgtgggcggcatgatggagggcgagggcaagggccccctgctgagaagccagagcaccagcgagcaggagaagagactgacctggcccagaagaagctacagccccagaagcttcgaggactgcggcggcggctacacccccgactgcagcagcaacgagaacctgaccagcagcgaggaggacttcagcagcggccagagcagcagagtgagccccagccccaccacctacagaatgttcagagacaagagcagaagccccagccagaacagccagcagagcttcgacagcagcagcccccccaccccccagtgccacaagagacacagacactgccccgtggtggtgagcgaggccaccatcgtgggcgtgagaaagaccggccagatctggcccaacgacggcgagggcgccttccacggcgacgccgacggcagcttcggcaccccccccggctacggctgcgccgccgacagagccgaggagcagagaagacaccaggacggcctgccctacatcgacgacagccccagcagcagcccccacctgagcagcaagggcagaggcagcagagacgccctggtgagcggcgccctggagagcaccaaggccagcgagctggacctggagaagggcctggagatgagaaagtgggtgctgagcggcatcctggccagcgaggagacctacctgagccacctggaggccctgctgctgcccatgaagcccctgaaggccgccgccaccaccagccagcccgtgctgaccagccagcagatcgagaccatcttcttcaaggtgcccgagctgtacgagatccacaaggagttctacgacggcctgttccccagagtgcagcagtggagccaccagcagagagtgggcgacctgttccagaagctggccagccagctgggcgtgtacagagccttcgtggacaactacggcgtggccatggagatggccgagaagtgctgccaggccaacgcccagttcgccgagatcagcgagaacctgagagccagaagcaacaaggacgccaaggaccccaccaccaagaacagcctggagaccctgctgtacaagcccgtggacagagtgaccagaagcaccctggtgctgcacgacctgctgaagcacacccccgccagccaccccgaccaccccctgctgcaggacgccctgagaatcagccagaacttcctgagcagcatcaacgaggagatcacccccagaagacagagcatgaccgtgaagaagggcgagcacagacagctgctgaaggacagcttcatggtggagctggtggagggcgccagaaagctgagacacgtgttcctgttcaccgacctgctgctgtgcaccaagctgaagaagcagagcggcggcaagacccagcagtacgactgcaagtggtacatccccctgaccgacctgagcttccagatggtggacgagctggaggccgtgcccaacatccccctggtgcccgacgaggagctggacgccctgaagatcaagatcagccagatcaagaacgacatccagagagagaagagagccaacaagggcagcaaggccaccgagagactgaagaagaagctgagcgagcaggagagcctgctgctgctgatgagccccagcatggccttcagagtgcacagcagaaacggcaagagctacaccttcctgatcagcagcgactacgagagagccgagtggagagagaacatcagagagcagcagaagaagtgcttcagaagcttcagcctgaccagcgtggagctgcagatgctgaccaacagctgcgtgaagctgcagaccgtgcacagcatccccctgaccatcaacaaggaggacgacgagagccccggcctgtacggcttcctgaacgtgatcgtgcacagcgccaccggcttcaagcagagcagcaacctgtactgcaccctggaggtggacagcttcggctacttcgtgaacaaggccaagaccagagtgtacagagacaccgccgagcccaactggaacgagctggacccccaggccctgcaggacagagactggcagagaaccgtgatcgccatgaacggcatcgaggtgaagctgagcgtgaagttcaacagcagagagttcagcctgaagagaatgcccagcagaaagcagaccggcgtgttcggcgtgaagatcgccgtggtgaccaagagagagagaagcaaggtgccctacatcgtgagacagtgcgtggaggagatcgagagaagaggcatggaggaggtgggcatctacagagtgagcggcgtggccaccgacatccaggccctgaaggccgccttcgacgtgaacaacaaggacgtgagcgtgatgatgagcgagatggacgtgaacgccatcgccggcaccctgaagctgtacttcagagagctgcccgagcccctgttcaccgacgagttctaccccaacttcgccgagggcatcgccctgagcgaccccgtggccaaggagagctgcatgctgaacctgctgctgagcctgcccgaggccaacctgctgaccttcctgttcctgctggaccacctgaagagagtggccgagaaggaggccgtgaacaagatgagcctgcacaacctggccaccgtgttcggccccaccctgctgagacccagcgagaaggagagcaagctgcccgccaaccccagccagcccatcaccatgaccgacagctggagcctggaggtgatgagccaggtgcaggtgctgctgtacttcctgcagctggaggccatccccgcccccgacagcaagagacagagcatcctgttcagcaccgaggtgtag

SEQ ID NO: 9613 - DNA, 1404 bp, synthetic construct
  misc_feature 1..1404: note = Description of Artificial Sequence: Synthetic coding sequence
  source 1..1404: mol_type = other DNA
atggtggaccccgtgggcttcgccgaggcctggaaggcccagttccccgacagcgagccccccagaatggagctgagaagcgtgggcgacatcgagcaggagctggagagatgcaaggccagcatcagaagactggagcaggaggtgaaccaggagagattcagaatgatctacctgcagaccctgctggccaaggagaagaagagctacgacagacagagatggggcttcagaagagccgcccaggcccccgacggcgccagcgagcccagagccagcgccagcagaccccagcccgcccccgccgacggcgccgaccccccccccgccgaggagcccgaggccagacccgacggcgagggcagccccggcaaggccagacccggcaccgccagaagacccggcgccgccgccagcggcgagagagacgacagaggcccccccgccagcgtggccgccctgagaagcaacttcgagagaatcagaaagggccacggccagcccggcgccgacgccgagaagcccttctacgtgaacgtggagttccaccacgagagaggcctggtgaaggtgaacgacaaggaggtgagcgacagaatcagcagcctgggcagccaggccatgcagatggagagaaagaagagccagcacggcgccggcagcagcgtgggcgacgccagcagacccccctacagaggcagaagcagcgagagcagctgcggcgtggacggcgactacgaggacgccgagctgaaccccagattcctgaaggacaacctgatcgacgccaacggcggcagcagacccccctggccccccctggagtaccagccctaccagagcatctacgtgggcggcatgatggagggcgagggcaagggccccctgctgagaagccagagcaccagcgagcaggagaagagactgacctggcccagaagaagctacagccccagaagcttcgaggactgcggcggcggctacacccccgactgcagcagcaacgagaacctgaccagcagcgaggaggacttcagcagcggccagagcagcagagtgagccccagccccaccacctacagaatgttcagagacaagagcagaagccccagccagaacagccagcagagcttcgacagcagcagcccccccaccccccagtgccacaagagacacagacactgccccgtggtggtgagcgaggccaccatcgtgggcgtgagaaagaccggccagatctggcccaacgacggcgagggcgccttccacggcgacgccgtgctgaagaccgaggtgccccaccagggcgtgagaagagccagactgagcctggaggccctgggcgaggaccccagcttcctgttccccgccagcgacggccccagacacagcagcacctggtag

SEQ ID NO: 9614 - DNA, 1365 bp, synthetic construct
  misc_feature 1..1365: note = Description of Artificial Sequence: Synthetic coding sequence
  source 1..1365: mol_type = other DNA
atggtggaccccgtgggcttcgccgaggcctggaaggcccagttccccgacagcgagccccccagaatggagctgagaagcgtgggcgacatcgagcaggagctggagagatgcaaggccagcatcagaagactggagcaggaggtgaaccaggagagattcagaatgatctacctgcagaccctgctggccaaggagaagaagagctacgacagacagagatggggcttcagaagagccgcccaggcccccgacggcgccagcgagcccagagccagcgccagcagaccccagcccgcccccgccgacggcgccgaccccccccccgccgaggagcccgaggccagacccgacggcgagggcagccccggcaaggccagacccggcaccgccagaagacccggcgccgccgccagcggcgagagagacgacagaggcccccccgccagcgtggccgccctgagaagcaacttcgagagaatcagaaagggccacggccagcccggcgccgacgccgagaagcccttctacgtgaacgtggagttccaccacgagagaggcctggtgaaggtgaacgacaaggaggtgagcgacagaatcagcagcctgggcagccaggccatgcagatggagagaaagaagagccagcacggcgccggcagcagcgtgggcgacgccagcagacccccctacagaggcagaagcagcgagagcagctgcggcgtggacggcgactacgaggacgccgagctgaaccccagattcctgaaggacaacctgatcgacgccaacggcggcagcagacccccctggccccccctggagtaccagccctaccagagcatctacgtgggcggcatgatggagggcgagggcaagggccccctgctgagaagccagagcaccagcgagcaggagaagagactgacctggcccagaagaagctacagccccagaagcttcgaggactgcggcggcggctacacccccgactgcagcagcaacgagaacctgaccagcagcgaggaggacttcagcagcggccagagcagcagagtgagccccagccccaccacctacagaatgttcagagacaagagcagaagccccagccagaacagccagcagagcttcgacagcagcagcccccccaccccccagtgccacaagagacacagacactgccccgtggtggtgagcgaggccaccatcgtgggcgtgagaaagaccggccagatctggcccaacgacggcgagggcgccttccacggcgacgccgacggcagcttcggcaccccccccggctacggctgcgccgccggcagacccccccacctgaccgagctgcccgtgcagcaccagtag

SEQ ID NO: 9615 - DNA, 4704 bp, synthetic construct
  misc_feature 1..4704: note = Description of Artificial Sequence: Synthetic coding sequence
  source 1..4704: mol_type = other DNA
atgaacgtggagaaggccgagttctgcaacaagagcaagcagcccggcctggccagaagccagcacaacagatgggccggcagcaaggagacctgcaacgacagaagaacccccagcaccgagaagaaggtggacctgaacgccgaccccctgtgcgagagaaaggagtggaacaagcagaagctgccctgcagcgagaaccccagagacaccgaggacgtgccctggatcaccctgaacagcagcatccagaaggtgaacgagtggttcagcagaagcgacgagctgctgggcagcgacgacagccacgacggcgagagcgagagcaacgccaaggtggccgacgtgctggacgtgctgaacgaggtggacgagtacagcggcagcagcgagaagatcgacctgctggccagcgacccccacgaggccctgatctgcaagagcgagagagtgcacagcaagagcgtggagagcaacatcgaggacaagatcttcggcaagacctacagaaagaaggccagcctgcccaacctgagccacgtgaccgagaacctgatcatcggcgccttcgtgaccgagccccagatcatccaggagagacccctgaccaacaagctgaagagaaagagaagacccaccagcggcctgcaccccgaggacttcatcaagaaggccgacctggccgtgcagaagacccccgagatgatcaaccagggcaccaaccagaccgagcagaacggccaggtgatgaacatcaccaacagcggccacgagaacaagaccaagggcgacagcatccagaacgagaagaaccccaaccccatcgagagcctggagaaggagagcgccttcaagaccaaggccgagcccatcagcagcagcatcagcaacatggagctggagctgaacatccacaacagcaaggcccccaagaagaacagactgagaagaaagagcagcaccagacacatccacgccctggagctggtggtgagcagaaacctgagcccccccaactgcaccgagctgcagatcgacagctgcagcagcagcgaggagatcaagaagaagaagtacaaccagatgcccgtgagacacagcagaaacctgcagctgatggagggcaaggagcccgccaccggcgccaagaagagcaacaagcccaacgagcagaccagcaagagacacgacagcgacaccttccccgagctgaagctgaccaacgcccccggcagcttcaccaagtgcagcaacaccagcgagctgaaggagttcgtgaaccccagcctgcccagagaggagaaggaggagaagctggagaccgtgaaggtgagcaacaacgccgaggaccccaaggacctgatgctgagcggcgagagagtgctgcagaccgagagaagcgtggagagcagcagcatcagcctggtgcccggcaccgactacggcacccaggagagcatcagcctgctggaggtgagcaccctgggcaaggccaagaccgagcccaacaagtgcgtgagccagtgcgccgccttcgagaaccccaagggcctgatccacggctgcagcaaggacaacagaaacgacaccgagggcttcaagtaccccctgggccacgaggtgaaccacagcagagagaccagcatcgagatggaggagagcgagctggacgcccagtacctgcagaacaccttcaaggtgagcaagagacagagcttcgcccccttcagcaaccccggcaacgccgaggaggagtgcgccaccttcagcgcccacagcggcagcctgaagaagcagagccccaaggtgaccttcgagtgcgagcagaaggaggagaaccagggcaagaacgagagcaacatcaagcccgtgcagaccgtgaacatcaccgccggcttccccgtggtgggccagaaggacaagcccgtggacaacgccaagtgcagcatcaagggcggcagcagattctgcctgagcagccagttcagaggcaacgagaccggcctgatcacccccaacaagcacggcctgctgcagaacccctacagaatcccccccctgttccccatcaagagcttcgtgaagaccaagtgcaagaagaacctgctggaggagaacttcgaggagcacagcatgagccccgagagagagatgggcaacgagaacatccccagcaccgtgagcaccatcagcagaaacaacatcagagagaacgtgttcaaggaggccagcagcagcaacatcaacgaggtgggcagcagcaccaacgaggtgggcagcagcatcaacgagatcggcagcagcgacgagaacatccaggccgagctgggcagaaacagaggccccaagctgaacgccatgctgagactgggcgtgctgcagcccgaggtgtacaagcagagcctgcccggcagcaactgcaagcaccccgagatcaagaagcaggagtacgaggaggtggtgcagaccgtgaacaccgacttcagcccctacctgatcagcgacaacctggagcagcccatgggcagcagccacgccagccaggtgtgcagcgagacccccgacgacctgctggacgacggcgagatcaaggaggacaccagcttcgccgagaacgacatcaaggagagcagcgccgtgttcagcaagagcgtgcagaagggcgagctgagcagaagccccagccccttcacccacacccacctggcccagggctacagaagaggcgccaagaagctggagagcagcgaggagaacctgagcagcgaggacgaggagctgccctgcttccagcacctgctgttcggcaaggtgaacaacatccccagccagagcaccagacacagcaccgtggccaccgagtgcctgagcaagaacaccgaggagaacctgctgagcctgaagaacagcctgaacgactgcagcaaccaggtgatcctggccaaggccagccaggagcaccacctgagcgaggagaccaagtgcagcgccagcctgttcagcagccagtgcagcgagctggaggacctgaccgccaacaccaacacccaggaccccttcctgatcggcagcagcaagcagatgagacaccagagcgagagccagggcgtgggcctgagcgacaaggagctggtgagcgacgacgaggagagaggcaccggcctggaggagaacaaccaggaggagcagagcatggacagcaacctgggcgaggccgccagcggctgcgagagcgagaccagcgtgagcgaggactgcagcggcctgagcagccagagcgacatcctgaccacccagcagagagacaccatgcagcacaacctgatcaagctgcagcaggagatggccgagctggaggccgtgctggagcagcacggcagccagcccagcaacagctaccccagcatcatcagcgacagcagcgccctggaggacctgagaaaccccgagcagagcaccagcgagaaggccgtgctgaccagccagaagagcagcgagtaccccatcagccagaaccccgagggcctgagcgccgacaagttcgaggtgagcgccgacagcagcaccagcaagaacaaggagcccggcgtggagagaagcagccccagcaagtgccccagcctggacgacagatggtacatgcacagctgcagcggcagcctgcagaacagaaactaccccagccaggaggagctgatcaaggtggtggacgtggaggagcagcagctggaggagagcggcccccacgacctgaccgagaccagctacctgcccagacaggacctggagggcaccccctacctggagagcggcatcagcctgttcagcgacgaccccgagagcgaccccagcgaggacagagcccccgagagcgccagagtgggcaacatccccagcagcaccagcgccctgaaggtgccccagctgaaggtggccgagagcgcccagagccccgccgccgcccacaccaccgacaccgccggctacaacgccatggaggagagcgtgagcagagagaagcccgagctgaccgccagcaccgagagagtgaacaagagaatgagcatggtggtgagcggcctgacccccgaggagttcatgctggtgtacaagttcgccagaaagcaccacatcaccctgaccaacctgatcaccgaggagaccacccacgtggtgatgaagaccgacgccgagttcgtgtgcgagagaaccctgaagtacttcctgggcatcgccggcggcaagtgggtggtgagctacttctgggtgacccagagcatcaaggagagaaagatgctgaacgagcacgacttcgaggtgagaggcgacgtggtgaacggcagaaaccaccagggccccaagagagccagagagagccaggacagaaagatcttcagaggcctggagatctgctgctacggccccttcaccaacatgcccaccgaccagctggagtggatggtgcagctgtgcggcgccagcgtggtgaaggagctgagcagcttcaccctgggcaccggcgtgcaccccatcgtggtggtgcagcccgacgcctggaccgaggacaacggcttccacgccatcggccagatgtgcgaggcccccgtggtgaccagagagtgggtgctggacagcgtggccctgtaccagtgccaggagctggacacctacctgatcccccagatcccccacagccactactag

SEQ ID NO: 9616 - DNA, 4875 bp, synthetic construct
  misc_feature 1..4875: note = Description of Artificial Sequence: Synthetic coding sequence
  source 1..4875: mol_type = other DNA
atggacctgagcgccctgagagtggaggaggtgcagaacgtgatcaacgccatgcagaagatcctggagtgccccatctgcctggagctgatcaaggagcccgtgagcaccaagtgcgaccacatcttctgcaagttctgcatgctgaagctgctgaaccagaagaagggccccagccagtgccccctgtgcaagaacgacatcaccaagagaagcctgcaggagagcaccagattcagccagctggtggaggagctgctgaagatcatctgcgccttccagctggacaccggcctggagtacgccaacagctacaacttcgccaagaaggagaacaacagccccgagcacctgaaggacgaggtgagcatcatccagagcatgggctacagaaacagagccaagagactgctgcagagcgagcccgagaaccccagcctgcaggagaccagcctgagcgtgcagctgagcaacctgggcaccgtgagaaccctgagaaccaagcagagaatccagccccagaagaccagcgtgtacatcgagctgggcagcgacagcagcgaggacaccgtgaacaaggccacctactgcagcgtgggcgaccaggagctgctgcagatcaccccccagggcaccagagacgagatcagcctggacagcgccaagaaggccgcctgcgagttcagcgagaccgacgtgaccaacaccgagcaccaccagcccagcaacaacgacctgaacaccaccgagaagagagccgccgagagacaccccgagaagtaccagggcagcagcgtgagcaacctgcacgtggagccctgcggcaccaacacccacgccagcagcctgcagcacgagaacagcagcctgctgctgaccaaggacagaatgaacgtggagaaggccgagttctgcaacaagagcaagcagcccggcctggccagaagccagcacaacagatgggccggcagcaaggagacctgcaacgacagaagaacccccagcaccgagaagaaggtggacctgaacgccgaccccctgtgcgagagaaaggagtggaacaagcagaagctgccctgcagcgagaaccccagagacaccgaggacgtgccctggatcaccctgaacagcagcatccagaaggtgaacgagtggttcagcagaagcgacgagctgctgggcagcgacgacagccacgacggcgagagcgagagcaacgccaaggtggccgacgtgctggacgtgctgaacgaggtggacgagtacagcggcagcagcgagaagatcgacctgctggccagcgacccccacgaggccctgatctgcaagagcgagagagtgcacagcaagagcgtggagagcaacatcgaggacaagatcttcggcaagacctacagaaagaaggccagcctgcccaacctgagccacgtgaccgagaacctgatcatcggcgccttcgtgaccgagccccagatcatccaggagagacccctgaccaacaagctgaagagaaagagaagacccaccagcggcctgcaccccgaggacttcatcaagaaggccgacctggccgtgcagaagacccccgagatgatcaaccagggcaccaaccagaccgagcagaacggccaggtgatgaacatcaccaacagcggccacgagaacaagaccaagggcgacagcatccagaacgagaagaaccccaaccccatcgagagcctggagaaggagagcgccttcaagaccaaggccgagcccatcagcagcagcatcagcaacatggagctggagctgaacatccacaacagcaaggcccccaagaagaacagactgagaagaaagagcagcaccagacacatccacgccctggagctggtggtgagcagaaacctgagcccccccaactgcaccgagctgcagatcgacagctgcagcagcagcgaggagatcaagaagaagaagtacaaccagatgcccgtgagacacagcagaaacctgcagctgatggagggcaaggagcccgccaccggcgccaagaagagcaacaagcccaacgagcagaccagcaagagacacgacagcgacaccttccccgagctgaagctgaccaacgcccccggcagcttcaccaagtgcagcaacaccagcgagctgaaggagttcgtgaaccccagcctgcccagagaggagaaggaggagaagctggagaccgtgaaggtgagcaacaacgccgaggaccccaaggacctgatgctgagcggcgagagagtgctgcagaccgagagaagcgtggagagcagcagcatcagcctggtgcccggcaccgactacggcacccaggagagcatcagcctgctggaggtgagcaccctgggcaaggccaagaccgagcccaacaagtgcgtgagccagtgcgccgccttcgagaaccccaagggcctgatccacggctgcagcaaggacaacagaaacgacaccgagggcttcaagtaccccctgggccacgaggtgaaccacagcagagagaccagcatcgagatggaggagagcgagctggacgcccagtacctgcagaacaccttcaaggtgagcaagagacagagcttcgcccccttcagcaaccccggcaacgccgaggaggagtgcgccaccttcagcgcccacagcggcagcctgaagaagcagagccccaaggtgaccttcgagtgcgagcagaaggaggagaaccagggcaagaacgagagcaacatcaagcccgtgcagaccgtgaacatcaccgccggcttccccgtggtgggccagaaggacaagcccgtggacaacgccaagtgcagcatcaagggcggcagcagattctgcctgagcagccagttcagaggcaacgagaccggcctgatcacccccaacaagcacggcctgctgcagaacccctacagaatcccccccctgttccccatcaagagcttcgtgaagaccaagtgcaagaagaacctgctggaggagaacttcgaggagcacagcatgagccccgagagagagatgggcaacgagaacatccccagcaccgtgagcaccatcagcagaaacaacatcagagagaacgtgttcaaggaggccagcagcagcaacatcaacgaggtgggcagcagcaccaacgaggtgggcagcagcatcaacgagatcggcagcagcgacgagaacatccaggccgagctgggcagaaacagaggccccaagctgaacgccatgctgagactgggcgtgctgcagcccgaggtgtacaagcagagcctgcccggcagcaactgcaagcaccccgagatcaagaagcaggagtacgaggaggtggtgcagaccgtgaacaccgacttcagcccctacctgatcagcgacaacctggagcagcccatgggcagcagccacgccagccaggtgtgcagcgagacccccgacgacctgctggacgacggcgagatcaaggaggacaccagcttcgccgagaacgacatcaaggagagcagcgccgtgttcagcaagagcgtgcagaagggcgagctgagcagaagccccagccccttcacccacacccacctggcccagggctacagaagaggcgccaagaagctggagagcagcgaggagaacctgagcagcgaggacgaggagctgccctgcttccagcacctgctgttcggcaaggtgaacaacatccccagccagagcaccagacacagcaccgtggccaccgagtgcctgagcaagaacaccgaggagaacctgctgagcctgaagaacagcctgaacgactgcagcaaccaggtgatcctggccaaggccagccaggagcaccacctgagcgaggagaccaagtgcagcgccagcctgttcagcagccagtgcagcgagctggaggacctgaccgccaacaccaacacccaggaccccttcctgatcggcagcagcaagcagatgagacaccagagcgagagccagggcgtgggcctgagcgacaaggagctggtgagcgacgacgaggagagaggcaccggcctggaggagaacaaccaggaggagcagagcatggacagcaacctgggcgaggccgccagcggctgcgagagcgagaccagcgtgagcgaggactgcagcggcctgagcagccagagcgacatcctgaccacccagcagagagacaccatgcagcacaacctgatcaagctgcagcaggagatggccgagctggaggccgtgctggagcagcacggcagccagcccagcaacagctaccccagcatcatcagcgacagcagcgccctggaggacctgagaaaccccgagcagagcaccagcgagaaggacgccgagttcgtgtgcgagagaaccctgaagtacttcctgggcatcgccggcggcaagtgggtggtgagctacttctgggtgacccagagcatcaaggagagaaagatgctgaacgagcacgacttcgaggtgagaggcgacgtggtgaacggcagaaaccaccagggccccaagagagccagagagagccaggacagaaagatcttcagaggcctggagatctgctgctacggccccttcaccaacatgcccaccgaccagctggagtggatggtgcagctgtgcggcgccagcgtggtgaaggagctgagcagcttcaccctgggcaccggcgtgcaccccatcgtggtggtgcagcccgacgcctggaccgaggacaacggcttccacgccatcggccagatgtgcgaggcccccgtggtgaccagagagtgggtgctggacagcgtggccctgtaccagtgccaggagctggacacctacctgatcccccagatcccccacagccactactag

SEQ ID NO: 9617 - DNA, 2043 bp, synthetic construct
  misc_feature 1..2043: note = Description of Artificial Sequence: Synthetic coding sequence
  source 1..2043: mol_type = other DNA
atggacctgagcgccctgagagtggaggaggtgcagaacgtgatcaacgccatgcagaagatcctggagtgccccatctgcctggagctgatcaaggagcccgtgagcaccaagtgcgaccacatcttctgcaagttctgcatgctgaagctgctgaaccagaagaagggccccagccagtgccccctgtgcaagaacgacatcaccaagagaagcctgcaggagagcaccagattcagccagctggtggaggagctgctgaagatcatctgcgccttccagctggacaccggcctggagtacgccaacagctacaacttcgccaagaaggagaacaacagccccgagcacctgaaggacgaggtgagcatcatccagagcatgggctacagaaacagagccaagagactgctgcagagcgagcccgagaaccccagcctgcaggagaccagcctgagcgtgcagctgagcaacctgggcaccgtgagaaccctgagaaccaagcagagaatccagccccagaagaccagcgtgtacatcgagctgggcgaggccgccagcggctgcgagagcgagaccagcgtgagcgaggactgcagcggcctgagcagccagagcgacatcctgaccacccagcagagagacaccatgcagcacaacctgatcaagctgcagcaggagatggccgagctggaggccgtgctggagcagcacggcagccagcccagcaacagctaccccagcatcatcagcgacagcagcgccctggaggacctgagaaaccccgagcagagcaccagcgagaaggccgtgctgaccagccagaagagcagcgagtaccccatcagccagaaccccgagggcctgagcgccgacaagttcgaggtgagcgccgacagcagcaccagcaagaacaaggagcccggcgtggagagaagcagccccagcaagtgccccagcctggacgacagatggtacatgcacagctgcagcggcagcctgcagaacagaaactaccccagccaggaggagctgatcaaggtggtggacgtggaggagcagcagctggaggagagcggcccccacgacctgaccgagaccagctacctgcccagacaggacctggagggcaccccctacctggagagcggcatcagcctgttcagcgacgaccccgagagcgaccccagcgaggacagagcccccgagagcgccagagtgggcaacatccccagcagcaccagcgccctgaaggtgccccagctgaaggtggccgagagcgcccagagccccgccgccgcccacaccaccgacaccgccggctacaacgccatggaggagagcgtgagcagagagaagcccgagctgaccgccagcaccgagagagtgaacaagagaatgagcatggtggtgagcggcctgacccccgaggagttcatgctggtgtacaagttcgccagaaagcaccacatcaccctgaccaacctgatcaccgaggagaccacccacgtggtgatgaagaccgacgccgagttcgtgtgcgagagaaccctgaagtacttcctgggcatcgccggcggcaagtgggtggtgagctacttctgggtgacccagagcatcaaggagagaaagatgctgaacgagcacgacttcgaggtgagaggcgacgtggtgaacggcagaaaccaccagggccccaagagagccagagagagccaggacagaaagatcttcagaggcctggagatctgctgctacggccccttcaccaacatgcccaccgaccagctggagtggatggtgcagctgtgcggcgccagcgtggtgaaggagctgagcagcttcaccctgggcaccggcgtgcaccccatcgtggtggtgcagcccgacgcctggaccgaggacaacggcttccacgccatcggccagatgtgcgaggcccccgtggtgaccagagagtgggtgctggacagcgtggccctgtaccagtgccaggagctggacacctacctgatcccccagatcccccacagccactactag

SEQ ID NO: 9618 - DNA, 2166 bp, synthetic construct
  misc_feature 1..2166: note = Description of Artificial Sequence: Synthetic coding sequence
  source 1..2166: mol_type = other DNA
atggacctgagcgccctgagagtggaggaggtgcagaacgtgatcaacgccatgcagaagatcctggagtgccccatctgcctggagctgatcaaggagcccgtgagcaccaagtgcgaccacatcttctgcaagttctgcatgctgaagctgctgaaccagaagaagggccccagccagtgccccctgtgcaagaacgacatcaccaagagaagcctgcaggagagcaccagattcagccagctggtggaggagctgctgaagatcatctgcgccttccagctggacaccggcctggagtacgccaacagctacaacttcgccaagaaggagaacaacagccccgagcacctgaaggacgaggtgagcatcatccagagcatgggctacagaaacagagccaagagactgctgcagagcgagcccgagaaccccagcctgcaggagaccagcctgagcgtgcagctgagcaacctgggcaccgtgagaaccctgagaaccaagcagagaatccagccccagaagaccagcgtgtacatcgagctgggcagcgacagcagcgaggacaccgtgaacaaggccacctactgcagcgtgggcgaccaggagctgctgcagatcaccccccagggcaccagagacgagatcagcctggacagcgccaagaagggcgaggccgccagcggctgcgagagcgagaccagcgtgagcgaggactgcagcggcctgagcagccagagcgacatcctgaccacccagcagagagacaccatgcagcacaacctgatcaagctgcagcaggagatggccgagctggaggccgtgctggagcagcacggcagccagcccagcaacagctaccccagcatcatcagcgacagcagcgccctggaggacctgagaaaccccgagcagagcaccagcgagaaggccgtgctgaccagccagaagagcagcgagtaccccatcagccagaaccccgagggcctgagcgccgacaagttcgaggtgagcgccgacagcagcaccagcaagaacaaggagcccggcgtggagagaagcagccccagcaagtgccccagcctggacgacagatggtacatgcacagctgcagcggcagcctgcagaacagaaactaccccagccaggaggagctgatcaaggtggtggacgtggaggagcagcagctggaggagagcggcccccacgacctgaccgagaccagctacctgcccagacaggacctggagggcaccccctacctggagagcggcatcagcctgttcagcgacgaccccgagagcgaccccagcgaggacagagcccccgagagcgccagagtgggcaacatccccagcagcaccagcgccctgaaggtgccccagctgaaggtggccgagagcgcccagagccccgccgccgcccacaccaccgacaccgccggctacaacgccatggaggagagcgtgagcagagagaagcccgagctgaccgccagcaccgagagagtgaacaagagaatgagcatggtggtgagcggcctgacccccgaggagttcatgctggtgtacaagttcgccagaaagcaccacatcaccctgaccaacctgatcaccgaggagaccacccacgtggtgatgaagaccgacgccgagttcgtgtgcgagagaaccctgaagtacttcctgggcatcgccggcggcaagtgggtggtgagctacttctgggtgacccagagcatcaaggagagaaagatgctgaacgagcacgacttcgaggtgagaggcgacgtggtgaacggcagaaaccaccagggccccaagagagccagagagagccaggacagaaagatcttcagaggcctggagatctgctgctacggccccttcaccaacatgcccaccgaccagctggagtggatggtgcagctgtgcggcgccagcgtggtgaaggagctgagcagcttcaccctgggcaccggcgtgcaccccatcgtggtggtgcagcccgacgcctggaccgaggacaacggcttccacgccatcggccagatgtgcgaggcccccgtggtgaccagagagtgggtgctggacagcgtggccctgtaccagtgccaggagctggacacctacctgatcccccagatcccccacagccactactag

SEQ ID NO: 9619 - DNA, 4797 bp, synthetic construct
  misc_feature 1..4797: note = Description of Artificial Sequence: Synthetic coding sequence
  source 1..4797: mol_type = other DNA
atggacctgagcgccctgagagtggaggaggtgcagaacgtgatcaacgccatgcagaagatcctggagtgccccatctgcctggagctgatcaaggagcccgtgagcaccaagtgcgaccacatcttctgcaagttctgcatgctgaagctgctgaaccagaagaagggccccagccagtgccccctgtgcaagaacgacatcaccaagagaagcctgcaggagagcaccagattcagccagctggtggaggagctgctgaagatcatctgcgccttccagctggacaccggcctggagtacgccaacagctacaacttcgccaagaaggagaacaacagccccgagcacctgaaggacgaggtgagcatcatccagagcatgggctacagaaacagagccaagagactgctgcagagcgagcccgagaaccccagcctgcaggagaccagcctgagcgtgcagctgagcaacctgggcaccgtgagaaccctgagaaccaagcagagaatccagccccagaagaccagcgtgtacatcgagctgggcagcgacagcagcgaggacaccgtgaacaaggccacctactgcagcgtgggcgaccaggagctgctgcagatcaccccccagggcaccagagacgagatcagcctggacagcgccaagaaggccgcctgcgagttcagcgagaccgacgtgaccaacaccgagcaccaccagcccagcaacaacgacctgaacaccaccgagaagagagccgccgagagacaccccgagaagtaccagggcagcagcgtgagcaacctgcacgtggagccctgcggcaccaacacccacgccagcagcctgcagcacgagaacagcagcctgctgctgaccaaggacagaatgaacgtggagaaggccgagttctgcaacaagagcaagcagcccggcctggccagaagccagcacaacagatgggccggcagcaaggagacctgcaacgacagaagaacccccagcaccgagaagaaggtggacctgaacgccgaccccctgtgcgagagaaaggagtggaacaagcagaagctgccctgcagcgagaaccccagagacaccgaggacgtgccctggatcaccctgaacagcagcatccagaaggtgaacgagtggttcagcagaagcgacgagctgctgggcagcgacgacagccacgacggcgagagcgagagcaacgccaaggtggccgacgtgctggacgtgctgaacgaggtggacgagtacagcggcagcagcgagaagatcgacctgctggccagcgacccccacgaggccctgatctgcaagagcgagagagtgcacagcaagagcgtggagagcaacatcgaggacaagatcttcggcaagacctacagaaagaaggccagcctgcccaacctgagccacgtgaccgagaacctgatcatcggcgccttcgtgaccgagccccagatcatccaggagagacccctgaccaacaagctgaagagaaagagaagacccaccagcggcctgcaccccgaggacttcatcaagaaggccgacctggccgtgcagaagacccccgagatgatcaaccagggcaccaaccagaccgagcagaacggccaggtgatgaacatcaccaacagcggccacgagaacaagaccaagggcgacagcatccagaacgagaagaaccccaaccccatcgagagcctggagaaggagagcgccttcaagaccaaggccgagcccatcagcagcagcatcagcaacatggagctggagctgaacatccacaacagcaaggcccccaagaagaacagactgagaagaaagagcagcaccagacacatccacgccctggagctggtggtgagcagaaacctgagcccccccaactgcaccgagctgcagatcgacagctgcagcagcagcgaggagatcaagaagaagaagtacaaccagatgcccgtgagacacagcagaaacctgcagctgatggagggcaaggagcccgccaccggcgccaagaagagcaacaagcccaacgagcagaccagcaagagacacgacagcgacaccttccccgagctgaagctgaccaacgcccccggcagcttcaccaagtgcagcaacaccagcgagctgaaggagttcgtgaaccccagcctgcccagagaggagaaggaggagaagctggagaccgtgaaggtgagcaacaacgccgaggaccccaaggacctgatgctgagcggcgagagagtgctgcagaccgagagaagcgtggagagcagcagcatcagcctggtgcccggcaccgactacggcacccaggagagcatcagcctgctggaggtgagcaccctgggcaaggccaagaccgagcccaacaagtgcgtgagccagtgcgccgccttcgagaaccccaagggcctgatccacggctgcagcaaggacaacagaaacgacaccgagggcttcaagtaccccctgggccacgaggtgaaccacagcagagagaccagcatcgagatggaggagagcgagctggacgcccagtacctgcagaacaccttcaaggtgagcaagagacagagcttcgcccccttcagcaaccccggcaacgccgaggaggagtgcgccaccttcagcgcccacagcggcagcctgaagaagcagagccccaaggtgaccttcgagtgcgagcagaaggaggagaaccagggcaagaacgagagcaacatcaagcccgtgcagaccgtgaacatcaccgccggcttccccgtggtgggccagaaggacaagcccgtggacaacgccaagtgcagcatcaagggcggcagcagattctgcctgagcagccagttcagaggcaacgagaccggcctgatcacccccaacaagcacggcctgctgcagaacccctacagaatcccccccctgttccccatcaagagcttcgtgaagaccaagtgcaagaagaacctgctggaggagaacttcgaggagcacagcatgagccccgagagagagatgggcaacgagaacatccccagcaccgtgagcaccatcagcagaaacaacatcagagagaacgtgttcaaggaggccagcagcagcaacatcaacgaggtgggcagcagcaccaacgaggtgggcagcagcatcaacgagatcggcagcagcgacgagaacatccaggccgagctgggcagaaacagaggccccaagctgaacgccatgctgagactgggcgtgctgcagcccgaggtgtacaagcagagcctgcccggcagcaactgcaagcaccccgagatcaagaagcaggagtacgaggaggtggtgcagaccgtgaacaccgacttcagcccctacctgatcagcgacaacctggagcagcccatgggcagcagccacgccagccaggtgtgcagcgagacccccgacgacctgctggacgacggcgagatcaaggaggacaccagcttcgccgagaacgacatcaaggagagcagcgccgtgttcagcaagagcgtgcagaagggcgagctgagcagaagccccagccccttcacccacacccacctggcccagggctacagaagaggcgccaagaagctggagagcagcgaggagaacctgagcagcgaggacgaggagctgccctgcttccagcacctgctgttcggcaaggtgaacaacatccccagccagagcaccagacacagcaccgtggccaccgagtgcctgagcaagaacaccgaggagaacctgctgagcctgaagaacagcctgaacgactgcagcaaccaggtgatcctggccaaggccagccaggagcaccacctgagcgaggagaccaagtgcagcgccagcctgttcagcagccagtgcagcgagctggaggacctgaccgccaacaccaacacccaggaccccttcctgatcggcagcagcaagcagatgagacaccagagcgagagccagggcgtgggcctgagcgacaaggagctggtgagcgacgacgaggagagaggcaccggcctggaggagaacaaccaggaggagcagagcatggacagcaacctgggcgaggccgccagcggctgcgagagcgagaccagcgtgagcgaggactgcagcggcctgagcagccagagcgacatcctgaccacccagcagagagacaccatgcagcacaacctgatcaagctgcagcaggagatggccgagctggaggccgtgctggagcagcacggcagccagcccagcaacagctaccccagcatcatcagcgacagcagcgccctggaggacctgagaaaccccgagcagagcaccagcgagaagggcgtgacccagagcatcaaggagagaaagatgctgaacgagcacgacttcgaggtgagaggcgacgtggtgaacggcagaaaccaccagggccccaagagagccagagagagccaggacagaaagatcttcagaggcctggagatctgctgctacggccccttcaccaacatgcccaccgaccagctggagtggatggtgcagctgtgcggcgccagcgtggtgaaggagctgagcagcttcaccctgggcaccggcgtgcaccccatcgtggtggtgcagcccgacgcctggaccgaggacaacggcttccacgccatcggccagatgtgcgaggcccccgtggtgaccagagagtgggtgctggacagcgtggccctgtaccagtgccaggagctggacacctacctgatcccccagatcccccacagccactactag

SEQ ID NO: 9620 - DNA, 5592 bp, synthetic construct
  misc_feature 1..5592: note = Description of Artificial Sequence: Synthetic coding sequence
  source 1..5592: mol_type = other DNA
atggacctgagcgccctgagagtggaggaggtgcagaacgtgatcaacgccatgcagaagatcctggagtgccccatctgcctggagctgatcaaggagcccgtgagcaccaagtgcgaccacatcttctgcaagttctgcatgctgaagctgctgaaccagaagaagggccccagccagtgccccctgtgcaagaacgacatcaccaagagaagcctgcaggagagcaccagattcagccagctggtggaggagctgctgaagatcatctgcgccttccagctggacaccggcctggagtacgccaacagctacaacttcgccaagaaggagaacaacagccccgagcacctgaaggacgaggtgagcatcatccagagcatgggctacagaaacagagccaagagactgctgcagagcgagcccgagaaccccagcctgcaggagaccagcctgagcgtgcagctgagcaacctgggcaccgtgagaaccctgagaaccaagcagagaatccagccccagaagaccagcgtgtacatcgagctgggcagcgacagcagcgaggacaccgtgaacaaggccacctactgcagcgtgggcgaccaggagctgctgcagatcaccccccagggcaccagagacgagatcagcctggacagcgccaagaaggccgcctgcgagttcagcgagaccgacgtgaccaacaccgagcaccaccagcccagcaacaacgacctgaacaccaccgagaagagagccgccgagagacaccccgagaagtaccagggcagcagcgtgagcaacctgcacgtggagccctgcggcaccaacacccacgccagcagcctgcagcacgagaacagcagcctgctgctgaccaaggacagaatgaacgtggagaaggccgagttctgcaacaagagcaagcagcccggcctggccagaagccagcacaacagatgggccggcagcaaggagacctgcaacgacagaagaacccccagcaccgagaagaaggtggacctgaacgccgaccccctgtgcgagagaaaggagtggaacaagcagaagctgccctgcagcgagaaccccagagacaccgaggacgtgccctggatcaccctgaacagcagcatccagaaggtgaacgagtggttcagcagaagcgacgagctgctgggcagcgacgacagccacgacggcgagagcgagagcaacgccaaggtggccgacgtgctggacgtgctgaacgaggtggacgagtacagcggcagcagcgagaagatcgacctgctggccagcgacccccacgaggccctgatctgcaagagcgagagagtgcacagcaagagcgtggagagcaacatcgaggacaagatcttcggcaagacctacagaaagaaggccagcctgcccaacctgagccacgtgaccgagaacctgatcatcggcgccttcgtgaccgagccccagatcatccaggagagacccctgaccaacaagctgaagagaaagagaagacccaccagcggcctgcaccccgaggacttcatcaagaaggccgacctggccgtgcagaagacccccgagatgatcaaccagggcaccaaccagaccgagcagaacggccaggtgatgaacatcaccaacagcggccacgagaacaagaccaagggcgacagcatccagaacgagaagaaccccaaccccatcgagagcctggagaaggagagcgccttcaagaccaaggccgagcccatcagcagcagcatcagcaacatggagctggagctgaacatccacaacagcaaggcccccaagaagaacagactgagaagaaagagcagcaccagacacatccacgccctggagctggtggtgagcagaaacctgagcccccccaactgcaccgagctgcagatcgacagctgcagcagcagcgaggagatcaagaagaagaagtacaaccagatgcccgtgagacacagcagaaacctgcagctgatggagggcaaggagcccgccaccggcgccaagaagagcaacaagcccaacgagcagaccagcaagagacacgacagcgacaccttccccgagctgaagctgaccaacgcccccggcagcttcaccaagtgcagcaacaccagcgagctgaaggagttcgtgaaccccagcctgcccagagaggagaaggaggagaagctggagaccgtgaaggtgagcaacaacgccgaggaccccaaggacctgatgctgagcggcgagagagtgctgcagaccgagagaagcgtggagagcagcagcatcagcctggtgcccggcaccgactacggcacccaggagagcatcagcctgctggaggtgagcaccctgggcaaggccaagaccgagcccaacaagtgcgtgagccagtgcgccgccttcgagaaccccaagggcctgatccacggctgcagcaaggacaacagaaacgacaccgagggcttcaagtaccccctgggccacgaggtgaaccacagcagagagaccagcatcgagatggaggagagcgagctggacgcccagtacctgcagaacaccttcaaggtgagcaagagacagagcttcgcccccttcagcaaccccggcaacgccgaggaggagtgcgccaccttcagcgcccacagcggcagcctgaagaagcagagccccaaggtgaccttcgagtgcgagcagaaggaggagaaccagggcaagaacgagagcaacatcaagcccgtgcagaccgtgaacatcaccgccggcttccccgtggtgggccagaaggacaagcccgtggacaacgccaagtgcagcatcaagggcggcagcagattctgcctgagcagccagttcagaggcaacgagaccggcctgatcacccccaacaagcacggcctgctgcagaacccctacagaatcccccccctgttccccatcaagagcttcgtgaagaccaagtgcaagaagaacctgctggaggagaacttcgaggagcacagcatgagccccgagagagagatgggcaacgagaacatccccagcaccgtgagcaccatcagcagaaacaacatcagagagaacgtgttcaaggaggccagcagcagcaacatcaacgaggtgggcagcagcaccaacgaggtgggcagcagcatcaacgagatcggcagcagcgacgagaacatccaggccgagctgggcagaaacagaggccccaagctgaacgccatgctgagactgggcgtgctgcagcccgaggtgtacaagcagagcctgcccggcagcaactgcaagcaccccgagatcaagaagcaggagtacgaggaggtggtgcagaccgtgaacaccgacttcagcccctacctgatcagcgacaacctggagcagcccatgggcagcagccacgccagccaggtgtgcagcgagacccccgacgacctgctggacgacggcgagatcaaggaggacaccagcttcgccgagaacgacatcaaggagagcagcgccgtgttcagcaagagcgtgcagaagggcgagctgagcagaagccccagccccttcacccacacccacctggcccagggctacagaagaggcgccaagaagctggagagcagcgaggagaacctgagcagcgaggacgaggagctgccctgcttccagcacctgctgttcggcaaggtgaacaacatccccagccagagcaccagacacagcaccgtggccaccgagtgcctgagcaagaacaccgaggagaacctgctgagcctgaagaacagcctgaacgactgcagcaaccaggtgatcctggccaaggccagccaggagcaccacctgagcgaggagaccaagtgcagcgccagcctgttcagcagccagtgcagcgagctggaggacctgaccgccaacaccaacacccaggaccccttcctgatcggcagcagcaagcagatgagacaccagagcgagagccagggcgtgggcctgagcgacaaggagctggtgagcgacgacgaggagagaggcaccggcctggaggagaacaaccaggaggagcagagcatggacagcaacctgggcgaggccgccagcggctgcgagagcgagaccagcgtgagcgaggactgcagcggcctgagcagccagagcgacatcctgaccacccagcagagagacaccatgcagcacaacctgatcaagctgcagcaggagatggccgagctggaggccgtgctggagcagcacggcagccagcccagcaacagctaccccagcatcatcagcgacagcagcgccctggaggacctgagaaaccccgagcagagcaccagcgagaaggccgtgctgaccagccagaagagcagcgagtaccccatcagccagaaccccgagggcctgagcgccgacaagttcgaggtgagcgccgacagcagcaccagcaagaacaaggagcccggcgtggagagaagcagccccagcaagtgccccagcctggacgacagatggtacatgcacagctgcagcggcagcctgcagaacagaaactaccccagccaggaggagctgatcaaggtggtggacgtggaggagcagcagctggaggagagcggcccccacgacctgaccgagaccagctacctgcccagacaggacctggagggcaccccctacctggagagcggcatcagcctgttcagcgacgaccccgagagcgaccccagcgaggacagagcccccgagagcgccagagtgggcaacatccccagcagcaccagcgccctgaaggtgccccagctgaaggtggccgagagcgcccagagccccgccgccgcccacaccaccgacaccgccggctacaacgccatggaggagagcgtgagcagagagaagcccgagctgaccgccagcaccgagagagtgaacaagagaatgagcatggtggtgagcggcctgacccccgaggagttcatgctggtgtacaagttcgccagaaagcaccacatcaccctgaccaacctgatcaccgaggagaccacccacgtggtgatgaagaccgacgccgagttcgtgtgcgagagaaccctgaagtacttcctgggcatcgccggcggcaagtgggtggtgagctacttctgggtgacccagagcatcaaggagagaaagatgctgaacgagcacgacttcgaggtgagaggcgacgtggtgaacggcagaaaccaccagggccccaagagagccagagagagccaggacagaaagatcttcagaggcctggagatctgctgctacggccccttcaccaacatgcccaccgaccagctggagtggatggtgcagctgtgcggcgccagcgtggtgaaggagctgagcagcttcaccctgggcaccggcgtgcaccccatcgtggtggtgcagcccgacgcctggaccgaggacaacggcttccacgccatcggccagatgtgcgaggcccccgtggtgaccagagagtgggtgctggacagcgtggccctgtaccagtgccaggagctggacacctacctgatcccccagatcccccacagccactactag

SEQ ID NO: 9621 - DNA, 2139 bp, synthetic construct
  misc_feature 1..2139: note = Description of Artificial Sequence: Synthetic coding sequence
  source 1..2139: mol_type = other DNA
atgctgaagctgctgaaccagaagaagggccccagccagtgccccctgtgcaagaacgacatcaccaagagaagcctgcaggagagcaccagattcagccagctggtggaggagctgctgaagatcatctgcgccttccagctggacaccggcctggagtacgccaacagctacaacttcgccaagaaggagaacaacagccccgagcacctgaaggacgaggtgagcatcatccagagcatgggctacagaaacagagccaagagactgctgcagagcgagcccgagaaccccagcctgcaggagaccagcctgagcgtgcagctgagcaacctgggcaccgtgagaaccctgagaaccaagcagagaatccagccccagaagaccagcgtgtacatcgagctgggcagcgacagcagcgaggacaccgtgaacaaggccacctactgcagcgtgggcgaccaggagctgctgcagatcaccccccagggcaccagagacgagatcagcctggacagcgccaagaaggccgcctgcgagttcagcgagaccgacgtgaccaacaccgagcaccaccagcccagcaacaacgacctgaacaccaccgagaagagagccgccgagagacaccccgagaagtaccagggcgaggccgccagcggctgcgagagcgagaccagcgtgagcgaggactgcagcggcctgagcagccagagcgacatcctgaccacccagcagagagacaccatgcagcacaacctgatcaagctgcagcaggagatggccgagctggaggccgtgctggagcagcacggcagccagcccagcaacagctaccccagcatcatcagcgacagcagcgccctggaggacctgagaaaccccgagcagagcaccagcgagaaggtgctgaccagccagaagagcagcgagtaccccatcagccagaaccccgagggcctgagcgccgacaagttcgaggtgagcgccgacagcagcaccagcaagaacaaggagcccggcgtggagagaagcagccccagcaagtgccccagcctggacgacagatggtacatgcacagctgcagcggcagcctgcagaacagaaactaccccagccaggaggagctgatcaaggtggtggacgtggaggagcagcagctggaggagagcggcccccacgacctgaccgagaccagctacctgcccagacaggacctggagggcaccccctacctggagagcggcatcagcctgttcagcgacgaccccgagagcgaccccagcgaggacagagcccccgagagcgccagagtgggcaacatccccagcagcaccagcgccctgaaggtgccccagctgaaggtggccgagagcgcccagagccccgccgccgcccacaccaccgacaccgccggctacaacgccatggaggagagcgtgagcagagagaagcccgagctgaccgccagcaccgagagagtgaacaagagaatgagcatggtggtgagcggcctgacccccgaggagttcatgctggtgtacaagttcgccagaaagcaccacatcaccctgaccaacctgatcaccgaggagaccacccacgtggtgatgaagaccgacgccgagttcgtgtgcgagagaaccctgaagtacttcctgggcatcgccggcggcaagtgggtggtgagctacttctgggtgacccagagcatcaaggagagaaagatgctgaacgagcacgacttcgaggtgagaggcgacgtggtgaacggcagaaaccaccagggccccaagagagccagagagagccaggacagaaagatcttcagaggcctggagatctgctgctacggccccttcaccaacatgcccaccgaccagctggagtggatggtgcagctgtgcggcgccagcgtggtgaaggagctgagcagcttcaccctgggcaccggcgtgcaccccatcgtggtggtgcagcccgacgcctggaccgaggacaacggcttccacgccatcggccagatgtgcgaggcccccgtggtgaccagagagtgggtgctggacagcgtggccctgtaccagtgccaggagctggacacctacctgatcccccagatcccccacagccactactag

SEQ ID NO: 9622 - DNA, 5655 bp, synthetic construct
  misc_feature 1..5655: note = Description of Artificial Sequence: Synthetic coding sequence
  source 1..5655: mol_type = other DNA
atggacctgagcgccctgagagtggaggaggtgcagaacgtgatcaacgccatgcagaagatcctggagtgccccatctgcctggagctgatcaaggagcccgtgagcaccaagtgcgaccacatcttctgcaagttctgcatgctgaagctgctgaaccagaagaagggccccagccagtgccccctgtgcaagaacgacatcaccaagagaagcctgcaggagagcaccagattcagccagctggtggaggagctgctgaagatcatctgcgccttccagctggacaccggcctggagtacgccaacagctacaacttcgccaagaaggagaacaacagccccgagcacctgaaggacgaggtgagcatcatccagagcatgggctacagaaacagagccaagagactgctgcagagcgagcccgagaaccccagcctgcaggagaccagcctgagcgtgcagctgagcaacctgggcaccgtgagaaccctgagaaccaagcagagaatccagccccagaagaccagcgtgtacatcgagctgggcagcgacagcagcgaggacaccgtgaacaaggccacctactgcagcgtgggcgaccaggagctgctgcagatcaccccccagggcaccagagacgagatcagcctggacagcgccaagaaggccgcctgcgagttcagcgagaccgacgtgaccaacaccgagcaccaccagcccagcaacaacgacctgaacaccaccgagaagagagccgccgagagacaccccgagaagtaccagggcagcagcgtgagcaacctgcacgtggagccctgcggcaccaacacccacgccagcagcctgcagcacgagaacagcagcctgctgctgaccaaggacagaatgaacgtggagaaggccgagttctgcaacaagagcaagcagcccggcctggccagaagccagcacaacagatgggccggcagcaaggagacctgcaacgacagaagaacccccagcaccgagaagaaggtggacctgaacgccgaccccctgtgcgagagaaaggagtggaacaagcagaagctgccctgcagcgagaaccccagagacaccgaggacgtgccctggatcaccctgaacagcagcatccagaaggtgaacgagtggttcagcagaagcgacgagctgctgggcagcgacgacagccacgacggcgagagcgagagcaacgccaaggtggccgacgtgctggacgtgctgaacgaggtggacgagtacagcggcagcagcgagaagatcgacctgctggccagcgacccccacgaggccctgatctgcaagagcgagagagtgcacagcaagagcgtggagagcaacatcgaggacaagatcttcggcaagacctacagaaagaaggccagcctgcccaacctgagccacgtgaccgagaacctgatcatcggcgccttcgtgaccgagccccagatcatccaggagagacccctgaccaacaagctgaagagaaagagaagacccaccagcggcctgcaccccgaggacttcatcaagaaggccgacctggccgtgcagaagacccccgagatgatcaaccagggcaccaaccagaccgagcagaacggccaggtgatgaacatcaccaacagcggccacgagaacaagaccaagggcgacagcatccagaacgagaagaaccccaaccccatcgagagcctggagaaggagagcgccttcaagaccaaggccgagcccatcagcagcagcatcagcaacatggagctggagctgaacatccacaacagcaaggcccccaagaagaacagactgagaagaaagagcagcaccagacacatccacgccctggagctggtggtgagcagaaacctgagcccccccaactgcaccgagctgcagatcgacagctgcagcagcagcgaggagatcaagaagaagaagtacaaccagatgcccgtgagacacagcagaaacctgcagctgatggagggcaaggagcccgccaccggcgccaagaagagcaacaagcccaacgagcagaccagcaagagacacgacagcgacaccttccccgagctgaagctgaccaacgcccccggcagcttcaccaagtgcagcaacaccagcgagctgaaggagttcgtgaaccccagcctgcccagagaggagaaggaggagaagctggagaccgtgaaggtgagcaacaacgccgaggaccccaaggacctgatgctgagcggcgagagagtgctgcagaccgagagaagcgtggagagcagcagcatcagcctggtgcccggcaccgactacggcacccaggagagcatcagcctgctggaggtgagcaccctgggcaaggccaagaccgagcccaacaagtgcgtgagccagtgcgccgccttcgagaaccccaagggcctgatccacggctgcagcaaggacaacagaaacgacaccgagggcttcaagtaccccctgggccacgaggtgaaccacagcagagagaccagcatcgagatggaggagagcgagctggacgcccagtacctgcagaacaccttcaaggtgagcaagagacagagcttcgcccccttcagcaaccccggcaacgccgaggaggagtgcgccaccttcagcgcccacagcggcagcctgaagaagcagagccccaaggtgaccttcgagtgcgagcagaaggaggagaaccagggcaagaacgagagcaacatcaagcccgtgcagaccgtgaacatcaccgccggcttccccgtggtgggccagaaggacaagcccgtggacaacgccaagtgcagcatcaagggcggcagcagattctgcctgagcagccagttcagaggcaacgagaccggcctgatcacccccaacaagcacggcctgctgcagaacccctacagaatcccccccctgttccccatcaagagcttcgtgaagaccaagtgcaagaagaacctgctggaggagaacttcgaggagcacagcatgagccccgagagagagatgggcaacgagaacatccccagcaccgtgagcaccatcagcagaaacaacatcagagagaacgtgttcaaggaggccagcagcagcaacatcaacgaggtgggcagcagcaccaacgaggtgggcagcagcatcaacgagatcggcagcagcgacgagaacatccaggccgagctgggcagaaacagaggccccaagctgaacgccatgctgagactgggcgtgctgcagcccgaggtgtacaagcagagcctgcccggcagcaactgcaagcaccccgagatcaagaagcaggagtacgaggaggtggtgcagaccgtgaacaccgacttcagcccctacctgatcagcgacaacctggagcagcccatgggcagcagccacgccagccaggtgtgcagcgagacccccgacgacctgctggacgacggcgagatcaaggaggacaccagcttcgccgagaacgacatcaaggagagcagcgccgtgttcagcaagagcgtgcagaagggcgagctgagcagaagccccagccccttcacccacacccacctggcccagggctacagaagaggcgccaagaagctggagagcagcgaggagaacctgagcagcgaggacgaggagctgccctgcttccagcacctgctgttcggcaaggtgaacaacatccccagccagagcaccagacacagcaccgtggccaccgagtgcctgagcaagaacaccgaggagaacctgctgagcctgaagaacagcctgaacgactgcagcaaccaggtgatcctggccaaggccagccaggagcaccacctgagcgaggagaccaagtgcagcgccagcctgttcagcagccagtgcagcgagctggaggacctgaccgccaacaccaacacccaggaccccttcctgatcggcagcagcaagcagatgagacaccagagcgagagccagggcgtgggcctgagcgacaaggagctggtgagcgacgacgaggagagaggcaccggcctggaggagaacaaccaggaggagcagagcatggacagcaacctgggcgaggccgccagcggctgcgagagcgagaccagcgtgagcgaggactgcagcggcctgagcagccagagcgacatcctgaccacccagcagagagacaccatgcagcacaacctgatcaagctgcagcaggagatggccgagctggaggccgtgctggagcagcacggcagccagcccagcaacagctaccccagcatcatcagcgacagcagcgccctggaggacctgagaaaccccgagcagagcaccagcgagaaggacagccacatccacggccagagaaacaacagcatgttcagcaagagacccagagagcacatcagcgtgctgaccagccagaagagcagcgagtaccccatcagccagaaccccgagggcctgagcgccgacaagttcgaggtgagcgccgacagcagcaccagcaagaacaaggagcccggcgtggagagaagcagccccagcaagtgccccagcctggacgacagatggtacatgcacagctgcagcggcagcctgcagaacagaaactaccccagccaggaggagctgatcaaggtggtggacgtggaggagcagcagctggaggagagcggcccccacgacctgaccgagaccagctacctgcccagacaggacctggagggcaccccctacctggagagcggcatcagcctgttcagcgacgaccccgagagcgaccccagcgaggacagagcccccgagagcgccagagtgggcaacatccccagcagcaccagcgccctgaaggtgccccagctgaaggtggccgagagcgcccagagccccgccgccgcccacaccaccgacaccgccggctacaacgccatggaggagagcgtgagcagagagaagcccgagctgaccgccagcaccgagagagtgaacaagagaatgagcatggtggtgagcggcctgacccccgaggagttcatgctggtgtacaagttcgccagaaagcaccacatcaccctgaccaacctgatcaccgaggagaccacccacgtggtgatgaagaccgacgccgagttcgtgtgcgagagaaccctgaagtacttcctgggcatcgccggcggcaagtgggtggtgagctacttctgggtgacccagagcatcaaggagagaaagatgctgaacgagcacgacttcgaggtgagaggcgacgtggtgaacggcagaaaccaccagggccccaagagagccagagagagccaggacagaaagatcttcagaggcctggagatctgctgctacggccccttcaccaacatgcccaccgaccagctggagtggatggtgcagctgtgcggcgccagcgtggtgaaggagctgagcagcttcaccctgggcaccggcgtgcaccccatcgtggtggtgcagcccgacgcctggaccgaggacaacggcttccacgccatcggccagatgtgcgaggcccccgtggtgaccagagagtgggtgctggacagcgtggccctgtaccagtgccaggagctggacacctacctgatcccccagatcccccacagccactactag

SEQ ID NO: 9623 - DNA, 192 bp, synthetic construct
  misc_feature 1..192: note = Description of Artificial Sequence: Synthetic coding sequence
  source 1..192: mol_type = other DNA
atggacctgagcgccctgagagtggaggaggtgcagaacgtgatcaacgccatgcagaagatcctggagtgccccatctgcctggagctgatcaaggagcccgtgagcaccaagtgcgaccacatcttctgcaagttctgcatgctgaagctgctgaaccagaagaagggccccagccagtgccccctgtag

SEQ ID NO: 9624 - DNA, 192 bp, synthetic construct; identical to SEQ ID NO: 9623
  misc_feature 1..192: note = Description of Artificial Sequence: Synthetic coding sequence
  source 1..192: mol_type = other DNA

SEQ ID NO: 9625 - DNA, 2100 bp, synthetic construct
  misc_feature 1..2100: note = Description of Artificial Sequence: Synthetic coding sequence
  source 1..2100: mol_type = other DNA
atggacctgagcgccctgagagtggaggaggtgcagaacgtgatcaacgccatgcagaagatcctggagtgccccatctgcctggagctgatcaaggagcccgtgagcaccaagtgcgaccacatcttctgcaagttctgcatgctgaagctgctgaaccagaagaagggccccagccagtgccccctgtgcaagaacgacatcaccaagagaagcctgcaggagagcaccagattcagccagctggtggaggagctgctgaagatcatctgcgccttccagctggacaccggcctggagtacgccaacagctacaacttcgccaagaaggagaacaacagccccgagcacctgaaggacgaggtgagcatcatccagagcatgggctacagaaacagagccaagagactgctgcagagcgagcccgagaaccccagcctgcaggagaccagcctgagcgtgcagctgagcaacctgggcaccgtgagaaccctgagaaccaagcagagaatccagccccagaagaccagcgtgtacatcgagctgggcagcgacagcagcgaggacaccgtgaacaaggccacctactgcagcgtgggcgaccaggagctgctgcagatcaccccccagggcaccagagacgagatcagcctggacagcgccaagaaggccgcctgcgagttcagcgagaccgacgtgaccaacaccgagcaccaccagcccagcaacaacgacctgaacaccaccgagaagagagccgccgagagacaccccgagaagtaccagggcgaggccgccagcggctgcgagagcgagaccagcgtgagcgaggactgcagcggcctgagcagccagagcgacatcctgaccacccagcagagagacaccatgcagcacaacctgatcaagctgcagcaggagatggccgagctggaggccgtgctggagcagcacggcagccagcccagcaacagctaccccagcatcatcagcgacagcagcgccctggaggacctgagaaaccccgagcagagcaccagcgagaaggtgctgaccagccagaagagcagcgagtaccccatcagccagaaccccgagggcctgagcgccgacaagttcgaggtgagcgccgacagcagcaccagcaagaacaaggagcccggcgtggagagaagcagccccagcaagtgccccagcctggacgacagatggtacatgcacagctgcagcggcagcctgcagaacagaaactaccccagccaggaggagctgatcaaggtggtggacgtggaggagcagcagctggaggagagcggcccccacgacctgaccgagaccagctacctgcccagacaggacctggagggcaccccctacctggagagcggcatcagcctgttcagcgacgaccccgagagcgaccccagcgaggacagagcccccgagagcgccagagtgggcaacatccccagcagcaccagcgccctgaaggtgccccagctgaaggtggccgagagcgcccagagccccgccgccgcccacaccaccgacaccgccggctacaacgccatggaggagagcgtgagcagagagaagcccgagctgaccgccagcaccgagagagtgaacaagagaatgagcatggtggtgagcggcctgacccccgaggagttcatgctggtgtacaagttcgccagaaagcaccacatcaccctgaccaacctgatcaccgaggagaccacccacgtggtgatgaagaccgacgccgagttcgtgtgcgagagaaccctgaagtacttcctgggcatcgccggcggcaagtgggtggtgagctacttctgggtgacccagagcatcaaggagagaaagatgctgaacgagcacgacttcgaggtgagaggcgacgtggtgaacggcagaaaccaccagggccccaagagagccagagagagccaggacagaaagatcttcagaggcctggagatctgctgctacggccccttcaccaacatgcccaccggctgcccccccaactgcggctgcgccgccagatgcctggacagaggccagtggctgccctgcaactgggccgacgtgtag

SEQ ID NO: 9626 - DNA, 1950 bp, synthetic construct
  misc_feature 1..1950: note = Description of Artificial Sequence: Synthetic coding sequence
  source 1..1950: mol_type = other DNA
atggacctgagcgccctgagagtggaggaggtgcagaacgtgatcaacgccatgcagaagatcctggagtgccccatctgcctggagctgatcaaggagcccgtgagcaccaagtgcgaccacatcttctgcaagttctgcatgctgaagctgctgaaccagaagaagggccccagccagtgccccctgtgcaagaacgacatcaccaagagaagcctgcaggagagcaccagattcagccagctggtggaggagctgctgaagatcatctgcgccttccagctggacaccggcctggagtacgccaacagctacaacttcgccaagaaggagaacaacagccccgagcacctgaaggacgaggtgagcatcatccagagcatgggctacagaaacagagccaagagactgctgcagagcgagcccgagaaccccagcctgcaggagaccagcctgagcgtgcagctgagcaacctgggcaccgtgagaaccctgagaaccaagcagagaatccagccccagaagaccagcgtgtacatcgagctgggcagcgacagcagcgaggacaccgtgaacaaggccacctactgcagcgtgggcgaccaggagctgctgcagatcaccccccagggcaccagagacgagatcagcctggacagcgccaagaaggccgcctgcgagttcagcgagaccgacgtgaccaacaccgagcaccaccagcccagcaacaacgacctgaacaccaccgagaagagagccgccgagagacaccccgagaagtaccagggcagcagcgtgagcaacctgcacgtggagccctgcggcaccaacacccacgccagcagcctgcagcacgagaacagcagcctgctgctgaccaaggacagaatgaacgtggagaaggccgagttctgcaacaagagcaagcagcccggcctggccagaagccagcacaacagatgggccggcagcaaggagacctgcaacgacagaagaacccccagcaccgagaagaaggtggacctgaacgccgaccccctgtgcgagagaaaggagtggaacaagcagaagctgccctgcagcgagaaccccagagacaccgaggacgtgccctggatcaccctgaacagcagcatccagaaggtgaacgagtggttcagcagaagcgacgagctgctgggcagcgacgacagccacgacggcgagagcgagagcaacgccaaggtggccgacgtgctggacgtgctgaacgaggtggacgagtacagcggcagcagcgagaagatcgacctgctggccagcgacccccacgaggccctgatctgcaagagcgagagagtgcacagcaagagcgtggagagcaacatcgaggacaagatcttcggcaagacctacagaaagaaggccagcctgcccaacctgagccacgtgaccgagaacctgatcatcggcgccttcgtgaccgagccccagatcatccaggagagacccctgaccaacaagctgaagagaaagagaagacccaccagcggcctgcaccccgaggacttcatcaagaaggccgacctggccgtgcagaagacccccgagatgatcaaccagggcaccaaccagaccgagcagaacggccaggtgatgaacatcaccaacagcggccacgagaacaagaccaagggcgacagcatccagaacgagaagaaccccaaccccatcgagagcctggagaaggagagcgccttcaagaccaaggccgagcccatcagcagcagcatcagcaacatggagctggagctgaacatccacaacagcaaggcccccaagaagaacagactgagaagaaagagcagcaccagacacatccacgccctggagctggtggtgagcagaaacctgagcccccccaactgcaccgagctgcagatcgacagctgcagcagcagcgaggagtag

SEQ ID NO: 9627 - DNA, 5658 bp, synthetic construct
  misc_feature 1..5658: note = Description of Artificial Sequence: Synthetic coding sequence
  source 1..5658: mol_type = other DNA
atggacctgagcgccctgagagtggaggaggtgcagaacgtgatcaacgccatgcagaagatcctggagtgccccatctgcctggagctgatcaaggagcccgtgagcaccaagtgcgaccacatcttctgcaagttctgcatgctgaagctgctgaaccagaagaagggccccagccagtgccccctgtgcaagaacgacatcaccaagagaagcctgcaggagagcaccagattcagccagctggtggaggagctgctgaagatcatctgcgccttccagctggacaccggcctggagtacgccaacagctacaacttcgccaagaaggagaacaacagccccgagcacctgaaggacgaggtgagcatcatccagagcatgggctacagaaacagagccaagagactgctgcagagcgagcccgagaaccccagcctgcaggagaccagcctgagcgtgcagctgagcaacctgggcaccgtgagaaccctgagaaccaagcagagaatccagccccagaagaccagcgtgtacatcgagctgggcagcgacagcagcgaggacaccgtgaacaaggccacctactgcagcgtgggcgaccaggagctgctgcagatcaccccccagggcaccagagacgagatcagcctggacagcgccaagaaggccgcctgcgagttcagcgagaccgacgtgaccaacaccgagcaccaccagcccagcaacaacgacctgaacaccaccgagaagagagccgccgagagacaccccgagaagtaccagggcagcagcgtgagcaacctgcacgtggagccctgcggcaccaacacccacgccagcagcctgcagcacgagaacagcagcctgctgctgaccaaggacagaatgaacgtggagaaggccgagttctgcaacaagagcaagcagcccggcctggccagaagccagcacaacagatgggccggcagcaaggagacctgcaacgacagaagaacccccagcaccgagaagaaggtggacctgaacgccgaccccctgtgcgagagaaaggagtggaacaagcagaagctgccctgcagcgagaaccccagagacaccgaggacgtgccctggatcaccctgaacagcagcatccagaaggtgaacgagtggttcagcagaagcgacgagctgctgggcagcgacgacagccacgacggcgagagcgagagcaacgccaaggtggccgacgtgctggacgtgctgaacgaggtggacgagtacagcggcagcagcgagaagatcgacctgctggccagcgacccccacgaggccctgatctgcaagagcgagagagtgcacagcaagagcgtggagagcaacatcgaggacaagatcttcggcaagacctacagaaagaaggccagcctgcccaacctgagccacgtgaccgagaacctgatcatcggcgccttcgtgaccgagccccagatcatccaggagagacccctgaccaacaagctgaagagaaagagaagacccaccagcggcctgcaccccgaggacttcatcaagaaggccgacctggccgtgcagaagacccccgagatgatcaaccagggcaccaaccagaccgagcagaacggccaggtgatgaacatcaccaacagcggccacgagaacaagaccaagggcgacagcatccagaacgagaagaaccccaaccccatcgagagcctggagaaggagagcgccttcaagaccaaggccgagcccatcagcagcagcatcagcaacatggagctggagctgaacatccacaacagcaaggcccccaagaagaacagactgagaagaaagagcagcaccagacacatccacgccctggagctggtggtgagcagaaacctgagcccccccaactgcaccgagctgcagatcgacagctgcagcagcagcgaggagatcaagaagaagaagtacaaccagatgcccgtgagacacagcagaaacctgcagctgatggagggcaaggagcccgccaccggcgccaagaagagcaacaagcccaacgagcagaccagcaagagacacgacagcgacaccttccccgagctgaagctgaccaacgcccccggcagcttcaccaagtgcagcaacaccagcgagctgaaggagttcgtgaaccccagcctgcccagagaggagaaggaggagaagctggagaccgtgaaggtgagcaacaacgccgaggaccccaaggacctgatgctgagcggcgagagagtgctgcagaccgagagaagcgtggagagcagcagcatcagcctggtgcccggcaccgactacggcacccaggagagcatcagcctgctggaggtgagcaccctgggcaaggccaagaccgagcccaacaagtgcgtgagccagtgcgccgccttcgagaaccccaagggcctgatccacggctgcagcaaggacaacagaaacgacaccgagggcttcaagtaccccctgggccacgaggtgaaccacagcagagagaccagcatcgagatggaggagagcgagctggacgcccagtacctgcagaacaccttcaaggtgagcaagagacagagcttcgcccccttcagcaaccccggcaacgccgaggaggagtgcgccaccttcagcgcccacagcggcagcctgaagaagcagagccccaaggtgaccttcgagtgcgagcagaaggaggagaaccagggcaagaacgagagcaacatcaagcccgtgcagaccgtgaacatcaccgccggcttccccgtggtgggccagaaggacaagcccgtggacaacgccaagtgcagcatcaagggcggcagcagattctgcctgagcagccagttcagaggcaacgagaccggcctgatcacccccaacaagcacggcctgctgcagaacccctacagaatcccccccctgttccccatcaagagcttcgtgaagaccaagtgcaagaagaacctgctggaggagaacttcgaggagcacagcatgagccccgagagagagatgggcaacgagaacatccccagcaccgtgagcaccatcagcagaaacaacatcagagagaacgtgttcaaggaggccagcagcagcaacatcaacgaggtgggcagcagcaccaacgaggtgggcagcagcatcaacgagatcggcagcagcgacgagaacatccaggccgagctgggcagaaacagaggccccaagctgaacgccatgctgagactgggcgtgctgcagcccgaggtgtacaagcagagcctgcccggcagcaactgcaagcaccccgagatcaagaagcaggagtacgaggaggtggtgcagaccgtgaacaccgacttcagcccctacctgatcagcgacaacctggagcagcccatgggcagcagccacgccagccaggtgtgcagcgagacccccgacgacctgctggacgacggcgagatcaaggaggacaccagcttcgccgagaacgacatcaaggagagcagcgccgtgttcagcaagagcgtgcagaagggcgagctgagcagaagccccagccccttcacccacacccacctggcccagggctacagaagaggcgccaagaagctggagagcagcgaggagaacctgagcagcgaggacgaggagctgccctgcttccagcacctgctgttcggcaaggtgaacaacatccccagccagagcaccagacacagcaccgtggccaccgagtgcctgagcaagaacaccgaggagaacctgctgagcctgaagaacagcctgaacgactgcagcaaccaggtgatcctggccaaggccagccaggagcaccacctgagcgaggagaccaagtgcagcgccagcctgttcagcagccagtgcagcgagctggaggacctgaccgccaacaccaacacccaggaccccttcctgatcggcagcagcaagcagatgagacaccagagcgagagccagggcgtgggcctgagcgacaaggagctggtgagcgacgacgaggagagaggcaccggcctggaggagaacaaccaggaggagcagagcatggacagcaacctgggcgaggccgccagcggctgcgagagcgagaccagcgtgagcgaggactgcagcggcctgagcagccagagcgacatcctgaccacccagcagagagacaccatgcagcacaacctgatcaagctgcagcaggagatggccgagctggaggccgtgctggagcagcacggcagccagcccagcaacagctaccccagcatcatcagcgacagcagcgccctggaggacctgagaaaccccgagcagagcaccagcgagaaggacagccacatccacggccagagaaacaacagcatgttcagcaagagacccagagagcacatcagcgccgtgctgaccagccagaagagcagcgagtaccccatcagccagaaccccgagggcctgagcgccgacaagttcgaggtgagcgccgacagcagcaccagcaagaacaaggagcccggcgtggagagaagcagccccagcaagtgccccagcctggacgacagatggtacatgcacagctgcagcggcagcctgcagaacagaaactaccccagccaggaggagctgatcaaggtggtggacgtggaggagcagcagctggaggagagcggcccccacgacctgaccgagaccagctacctgcccagacaggacctggagggcaccccctacctggagagcggcatcagcctgttcagcgacgaccccgagagcgaccccagcgaggacagagcccccgagagcgccagagtgggcaacatccccagcagcaccagcgccctgaaggtgccccagctgaaggtggccgagagcgcccagagccccgccgccgcccacaccaccgacaccgccggctacaacgccatggaggagagcgtgagcagagagaagcccgagctgaccgccagcaccgagagagtgaacaagagaatgagcatggtggtgagcggcctgacccccgaggagttcatgctggtgtacaagttcgccagaaagcaccacatcaccctgaccaacctgatcaccgaggagaccacccacgtggtgatgaagaccgacgccgagttcgtgtgcgagagaaccctgaagtacttcctgggcatcgccggcggcaagtgggtggtgagctacttctgggtgacccagagcatcaaggagagaaagatgctgaacgagcacgacttcgaggtgagaggcgacgtggtgaacggcagaaaccaccagggccccaagagagccagagagagccaggacagaaagatcttcagaggcctggagatctgctgctacggccccttcaccaacatgcccaccgaccagctggagtggatggtgcagctgtgcggcgccagcgtggtgaaggagctgagcagcttcaccctgggcaccggcgtgcaccccatcgtggtggtgcagcccgacgcctggaccgaggacaacggcttccacgccatcggccagatgtgcgaggcccccgtggtgaccagagagtgggtgctggacagcgtggccctgtaccagtgccaggagctggacacctacctgatcccccagatcccccacagccactactag

SEQ ID NO: 9628 - DNA, 669 bp, synthetic construct
  misc_feature 1..669: note = Description of Artificial Sequence: Synthetic coding sequence
  source 1..669: mol_type = other DNA
atggacctgagcgccctgagagtggaggaggtgcagaacgtgatcaacgccatgcagaagatcctggagtgccccatctgcctggagctgatcaaggagcccgtgagcaccaagtgcgaccacatcttctgcaagttctgcatgctgaagctgctgaaccagaagaagggccccagccagtgccccctgtgcaagaacgacatcaccaagagaagcctgcaggagagcaccagattcagccagctggtggaggagctgctgaagatcatctgcgccttccagctggacaccggcctggagtacgccaacagctacaacttcgccaagaaggagaacaacagccccgagcacctgaaggacgaggtgagcatcatccagagcatgggctacagaaacagagccaagagactgctgcagagcgagcccgagaaccccagcctggagaccagcctgagcgtgcagctgagcaacctgggcaccgtgagaaccctgagaaccaagcagagaatccagccccagaagaccagcgtgtacatcgagctgggcagcgacagcagcgaggacaccgtgaacaaggccacctactgcagcgtgggcgaccaggagctgctgcagatcaccccccagggcaccagagacgagatcagcctggacagcgccaagaagtag

SEQ ID NO: 9629 - DNA, 1869 bp, synthetic construct
  misc_feature 1..1869: note = Description of Artificial Sequence: Synthetic coding sequence
  source 1..1869: mol_type = other DNA
atggacctgagcgccctgagagtggaggaggtgcagaacgtgatcaacgccatgcagaagatcctggagtgccccatctgcctggagctgatcaaggagcccgtgagcaccaagtgcgaccacatcttctgcaagagcctgcaggagagcaccagattcagccagctggtggaggagctgctgaagatcatctgcgccttccagctggacaccggcctggagtacgccaacagctacaacttcgccaagaaggagaacaacagccccgagcacctgaaggacgaggtgagcatcatccagagcatgggctacagaaacagagccaagagactgctgcagagcgagcccgagaaccccagcctgcaggagaccagcctgagcgtgcagctgagcaacctgggcaccgtgagaaccctgagaaccaagcagagaatccagccccagaagaccagcgtgtacatcgagctgggcagcgacagcagcgaggacaccgtgaacaaggccacctactgcagcgtgggcgaccaggagctgctgcagatcaccccccagggcaccagagacgagatcagcctggacagcgccaagaaggccgcctgcgagttcagcgagaccgacgtgaccaacaccgagcaccaccagcccagcaacaacgacctgaacaccaccgagaagagagccgccgagagacaccccgagaagtaccagggcagcagcgtgagcaacctgcacgtggagccctgcggcaccaacacccacgccagcagcctgcagcacgagaacagcagcctgctgctgaccaaggacagaatgaacgtggagaaggccgagttctgcaacaagagcaagcagcccggcctggccagaagccagcacaacagatgggccggcagcaaggagacctgcaacgacagaagaacccccagcaccgagaagaaggtggacctgaacgccgaccccctgtgcgagagaaaggagtggaacaagcagaagctgccctgcagcgagaaccccagagacaccgaggacgtgccctggatcaccctgaacagcagcatccagaaggtgaacgagtggttcagcagaagcgacgagctgctgggcagcgacgacagccacgacggcgagagcgagagcaacgccaaggtggccgacgtgctggacgtgctgaacgaggtggacgagtacagcggcagcagcgagaagatcgacctgctggccagcgacccccacgaggccctgatctgcaagagcgagagagtgcacagcaagagcgtggagagcaacatcgaggacaagatcttcggcaagacctacagaaagaaggccagcctgcccaacctgagccacgtgaccgagaacctgatcatcggcgccttcgtgaccgagccccagatcatccaggagagacccctgaccaacaagctgaagagaaagagaagacccaccagcggcctgcaccccgaggacttcatcaagaaggccgacctggccgtgcagaagacccccgagatgatcaaccagggcaccaaccagaccgagcagaacggccaggtgatgaacatcaccaacagcggccacgagaacaagaccaagggcgacagcatccagaacgagaagaaccccaaccccatcgagagcctggagaaggagagcgccttcaagaccaaggccgagcccatcagcagcagcatcagcaacatggagctggagctgaacatccacaacagcaaggcccccaagaagaacagactgagaagaaagagcagcaccagacacatccacgccctggagctggtggtgagcagaaacctgagcccccccaactgcaccgagctgcagatcgacagctgcagcagcagcgagtag

SEQ ID NO: 9630 - DNA, 1872 bp, synthetic construct
  misc_feature 1..1872: note = Description of Artificial Sequence: Synthetic coding sequence
  source 1..1872: mol_type = other DNA
atggacctgagcgccctgagagtggaggaggtgcagaacgtgatcaacgccatgcagaagatcctggagtgccccatctgcctggagctgatcaaggagcccgtgagcaccaagtgcgaccacatcttctgcaagttctgcatgctgaagctgctgaaccagaagaagggccccagccagtgccccctgtgcaagaacgacatcaccaagagaagcctgcaggagagcaccagattcagccagctggtggaggagctgctgaagatcatctgcgccttccagctggacaccggcctggagtacgccaacagctacaacttcgccaagaaggagaacaacagccccgagcacctgaaggacgaggtgagcatcatccagagcatgggctacagaaacagagccaagagactgctgcagagcgagcccgagaaccccagcctggagaccagcctgagcgtgcagctgagcaacctgggcaccgtgagaaccctgagaaccaagcagagaatccagccccagaagaccagcgtgtacatcgagctgggcagcgacagcagcgaggacaccgtgaacaaggccacctactgcagcgtgggcgaccaggagctgctgcagatcaccccccagggcaccagagacgagatcagcctggacagcgccaagaaggccgcctgcgagttcagcgagaccgacgtgaccaacaccgagcaccaccagcccagcaacaacgacctgaacaccaccgagaagagagccgccgagagacaccccgagaagtaccagggcgaggccgccagcggctgcgagagcgagaccagcgtgagcgaggactgcagcggcctgagcagccagagcgacatcctgaccacccagcagagagacaccatgcagcacaacctgatcaagctgcagcaggagatggccgagctggaggccgtgctggagcagcacggcagccagcccagcaacagctaccccagcatcatcagcgacagcagcgccctggaggacctgagaaaccccgagcagagcaccagcgagaaggccgtgctgaccagccagaagagcagcgagtaccccatcagccagaaccccgagggcctgagcgccgacaagttcgaggtgagcgccgacagcagcaccagcaagaacaaggagcccggcgtggagagaagcagccccagcaagtgccccagcctggacgacagatggtacatgcacagctgcagcggcagcctgcagaacagaaactaccccagccaggaggagctgatcaaggtggtggacgtggaggagcagcagctggaggagagcggcccccacgacctgaccgagaccagctacctgcccagacaggacctggagggcaccccctacctggagagcggcatcagcctgttcagcgacgaccccgagagcgaccccagcgaggacagagcccccgagagcgccagagtgggcaacatccccagcagcaccagcgccctgaaggtgccccagctgaaggtggccgagagcgcccagagccccgccgccgcccacaccaccgacaccgccggctacaacgccatggaggagagcgtgagcagagagaagcccgagctgaccgccagcaccgagagagtgaacaagagaatgagcatggtggtgagcggcctgacccccgaggagttcatgctggtgtacaagttcgccagaaagcaccacatcaccctgaccaacctgatcaccgaggagaccacccacgtggtgatgaagaccgacgccgagttcgtgtgcgagagaaccctgaagtacttcctgggcatcgccggcggcaagtgggtggtgagctacttctgggtgacccagagcatcaaggagagaaagtag

SEQ ID NO: 9631 - DNA, 1497 bp, synthetic construct
  misc_feature 1..1497: note = Description of Artificial Sequence: Synthetic coding sequence
  source 1..1497: mol_type = other DNA
gagctgctgaagatcatctgcgccttccagctggacaccggcctggagtacgccaacagctacaacttcgccaagaaggagaacaacagccccgagcacctgaaggacgaggtgagcatcatccagagcatgggctacagaaacagagccaagagactgctgcagagcgagcccgagaaccccagcctggagaccagcctgagcgtgcagctgagcaacctgggcaccgtgagaaccctgagaaccaagcagagaatccagccccagaagaccagcgtgtacatcgagctggccgcctgcgagttcagcgagaccgacgtgaccaacaccgagcaccaccagcccagcaacaacgacctgaacaccaccgagaagagagccgccgagagacaccccgagaagtaccagggcgaggccgccagcggctgcgagagcgagaccagcgtgagcgaggactgcagcggcctgagcagccagagcgacatcctgaccacccagcagagagacaccatgcagcacaacctgatcaagctgcagcaggagatggccgagctggaggccgtgctggagcagcacggcagccagcccagcaacagctaccccagcatcatcagcgacagcagcgccctggaggacctgagaaaccccgagcagagcaccagcgagaaggccgtgctgaccagccagaagagcagcgagtaccccatcagccagaaccccgagggcctgagcgccgacaagttcgaggtgagcgccgacagcagcaccagcaagaacaaggagcccggcgtggagagaagcagccccagcaagtgccccagcctggacgacagatggtacatgcacagctgcagcggcagcctgcagaacagaaactaccccagccaggaggagctgatcaaggtggtggacgtggaggagcagcagctggaggagagcggcccccacgacctgaccgagaccagctacctgcccagacaggacctggagggcaccccctacctggagagcggcatcagcctgttcagcgacgaccccgagagcgaccccagcgaggacagagcccccgagagcgccagagtgggcaacatccccagcagcaccagcgccctgaaggtgccccagctgaaggtggccgagagcgcccagagccccgccgccgcccacaccaccgacaccgccggctacaacgccatggaggagagcgtgagcagagagaagcccgagctgaccgccagcaccgagagagtgaacaagagaatgagcatggtggtgagcggcctgacccccgaggagttcatgctggtgtacaagttcgccagaaagcaccacatcaccctgaccaacctgatcaccgaggagaccacccacgtggtgatgaagaccgacgccgagttcgtgtgcgagagaaccctgaagtacttcctgggcatcgccggcggcaagtgggtggtgagctacttctgggtgacccagagcatcaaggagagaaagtag

SEQ ID NO: 9632 - DNA, 297 bp, synthetic construct
  misc_feature 1..297: note = Description of Artificial Sequence: Synthetic coding sequence
  source 1..297: mol_type = other DNA
atggacctgagcgccctgagagtggaggaggtgcagaacgtgatcaacgccatgcagaagatcctggagtgccccatctgcctggagctgatcaaggagcccgtgagcaccaagtgcgaccacatcttctgcaagagcctgcaggagagcaccagattcagccagctggtggaggagctgctgaagatcatctgcgccttccagctggacaccggcctggagtacgccaacagctacaacttcgccaagaaggagaacaacagccccgagcacctgaaggacgaggtgagcatctag

SEQ ID NO: 9633 - DNA, 2280 bp, synthetic construct
  misc_feature 1..2280: note = Description of Artificial Sequence: Synthetic coding sequence
  source 1..2280: mol_type = other DNA
atggacctgagcgccctgagagtggaggaggtgcagaacgtgatcaacgccatgcagaagatcctggagtgccccatctgcctggagctgatcaaggagcccgtgagcaccaagtgcgaccacatcttctgcaagttctgcatgctgaagctgctgaaccagaagaagggccccagccagtgccccctgtgcaagaacgacatcaccaagagaagcctgcaggagagcaccagattcagccagctggtggaggagctgctgaagatcatctgcgccttccagctggacaccggcctggagtacgccaacagctacaacttcgccaagaaggagaacaacagccccgagcacctgaaggacgaggtgagcatcatccagagcatgggctacagaaacagagccaagagactgctgcagagcgagcccgagaaccccagcctgcaggagaccagcctgagcgtgcagctgagcaacctgggcaccgtgagaaccctgagaaccaagcagagaatccagccccagaagaccagcgtgtacatcgagctgggcagcgacagcagcgaggacaccgtgaacaaggccacctactgcagcgtgggcgaccaggagctgctgcagatcaccccccagggcaccagagacgagatcagcctggacagcgccaagaaggccgcctgcgagttcagcgagaccgacgtgaccaacaccgagcaccaccagcccagcaacaacgacctgaacaccaccgagaagagagccgccgagagacaccccgagaagtaccagggcgaggccgccagcggctgcgagagcgagaccagcgtgagcgaggactgcagcggcctgagcagccagagcgacatcctgaccacccagcagagagacaccatgcagcacaacctgatcaagctgcagcaggagatggccgagctggaggccgtgctggagcagcacggcagccagcccagcaacagctaccccagcatcatcagcgacagcagcgccctggaggacctgagaaaccccgagcagagcaccagcgagaaggtgctgaccagccagaagagcagcgagtaccccatcagccagaaccccgagggcctgagcgccgacaagttcgaggtgagcgccgacagcagcaccagcaagaacaaggagcccggcgtggagagaagcagccccagcaagtgccccagcctggacgacagatggtacatgcacagctgcagcggcagcctgcagaacagaaactaccccagccaggaggagctgatcaaggtggtggacgtggaggagcagcagctggaggagagcggcccccacgacctgaccgagaccagctacctgcccagacaggacctggagggcaccccctacctggagagcggcatcagcctgttcagcgacgaccccgagagcgaccccagcgaggacagagcccccgagagcgccagagtgggcaacatccccagcagcaccagcgccctgaaggtgccccagctgaaggtggccgagagcgcccagagccccgccgccgcccacaccaccgacaccgccggctacaacgccatggaggagagcgtgagcagagagaagcccgagctgaccgccagcaccgagagagtgaacaagagaatgagcatggtggtgagcggcctgacccccgaggagttcatgctggtgtacaagttcgccagaaagcaccacatcaccctgaccaacctgatcaccgaggagaccacccacgtggtgatgaagaccgacgccgagttcgtgtgcgagagaaccctgaagtacttcctgggcatcgccggcggcaagtgggtggtgagctacttctgggtgacccagagcatcaaggagagaaagatgctgaacgagcacgacttcgaggtgagaggcgacgtggtgaacggcagaaaccaccagggccccaagagagccagagagagccaggacagaaagatcttcagaggcctggagatctgctgctacggccccttcaccaacatgcccaccgaccagctggagtggatggtgcagctgtgcggcgccagcgtggtgaaggagctgagcagcttcaccctgggcaccggcgtgcaccccatcgtggtggtgcagcccgacgcctggaccgaggacaacggcttccacgccatcggccagatgtgcgaggcccccgtggtgaccagagagtgggtgctggacagcgtggccctgtaccagtgccaggagctggacacctacctgatcccccagatcccccacagccactactag

SEQ ID NO: 9634 - DNA, 180 bp, synthetic construct
  misc_feature 1..180: note = Description of Artificial Sequence: Synthetic coding sequence
  source 1..180: mol_type = other DNA
atggacctgagcgccctgagagtggaggaggtgcagaacgtgatcaacgccatgcagaagatcctggagtgccccatctgcctggagctgatcaaggagcccgtgagcaccaagtgcgaccacatcttctgcaaggtgctgctgtgctgccccagctggagcaccgtggtgagaagctag

SEQ ID NO: 9635 - DNA, 5451 bp, synthetic construct
  misc_feature 1..5451: note = Description of Artificial Sequence: Synthetic coding sequence
  source 1..5451: mol_type = other DNA
atgctgaagctgctgaaccagaagaagggccccagccagtgccccctgtgcaagaacgacatcaccaagagaagcctgcaggagagcaccagattcagccagctggtggaggagctgctgaagatcatctgcgccttccagctggacaccggcctggagtacgccaacagctacaacttcgccaagaaggagaacaacagccccgagcacctgaaggacgaggtgagcatcatccagagcatgggctacagaaacagagccaagagactgctgcagagcgagcccgagaaccccagcctgcaggagaccagcctgagcgtgcagctgagcaacctgggcaccgtgagaaccctgagaaccaagcagagaatccagccccagaagaccagcgtgtacatcgagctgggcagcgacagcagcgaggacaccgtgaacaaggccacctactgcagcgtgggcgaccaggagctgctgcagatcaccccccagggcaccagagacgagatcagcctggacagcgccaagaaggccgcctgcgagttcagcgagaccgacgtgaccaacaccgagcaccaccagcccagcaacaacgacctgaacaccaccgagaagagagccgccgagagacaccccgagaagtaccagggcagcagcgtgagcaacctgcacgtggagccctgcggcaccaacacccacgccagcagcctgcagcacgagaacagcagcctgctgctgaccaaggacagaatgaacgtggagaaggccgagttctgcaacaagagcaagcagcccggcctggccagaagccagcacaacagatgggccggcagcaaggagacctgcaacgacagaagaacccccagcaccgagaagaaggtggacctgaacgccgaccccctgtgcgagagaaaggagtggaacaagcagaagctgccctgcagcgagaaccccagagacaccgaggacgtgccctggatcaccctgaacagcagcatccagaaggtgaacgagtggttcagcagaagcgacgagctgctgggcagcgacgacagccacgacggcgagagcgagagcaacgccaaggtggccgacgtgctggacgtgctgaacgaggtggacgagtacagcggcagcagcgagaagatcgacctgctggccagcgacccccacgaggccctgatctgcaagagcgagagagtgcacagcaagagcgtggagagcaacatcgaggacaagatcttcggcaagacctacagaaagaaggccagcctgcccaacctgagccacgtgaccgagaacctgatcatcggcgccttcgtgaccgagccccagatcatccaggagagacccctgaccaacaagctgaagagaaagagaagacccaccagcggcctgcaccccgaggacttcatcaagaaggccgacctggccgtgcagaagacccccgagatgatcaaccagggcaccaaccagaccgagcagaacggccaggtgatgaacatcaccaacagcggccacgagaacaagaccaagggcgacagcatccagaacgagaagaaccccaaccccatcgagagcctggagaaggagagcgccttcaagaccaaggccgagcccatcagcagcagcatcagcaacatggagctggagctgaacatccacaacagcaaggcccccaagaagaacagactgagaagaaagagcagcaccagacacatccacgccctggagctggtggtgagcagaaacctgagcccccccaactgcaccgagctgcagatcgacagctgcagcagcagcgaggagatcaagaagaagaagtacaaccagatgcccgtgagacacagcagaaacctgcagctgatggagggcaaggagcccgccaccggcgccaagaagagcaacaagcccaacgagcagaccagcaagagacacgacagcgacaccttccccgagctgaagctgaccaacgcccccggcagcttcaccaagtgcagcaacaccagcgagctgaaggagttcgtgaaccccagcctgcccagagaggagaaggaggagaagctggagaccgtgaaggtgagcaacaacgccgaggaccccaaggacctgatgctgagcggcgagagagtgctgcagaccgagagaagcgtggagagcagcagcatcagcctggtgcccggcaccgactacggcacccaggagagcatcagcctgctggaggtgagcaccctgggcaaggccaagaccgagcccaacaagtgcgtgagccagtgcgccgccttcgagaaccccaagggcctgatccacggctgcagcaaggacaacagaaacgacaccgagggcttcaagtaccccctgggccacgaggtgaaccacagcagagagaccagcatcgagatggaggagagcgagctggacgcccagtacctgcagaacaccttcaaggtgagcaagagacagagcttcgcccccttcagcaaccccggcaacgccgaggaggagtgcgccaccttcagcgcccacagcggcagcctgaagaagcagagccccaaggtgaccttcgagtgcgagcagaaggaggagaaccagggcaagaacgagagcaacatcaagcccgtgcagaccgtgaacatcaccgccggcttccccgtggtgggccagaaggacaagcccgtggacaacgccaagtgcagcatcaagggcggcagcagattctgcctgagcagccagttcagaggcaacgagaccggcctgatcacccccaacaagcacggcctgctgcagaacccctacagaatcccccccctgttccccatcaagagcttcgtgaagaccaagtgcaagaagaacctgctggaggagaacttcgaggagcacagcatgagccccgagagagagatgggcaacgagaacatccccagcaccgtgagcaccatcagcagaaacaacatcagagagaacgtgttcaaggaggccagcagcagcaacatcaacgaggtgggcagcagcaccaacgaggtgggcagcagcatcaacgagatcggcagcagcgacgagaacatccaggccgagctgggcagaaacagaggccccaagctgaacgccatgctgagactgggcgtgctgcagcccgaggtgtacaagcagagcctgcccggcagcaactgcaagcaccccgagatcaagaagcaggagtacgaggaggtggtgcagaccgtgaacaccgacttcagcccctacctgatcagcgacaacctggagcagcccatgggcagcagccacgccagccaggtgtgcagcgagacccccgacgacctgctggacgacggcgagatcaaggaggacaccagcttcgccgagaacgacatcaaggagagcagcgccgtgttcagcaagagcgtgcagaagggcgagctgagcagaagccccagccccttcacccacacccacctggcccagggctacagaagaggcgccaagaagctggagagcagcgaggagaacctgagcagcgaggacgaggagctgccctgcttccagcacctgctgttcggcaaggtgaacaacatccccagccagagcaccagacacagcaccgtggccaccgagtgcctgagcaagaacaccgaggagaacctgctgagcctgaagaacagcctgaacgactgcagcaaccaggtgatcctggccaaggccagccaggagcaccacctgagcgaggagaccaagtgcagcgccagcctgttcagcagccagtgcagcgagctggaggacctgaccgccaacaccaacacccaggaccccttcctgatcggcagcagcaagcagatgagacaccagagcgagagccagggcgtgggcctgagcgacaaggagctggtgagcgacgacgaggagagaggcaccggcctggaggagaacaaccaggaggagcagagcatggacagcaacctgggcgaggccgccagcggctgcgagagcgagaccagcgtgagcgaggactgcagcggcctgagcagccagagcgacatcctgaccacccagcagagagacaccatgcagcacaacctgatcaagctgcagcaggagatggccgagctggaggccgtgctggagcagcacggcagccagcccagcaacagctaccccagcatcatcagcgacagcagcgccctggaggacctgagaaaccccgagcagagcaccagcgagaaggccgtgctgaccagccagaagagcagcgagtaccccatcagccagaaccccgagggcctgagcgccgacaagttcgaggtgagcgccgacagcagcaccagcaagaacaaggagcccggcgtggagagaagcagccccagcaagtgccccagcctggacgacagatggtacatgcacagctgcagcggcagcctgcagaacagaaactaccccagccaggaggagctgatcaaggtggtggacgtggaggagcagcagctggaggagagcggcccccacgacctgaccgagaccagctacctgcccagacaggacctggagggcaccccctacctggagagcggcatcagcctgttcagcgacgaccccgagagcgaccccagcgaggacagagcccccgagagcgccagagtgggcaacatccccagcagcaccagcgccctgaaggtgccccagctgaaggtggccgagagcgcccagagccccgccgccgcccacaccaccgacaccgccggctacaacgccatggaggagagcgtgagcagagagaagcccgagctgaccgccagcaccgagagagtgaacaagagaatgagcatggtggtgagcggcctgacccccgaggagttcatgctggtgtacaagttcgccagaaagcaccacatcaccctgaccaacctgatcaccgaggagaccacccacgtggtgatgaagaccgacgccgagttcgtgtgcgagagaaccctgaagtacttcctgggcatcgccggcggcaagtgggtggtgagctacttctgggtgacccagagcatcaaggagagaaagatgctgaacgagcacgacttcgaggtgagaggcgacgtggtgaacggcagaaaccaccagggccccaagagagccagagagagccaggacagaaagatcttcagaggcctggagatctgctgctacggccccttcaccaacatgcccaccgaccagctggagtggatggtgcagctgtgcggcgccagcgtggtgaaggagctgagcagcttcaccctgggcaccggcgtgcaccccatcgtggtggtgcagcccgacgcctggaccgaggacaacggcttccacgccatcggccagatgtgcgaggcccccgtggtgaccagagagtgggtgctggacagcgtggccctgtaccagtgccaggagctggacacctacctgatcccccagatcccccacagccactactag

SEQ ID NO: 9636 - DNA, 1719 bp, synthetic construct
  misc_feature 1..1719: note = Description of Artificial Sequence: Synthetic coding sequence
  source 1..1719: mol_type = other DNA
atgctgaagctgctgaaccagaagaagggccccagccagtgccccctgtgcaagaacgacatcaccaagagaagcctgcaggagagcaccagattcagccagctggtggaggagctgctgaagatcatctgcgccttccagctggacaccggcctggagtacgccaacagctacaacttcgccaagaaggagaacaacagccccgagcacctgaaggacgaggtgagcatcatccagagcatgggctacagaaacagagccaagagactgctgcagagcgagcccgagaaccccagcctgcaggagaccagcctgagcgtgcagctgagcaacctgggcaccgtgagaaccctgagaaccaagcagagaatccagccccagaagaccagcgtgtacatcgagctgggcagcgacagcagcgaggacaccgtgaacaaggccacctactgcagcgtgggcgaccaggagctgctgcagatcaccccccagggcaccagagacgagatcagcctggacagcgccaagaaggccgcctgcgagttcagcgagaccgacgtgaccaacaccgagcaccaccagcccagcaacaacgacctgaacaccaccgagaagagagccgccgagagacaccccgagaagtaccagggcgaggccgccagcggctgcgagagcgagaccagcgtgagcgaggactgcagcggcctgagcagccagagcgacatcctgaccacccagcagagagacaccatgcagcacaacctgatcaagctgcagcaggagatggccgagctggaggccgtgctggagcagcacggcagccagcccagcaacagctaccccagcatcatcagcgacagcagcgccctggaggacctgagaaaccccgagcagagcaccagcgagaaggccgtgctgaccagccagaagagcagcgagtaccccatcagccagaaccccgagggcctgagcgccgacaagttcgaggtgagcgccgacagcagcaccagcaagaacaaggagcccggcgtggagagaagcagccccagcaagtgccccagcctggacgacagatggtacatgcacagctgcagcggcagcctgcagaacagaaactaccccagccaggaggagctgatcaaggtggtggacgtggaggagcagcagctggaggagagcggcccccacgacctgaccgagaccagctacctgcccagacaggacctggagggcaccccctacctggagagcggcatcagcctgttcagcgacgaccccgagagcgaccccagcgaggacagagcccccgagagcgccagagtgggcaacatccccagcagcaccagcgccctgaaggtgccccagctgaaggtggccgagagcgcccagagccccgccgccgcccacaccaccgacaccgccggctacaacgccatggaggagagcgtgagcagagagaagcccgagctgaccgccagcaccgagagagtgaacaagagaatgagcatggtggtgagcggcctgacccccgaggagttcatgctggtgtacaagttcgccagaaagcaccacatcaccctgaccaacctgatcaccgaggagaccacccacgtggtgatgaagaccgacgccgagttcgtgtgcgagagaaccctgaagtacttcctgggcatcgccggcggcaagtgggtggtgagctacttctgggtgacccagagctag

SEQ ID NO: 9637 - DNA, 1422 bp, synthetic construct
  misc_feature 1..1422: note = Description of Artificial Sequence: Synthetic coding sequence
  source 1..1422: mol_type = other DNA
atggacctgagcgccctgagagtggaggaggtgcagaacgtgatcaacgccatgcagaagatcctggagtgccccatctgcctggagctgatcaaggagcccgtgagcaccaagtgcgaccacatcttctgcaagttctgcatgctgaagctgctgaaccagaagaagggccccagccagtgccccctgtgcaagaacgacatcaccaagagaagcctgcaggagagcaccagattcagccagctggtggaggagctgctgaagatcatctgcgccttccagctggacaccggcctggagtacgccaacagctacaacttcgccaagaaggagaacaacagccccgagcacctgaaggacgaggtgagcatcatccagagcatgggctacagaaacagagccaagagactgctgcagagcgagcccgagaaccccagcctgcaggagaccagcctgagcgtgcagctgagcaacctgggcaccgtgagaaccctgagaaccaagcagagaatccagccccagaagaccagcgtgtacatcgagctgggcagcgacagcagcgaggacaccgtgaacaaggccacctactgcagcgtgggcgaccaggagctgctgcagatcaccccccagggcaccagagacgagatcagcctggacagcgccaagaaggccgcctgcgagttcagcgagaccgacgtgaccaacaccgagcaccaccagcccagcaacaacgacctgaacaccaccgagaagagagccgccgagagacaccccgagaagtaccagggcagcagcgtgagcaacctgcacgtggagccctgcggcaccaacacccacgccagcagcctgcagcacgagaacagcagcctgctgctgaccaaggacagaatgaacgtggagaaggccgagttctgcaacaagagcaagcagcccggcctggccagaagccagcacaacagatgggccggcagcaaggagacctgcaacgacagaagaacccccagcaccgagaagaaggtggacctgaacgccgaccccctgtgcgagagaaaggagtggaacaagcagaagctgccctgcagcgagaaccccagagacaccgaggacgtgccctggatcaccctgaacagcagcatccagaaggtgaacgagtggttcagcagaagcgacgagctgctgggcagcgacgacagccacgacggcgagagcgagagcaacgccaaggtggccgacgtgctggacgtgctgaacgaggtggacgagtacagcggcagcagcgagaagatcgacctgctggccagcgacccccacgaggccctgatctgcaagagcgagagagtgcacagcaagagcgtggagagcaacatcgaggacaagatcttcggcaagacctacagaaagaaggccagcctgcccaactag

SEQ ID NO: 9638 - DNA, 534 bp, synthetic construct
  misc_feature 1..534: note = Description of Artificial Sequence: Synthetic coding sequence
  source 1..534: mol_type = other DNA
atgaacgtggagaaggccgagttctgcaacaagagcaagcagcccggcctggccagaagccagcacaacagatgggccggcagcaaggagacctgcaacgacagaagaacccccagcaccgagaagaaggtggacctgaacgccgaccccctgtgcgagagaaaggagtggaacaagcagaagctgccctgcagcgagaaccccagagacaccgaggacgtgccctggatcaccctgaacagcagcatccagaaggtgaacgagtggttcagcagaagcgacgagctgctgggcagcgacgacagccacgacggcgagagcgagagcaacgccaaggtggccgacgtgctggacgtgctgaacgaggtggacgagtacagcggcagcagcgagaagatcgacctgctggccagcgacccccacgaggccctgatctgcaagagcgagagagtgcacagcaagagcgtggagagcaacatcgaggacaagatcttcggcaagacctacagaaagaaggccagcctgcccaactag

SEQ ID NO: 9639 - DNA, 10257 bp, synthetic construct
  misc_feature 1..10257: note = Description of Artificial Sequence: Synthetic coding sequence
  source 1..10257: mol_type = other DNA
atgcccatcggcagcaaggagagacccaccttcttcgagatcttcaagaccagatgcaacaaggccgacctgggccccatcagcctgaactggttcgaggagctgagcagcgaggcccccccctacaacagcgagcccgccgaggagagcgagcacaagaacaacaactacgagcccaacctgttcaagaccccccagagaaagcccagctacaaccagctggccagcacccccatcatcttcaaggagcagggcctgaccctgcccctgtaccagagccccgtgaaggagctggacaagttcaagctggacctgggcagaaacgtgcccaacagcagacacaagagcctgagaaccgtgaagaccaagatggaccaggccgacgacgtgagctgccccctgctgaacagctgcctgagcgagagccccgtggtgctgcagtgcacccacgtgaccccccagagagacaagagcgtggtgtgcggcagcctgttccacacccccaagttcgtgaagggcagacagacccccaagcacatcagcgagagcctgggcgccgaggtggaccccgacatgagctggagcagcagcctggccaccccccccaccctgagcagcaccgtgctgatcgtgagaaacgaggaggccagcgagaccgtgttcccccacgacaccaccgccaacgtgaagagctacttcagcaaccacgacgagagcctgaagaagaacgacagattcatcgccagcgtgaccgacagcgagaacaccaaccagagagaggccgccagccacggcttcggcaagaccagcggcaacagcttcaaggtgaacagctgcaaggaccacatcggcaagagcatgcccaacgtgctggaggacgaggtgtacgagaccgtggtggacaccagcgaggaggacagcttcagcctgtgcttcagcaagtgcagaaccaagaacctgcagaaggtgagaaccagcaagaccagaaagaagatcttccacgaggccaacgccgacgagtgcgagaagagcaagaaccaggtgaaggagaagtacagcttcgtgagcgaggtggagcccaacgacaccgaccccctggacagcaacgtggccaaccagaagcccttcgagagcggcagcgacaagatcagcaaggaggtggtgcccagcctggcctgcgagtggagccagctgaccctgagcggcctgaacggcgcccagatggagaagatccccctgctgcacatcagcagctgcgaccagaacatcagcgagaaggacctgctggacaccgagaacaagagaaagaaggacttcctgaccagcgagaacagcctgcccagaatcagcagcctgcccaagagcgagaagcccctgaacgaggagaccgtggtgaacaagagagacgaggagcagcacctggagagccacaccgactgcatcctggccgtgaagcaggccatcagcggcaccagccccgtggccagcagcttccagggcatcaagaagagcatcttcagaatcagagagagccccaaggagaccttcaacgccagcttcagcggccacatgaccgaccccaacttcaagaaggagaccgaggccagcgagagcggcctggagatccacaccgtgtgcagccagaaggaggacagcctgtgccccaacctgatcgacaacggcagctggcccgccaccaccacccagaacagcgtggccctgaagaacgccggcctgatcagcaccctgaagaagaagaccaacaagttcatctacgccatccacgacgagaccagctacaagggcaagaagatccccaaggaccagaagagcgagctgatcaactgcagcgcccagttcgaggccaacgccttcgaggcccccctgaccttcgccaacgccgacagcggcctgctgcacagcagcgtgaagagaagctgcagccagaacgacagcgaggagcccaccctgagcctgaccagcagcttcggcaccatcctgagaaagtgcagcagaaacgagacctgcagcaacaacaccgtgatcagccaggacctggactacaaggaggccaagtgcaacaaggagaagctgcagctgttcatcacccccgaggccgacagcctgagctgcctgcaggagggccagtgcgagaacgaccccaagagcaagaaggtgagcgacatcaaggaggaggtgctggccgccgcctgccaccccgtgcagcacagcaaggtggagtacagcgacaccgacttccagagccagaagagcctgctgtacgaccacgagaacgccagcaccctgatcctgacccccaccagcaaggacgtgctgagcaacctggtgatgatcagcagaggcaaggagagctacaagatgagcgacaagctgaagggcaacaactacgagagcgacgtggagctgaccaagaacatccccatggagaagaaccaggacgtgtgcgccctgaacgagaactacaagaacgtggagctgctgccccccgagaagtacatgagagtggccagccccagcagaaaggtgcagttcaaccagaacaccaacctgagagtgatccagaagaaccaggaggagaccaccagcatcagcaagatcaccgtgaaccccgacagcgaggagctgttcagcgacaacgagaacaacttcgtgttccaggtggccaacgagagaaacaacctggccctgggcaacaccaaggagctgcacgagaccgacctgacctgcgtgaacgagcccatcttcaagaacagcaccatggtgctgtacggcgacaccggcgacaagcaggccacccaggtgagcatcaagaaggacctggtgtacgtgctggccgaggagaacaagaacagcgtgaagcagcacatcaagatgaccctgggccaggacctgaagagcgacatcagcctgaacatcgacaagatccccgagaagaacaacgactacatgaacaagtgggccggcctgctgggccccatcagcaaccacagcttcggcggcagcttcagaaccgccagcaacaaggagatcaagctgagcgagcacaacatcaagaagagcaagatgttcttcaaggacatcgaggagcagtaccccaccagcctggcctgcgtggagatcgtgaacaccctggccctggacaaccagaagaagctgagcaagccccagagcatcaacaccgtgagcgcccacctgcagagcagcgtggtggtgagcgactgcaagaacagccacatcaccccccagatgctgttcagcaagcaggacttcaacagcaaccacaacctgacccccagccagaaggccgagatcaccgagctgagcaccatcctggaggagagcggcagccagttcgagttcacccagttcagaaagcccagctacatcctgcagaagagcaccttcgaggtgcccgagaaccagatgaccatcctgaagaccaccagcgaggagtgcagagacgccgacctgcacgtgatcatgaacgcccccagcatcggccaggtggacagcagcaagcagttcgagggcaccgtggagatcaagagaaagttcgccggcctgctgaagaacgactgcaacaagagcgccagcggctacctgaccgacgagaacgaggtgggcttcagaggcttctacagcgcccacggcaccaagctgaacgtgagcaccgaggccctgcagaaggccgtgaagctgttcagcgacatcgagaacatcagcgaggagaccagcgccgaggtgcaccccatcagcctgagcagcagcaagtgccacgacagcgtggtgagcatgttcaagatcgagaaccacaacgacaagaccgtgagcgagaagaacaacaagtgccagctgatcctgcagaacaacatcgagatgaccaccggcaccttcgtggaggagatcaccgagaactacaagagaaacaccgagaacgaggacaacaagtacaccgccgccagcagaaacagccacaacctggagttcgacggcagcgacagcagcaagaacgacaccgtgtgcatccacaaggacgagaccgacctgctgttcaccgaccagcacaacatctgcctgaagctgagcggccagttcatgaaggagggcaacacccagatcaaggaggacctgagcgacctgaccttcctggaggtggccaaggcccaggaggcctgccacggcaacaccagcaacaaggagcagctgaccgccaccaagaccgagcagaacatcaaggacttcgagaccagcgacaccttcttccagaccgccagcggcaagaacatcagcgtggccaaggagagcttcaacaagatcgtgaacttcttcgaccagaagcccgaggagctgcacaacttcagcctgaacagcgagctgcacagcgacatcagaaagaacaagatggacatcctgagctacgaggagaccgacatcgtgaagcacaagatcctgaaggagagcgtgcccgtgggcaccggcaaccagctggtgaccttccagggccagcccgagagagacgagaagatcaaggagcccaccctgctgggcttccacaccgccagcggcaagaaggtgaagatcgccaaggagagcctggacaaggtgaagaacctgttcgacgagaaggagcagggcaccagcgagatcaccagcttcagccaccagtgggccaagaccctgaagtacagagaggcctgcaaggacctggagctggcctgcgagaccatcgagatcaccgccgcccccaagtgcaaggagatgcagaacagcctgaacaacgacaagaacctggtgagcatcgagaccgtggtgccccccaagctgctgagcgacaacctgtgcagacagaccgagaacctgaagaccagcaagagcatcttcctgaaggtgaaggtgcacgagaacgtggagaaggagaccgccaagagccccgccacctgctacaccaaccagagcccctacagcgtgatcgagaacagcgccctggccttctacaccagctgcagcagaaagaccagcgtgagccagaccagcctgctggaggccaagaagtggctgagagagggcatcttcgacggccagcccgagagaatcaacaccgccgactacgtgggcaactacctgtacgagaacaacagcaacagcaccatcgccgagaacgacaagaaccacctgagcgagaagcaggacacctacctgagcaacagcagcatgagcaacagctacagctaccacagcgacgaggtgtacaacgacagcggctacctgagcaagaacaagctggacagcggcatcgagcccgtgctgaagaacgtggaggaccagaagaacaccagcttcagcaaggtgatcagcaacgtgaaggacgccaacgcctacccccagaccgtgaacgaggacatctgcgtggaggagctggtgaccagcagcagcccctgcaagaacaagaacgccgccatcaagctgagcatcagcaacagcaacaacttcgaggtgggcccccccgccttcagaatcgccagcggcaagatcgtgtgcgtgagccacgagaccatcaagaaggtgaaggacatcttcaccgacagcttcagcaaggtgatcaaggagaacaacgagaacaagagcaagatctgccagaccaagatcatggccggctgctacgaggccctggacgacagcgaggacatcctgcacaacagcctggacaacgacgagtgcagcacccacagccacaaggtgttcgccgacatccagagcgaggagatcctgcagcacaaccagaacatgagcggcctggagaaggtgagcaagatcagcccctgcgacgtgagcctggagaccagcgacatctgcaagtgcagcatcggcaagctgcacaagagcgtgagcagcgccaacacctgcggcatcttcagcaccgccagcggcaagagcgtgcaggtgagcgacgccagcctgcagaacgccagacaggtgttcagcgagatcgaggacagcaccaagcaggtgttcagcaaggtgctgttcaagagcaacgagcacagcgaccagctgaccagagaggagaacaccgccatcagaacccccgagcacctgatcagccagaagggcttcagctacaacgtggtgaacagcagcgccttcagcggcttcagcaccgccagcggcaagcaggtgagcatcctggagagcagcctgcacaaggtgaagggcgtgctggaggagttcgacctgatcagaaccgagcacagcctgcactacagccccaccagcagacagaacgtgagcaagatcctgcccagagtggacaagagaaaccccgagcactgcgtgaacagcgagatggagaagacctgcagcaaggagttcaagctgagcaacaacctgaacgtggagggcggcagcagcgagaacaaccacagcatcaaggtgagcccctacctgagccagttccagcaggacaagcagcagctggtgctgggcaccaaggtgagcctggtggagaacatccacgtgctgggcaaggagcaggccagccccaagaacgtgaagatggagatcggcaagaccgagaccttcagcgacgtgcccgtgaagaccaacatcgaggtgtgcagcacctacagcaaggacagcgagaactacttcgagaccgaggccgtggagatcgccaaggccttcatggaggacgacgagctgaccgacagcaagctgcccagccacgccacccacagcctgttcacctgccccgagaacgaggagatggtgctgagcaacagcagaatcggcaagagaagaggcgagcccctgatcctggtgggcgagcccagcatcaagagaaacctgctgaacgagttcgacagaatcatcgagaaccaggagaagagcctgaaggccagcaagagcacccccgacggcaccatcaaggacagaagactgttcatgcaccacgtgagcctggagcccatcacctgcgtgcccttcagaaccaccaaggagagacaggagatccagaaccccaacttcaccgcccccggccaggagttcctgagcaagagccacctgtacgagcacctgaccctggagaagagcagcagcaacctggccgtgagcggccaccccttctaccaggtgagcgccaccagaaacgagaagatgagacacctgatcaccaccggcagacccaccaaggtgttcgtgccccccttcaagaccaagagccacttccacagagtggagcagtgcgtgagaaacatcaacctggaggagaacagacagaagcagaacatcgacggccacggcagcgacgacagcaagaacaagatcaacgacaacgagatccaccagttcaacaagaacaacagcaaccaggccgtggccgtgaccttcaccaagtgcgaggaggagcccctggacctgatcaccagcctgcagaacgccagagacatccaggacatgagaatcaagaagaagcagagacagagagtgttcccccagcccggcagcctgtacctggccaagaccagcaccctgcccagaatcagcctgaaggccgccgtgggcggccaggtgcccagcgcctgcagccacaagcagctgtacacctacggcgtgagcaagcactgcatcaagatcaacagcaagaacgccgagagcttccagttccacaccgaggactacttcggcaaggagagcctgtggaccggcaagggcatccagctggccgacggcggctggctgatccccagcaacgacggcaaggccggcaaggaggagttctacagagccctgtgcgacacccccggcgtggaccccaagctgatcagcagaatctgggtgtacaaccactacagatggatcatctggaagctggccgccatggagtgcgccttccccaaggagttcgccaacagatgcctgagccccgagagagtgctgctgcagctgaagtacagatacgacaccgagatcgacagaagcagaagaagcgccatcaagaagatcatggagagagacgacaccgccgccaagaccctggtgctgtgcgtgagcgacatcatcagcctgagcgccaacatcagcgagaccagcagcaacaagaccagcagcgccgacacccagaaggtggccatcatcgagctgaccgacggctggtacgccgtgaaggcccagctggacccccccctgctggccgtgctgaagaacggcagactgaccgtgggccagaagatcatcctgcacggcgccgagctggtgggcagccccgacgcctgcacccccctggaggcccccgagagcctgatgctgaagatcagcgccaacagcaccagacccgccagatggtacaccaagctgggcttcttccccgaccccagacccttccccctgcccctgagcagcctgttcagcgacggcggcaacgtgggctgcgtggacgtgatcatccagagagcctaccccatccagtggatggagaagaccagcagcggcctgtacatcttcagaaacgagagagaggaggagaaggaggccgccaagtacgtggaggcccagcagaagagactggaggccctgttcaccaagatccaggaggagttcgaggagcacgaggagaacaccaccaagccctacctgcccagcagagccctgaccagacagcaggtgagagccctgcaggacggcgccgagctgtacgaggccgtgaagaacgccgccgaccccgcctacctggagggctacttcagcgaggagcagctgagagccctgaacaaccacagacagatgctgaacgacaagaagcaggcccagatccagctggagatcagaaaggccatggagagcgccgagcagaaggagcagggcctgagcagagacgtgaccaccgtgtggaagctgagaatcgtgagctacagcaagaaggagaaggacagcgtgatcctgagcatctggagacccagcagcgacctgtacagcctgctgaccgagggcaagagatacagaatctaccacctggccaccagcaagagcaagagcaagagcgagagagccaacatccagctggccgccaccaagaagacccagtaccagcagctgcccgtgagcgacgagatcctgttccagatctaccagcccagagagcccctgcacttcagcaagttcctggaccccgacttccagcccagctgcagcgaggtggacctgatcggcttcgtggtgagcgtggtgaagaagaccggcctggcccccttcgtgtacctgagcgacgagtgctacaacctgctggccatcaagttctggatcgacctgaacgaggacatcatcaagccccacatgctgatcgccgccagcaacctgcagtggagacccgagagcaagagcggcctgctgaccctgttcgccggcgacttcagcgtgttcagcgccagccccaaggagggccacttccaggagaccttcaacaagatgaagaacaccgtggagaacatcgacatcctgtgcaacgaggccgagaacaagctgatgcacatcctgcacgccaacgaccccaagtggagcacccccaccaaggactgcaccagcggcccctacaccgcccagatcatccccggcaccggcaacaagctgctgatgagcagccccaactgcgagatctactaccagagccccctgagcctgtgcatggccaagagaaagagcgtgagcacccccgtgagcgcccagatgaccagcaagagctgcaagggcgagaaggagatcgacgaccagaagaactgcaagaagagaagagccctggacttcctgagcagactgcccctgcccccccccgtgagccccatctgcaccttcgtgagccccgccgcccagaaggccttccagccccccagaagctgcggcaccaagtacgagacccccatcaagaagaaggagctgaacagcccccagatgacccccttcaagaagttcaacgagatcagcctgctggagagcaacagcatcgccgacgaggagctggccctgatcaacacccaggccctgctgagcggcagcaccggcgagaagcagttcatcagcgtgagcgagagcaccagaaccgcccccaccagcagcgaggactacctgagactgaagagaagatgcaccaccagcctgatcaaggagcaggagagcagccaggccagcaccgaggagtgcgagaagaacaagcaggacaccatcaccaccaagaagtacatctag

SEQ ID NO: 9640 - DNA, 1809 bp, synthetic construct
  misc_feature 1..1809: note = Description of Artificial Sequence: Synthetic coding sequence
  source 1..1809: mol_type = other DNA
atgcccatcggcagcaaggagagacccaccttcttcgagatcttcaagaccagatgcaacaaggccggccccatcagcctgaactggttcgaggagctgagcagcgaggcccccccctacaacagcgagcccgccgaggagagcgagcacaagaacaacaactacgagcccaacctgttcaagaccccccagagaaagcccagctacaaccagctggccagcacccccatcatcttcaaggagcagggcctgaccctgcccctgtaccagagccccgtgaaggagctggacaagttcaagctggacctgggcagaaacgtgcccaacagcagacacaagagcctgagaaccgtgaagaccaagatggaccaggccgacgacgtgagctgccccctgctgaacagctgcctgagcgagagccccgtggtgctgcagtgcacccacgtgaccccccagagagacaagagcgtggtgtgcggcagcctgttccacacccccaagttcgtgaagggcagacagacccccaagcacatcagcgagagcctgggcgccgaggtggaccccgacatgagctggagcagcagcctggccaccccccccaccctgagcagcaccgtgctgatcgtgagaaacgaggaggccagcgagaccgtgttcccccacgacaccaccgccaacgtgaagagctacttcagcaaccacgacgagagcctgaagaagaacgacagattcatcgccagcgtgaccgacagcgagaacaccaaccagagagaggccgccagccacggcttcggcaagaccagcggcaacagcttcaaggtgaacagctgcaaggaccacatcggcaagagcatgcccaacgtgctggaggacgaggtgtacgagaccgtggtggacaccagcgaggaggacagcttcagcctgtgcttcagcaagtgcagaaccaagaacctgcagaaggtgagaaccagcaagaccagaaagaagatcttccacgaggccaacgccgacgagtgcgagaagagcaagaaccaggtgaaggagaagtacagcttcgtgagcgaggtggagcccaacgacaccgaccccctggacagcaacgtggccaaccagaagcccttcgagagcggcagcgacaagatcagcaaggaggtggtgcccagcctggcctgcgagtggagccagctgaccctgagcggcctgaacggcgcccagatggagaagatccccctgctgcacatcagcagctgcgaccagaacatcagcgagaaggacctgctggacaccgagaacaagagaaagaaggacttcctgaccagcgagaacagcctgcccagaatcagcagcctgcccaagagcgagaagcccctgaacgaggagaccgtggtgaacaagagagacgaggagcagcacctggagagccacaccgactgcatcctggccgtgaagcaggccatcagcggcaccagccccgtggccagcagcttccagggcatcaagaagagcatcttcagaatcagagagagccccaaggagaccttcaacgccagcttcagcggccacatgaccgaccccaacttcaagaaggagaccgaggccagcgagagcggcctggagatccacaccgtgtgcagccagaaggaggacagcctgtgccccaacctgatcgacaacggcagctggcccgccaccaccacccagaacagcgtggccctgaagaacgccggcctgatcagcaccctgaagaagaagaccaacaagttcatctacgccatccacgacgagaccagctacaagggcaagaagtag

SEQ ID NO: 9641 - DNA, 10257 bp, synthetic construct; identical to SEQ ID NO: 9639
  misc_feature 1..10257: note = Description of Artificial Sequence: Synthetic coding sequence
  source 1..10257: mol_type = other DNA

SEQ ID NO: 9642 - DNA, 2667 bp, synthetic construct
  misc_feature 1..2667: note = Description of Artificial Sequence: Synthetic coding sequence
  source 1..2667: mol_type = other DNA
atgcactgccccggcgaggcccccctggccgcccccagacccacccccaaggacccctgcctgagaaacgtgctggccaaggccctgtacgacaacgtggccgagagccccgacgagctgagcttcagaaagggcgacatcatgaccgtgctggagcaggacacccagggcctggacggctggtggctgtgcagcctgcacggcagacagggcatcgtgcccggcaacagactgaagatcctggtgggcatgtacgacaagaagcccgccggccccggccccggcccccccgccacccccgcccagccccagcccggcctgcacgcccccgccccccccgccagccagtacacccccatgctgcccaacacctaccagccccagcccgacagcgtgtacctggtgcccacccccagcaaggcccagcagggcctgtaccaggtgcccggccccagcccccagttccagagcccccccgccaagcagaccagcaccttcagcaagcagaccccccaccaccccttccccagccccgccaccgacctgtaccaggtgccccccggccccggcggccccgcccaggacatctaccaggtgccccccagcgccggcatgggccacgacatctaccaggtgccccccagcatggacaccagaagctgggagggcaccaagccccccgccaaggtggtggtgcccaccagagtgggccagggctacgtgtacgaggccgcccagcccgagcaggacgagtacgacatccccagacacctgctggcccccggcccccaggacatctacgacgtgccccccgtgagaggcctgctgcccagccagtacggccaggaggtgtacgacaccccccccatggccgtgaagggccccaacggcagagaccccctgctggaggtgtacgacgtgccccccagcgtggagaagggcctgccccccagcaaccaccacgccgtgtacgacgtgccccccagcgtgagcaaggacgtgcccgacggccccctgctgagagaggagacctacgacgtgccccccgccttcgccaaggccaagcccttcgaccccgccagaacccccctggtgctggccgcccccccccccgacagcccccccgccgaggacgtgtacgacgtgcccccccccgcccccgacctgtacgacgtgccccccggcctgagaagacccggccccggcaccctgtacgacgtgcccagagagagagtgctgccccccgaggtggccgacggcggcgtggtggacagcggcgtgtacgccgtgcccccccccgccgagagagaggcccccgccgagggcaagagactgagcgccagcagcaccggcagcaccagaagcagccagagcgccagcagcctggaggtggccggccccggcagagagcccctggagctggaggtggccgtggaggccctggccagactgcagcagggcgtgagcgccaccgtggcccacctgctggacctggccggcagcgccggcgccaccggcagctggagaagccccagcgagccccaggagcccctggtgcaggacctgcaggccgccgtggccgccgtgcagagcgccgtgcacgagctgctggagttcgccagaagcgccgtgggcaacgccgcccacaccagcgacagagccctgcacgccaagctgagcagacagctgcagaagatggaggacgtgcaccagaccctggtggcccacggccaggccctggacgccggcagaggcggcagcggcgccaccctggaggacctggacagactggtggcctgcagcagagccgtgcccgaggacgccaagcagctggccagcttcctgcacggcaacgccagcctgctgttcagaagaaccaaggccaccgcccccggccccgagggcggcggcaccctgcaccccaaccccaccgacaagaccagcagcatccagagcagacccctgcccagcccccccaagttcaccagccaggacagccccgacggccagtacgagaacagcgagggcggctggatggaggactacgactacgtgcacctgcagggcaaggaggagttcgagaagacccagaaggagctgctggagaagggcagcatcaccagacagggcaagagccagctggagctgcagcagctgaagcagttcgagagactggagcaggaggtgagcagacccatcgaccacgacctggccaactggacccccgcccagcccctggcccccggcagaaccggcggcctgggccccagcgacagacagctgctgctgttctacctggagcagtgcgaggccaacctgaccaccctgaccaacgccgtggacgccttcttcaccgccgtggccaccaaccagccccccaagatcttcgtggcccacagcaagttcgtgatcctgagcgcccacaagctggtgttcatcggcgacaccctgagcagacaggccaaggccgccgacgtgagaagccaggtgacccactacagcaacctgctgtgcgacctgctgagaggcatcgtggccaccaccaaggccgccgccctgcagtaccccagccccagcgccgcccaggacatggtggagagagtgaaggagctgggccacagcacccagcagttcagaagagtgctgggccagctggccgccgcctag

SEQ ID NO: 9643 - DNA, 2613 bp, synthetic construct
  misc_feature 1..2613: note = Description of Artificial Sequence: Synthetic coding sequence
  source 1..2613: mol_type = other DNA
atgaaccacctgaacgtgctggccaaggccctgtacgacaacgtggccgagagccccgacgagctgagcttcagaaagggcgacatcatgaccgtgctggagcaggacacccagggcctggacggctggtggctgtgcagcctgcacggcagacagggcatcgtgcccggcaacagactgaagatcctggtgggcatgtacgacaagaagcccgccggccccggccccggcccccccgccacccccgcccagccccagcccggcctgcacgcccccgccccccccgccagccagtacacccccatgctgcccaacacctaccagccccagcccgacagcgtgtacctggtgcccacccccagcaaggcccagcagggcctgtaccaggtgcccggccccagcccccagttccagagcccccccgccaagcagaccagcaccttcagcaagcagaccccccaccaccccttccccagccccgccaccgacctgtaccaggtgccccccggccccggcggccccgcccaggacatctaccaggtgccccccagcgccggcatgggccacgacatctaccaggtgccccccagcatggacaccagaagctgggagggcaccaagccccccgccaaggtggtggtgcccaccagagtgggccagggctacgtgtacgaggccgcccagcccgagcaggacgagtacgacatccccagacacctgctggcccccggcccccaggacatctacgacgtgccccccgtgagaggcctgctgcccagccagtacggccaggaggtgtacgacaccccccccatggccgtgaagggccccaacggcagagaccccctgctggaggtgtacgacgtgccccccagcgtggagaagggcctgccccccagcaaccaccacgccgtgtacgacgtgccccccagcgtgagcaaggacgtgcccgacggccccctgctgagagaggagacctacgacgtgccccccgccttcgccaaggccaagcccttcgaccccgccagaacccccctggtgctggccgcccccccccccgacagcccccccgccgaggacgtgtacgacgtgcccccccccgcccccgacctgtacgacgtgccccccggcctgagaagacccggccccggcaccctgtacgacgtgcccagagagagagtgctgccccccgaggtggccgacggcggcgtggtggacagcggcgtgtacgccgtgcccccccccgccgagagagaggcccccgccgagggcaagagactgagcgccagcagcaccggcagcaccagaagcagccagagcgccagcagcctggaggtggccggccccggcagagagcccctggagctggaggtggccgtggaggccctggccagactgcagcagggcgtgagcgccaccgtggcccacctgctggacctggccggcagcgccggcgccaccggcagctggagaagccccagcgagccccaggagcccctggtgcaggacctgcaggccgccgtggccgccgtgcagagcgccgtgcacgagctgctggagttcgccagaagcgccgtgggcaacgccgcccacaccagcgacagagccctgcacgccaagctgagcagacagctgcagaagatggaggacgtgcaccagaccctggtggcccacggccaggccctggacgccggcagaggcggcagcggcgccaccctggaggacctggacagactggtggcctgcagcagagccgtgcccgaggacgccaagcagctggccagcttcctgcacggcaacgccagcctgctgttcagaagaaccaaggccaccgcccccggccccgagggcggcggcaccctgcaccccaaccccaccgacaagaccagcagcatccagagcagacccctgcccagcccccccaagttcaccagccaggacagccccgacggccagtacgagaacagcgagggcggctggatggaggactacgactacgtgcacctgcagggcaaggaggagttcgagaagacccagaaggagctgctggagaagggcagcatcaccagacagggcaagagccagctggagctgcagcagctgaagcagttcgagagactggagcaggaggtgagcagacccatcgaccacgacctggccaactggacccccgcccagcccctggcccccggcagaaccggcggcctgggccccagcgacagacagctgctgctgttctacctggagcagtgcgaggccaacctgaccaccctgaccaacgccgtggacgccttcttcaccgccgtggccaccaaccagccccccaagatcttcgtggcccacagcaagttcgtgatcctgagcgcccacaagctggtgttcatcggcgacaccctgagcagacaggccaaggccgccgacgtgagaagccaggtgacccactacagcaacctgctgtgcgacctgctgagaggcatcgtggccaccaccaaggccgccgccctgcagtaccccagccccagcgccgcccaggacatggtggagagagtgaaggagctgggccacagcacccagcagttcagaagagtgctgggccagctggccgccgcctag

SEQ ID NO: 9644 - DNA, 2667 bp, synthetic construct
  misc_feature 1..2667: note = Description of Artificial Sequence: Synthetic coding sequence
  source 1..2667: mol_type = other DNA
atgaaccacctgaacgtgctggccaaggccctgtacgacaacgtggccgagagccccgacgagctgagcttcagaaagggcgacatcatgaccgtgctggagcaggacacccagggcctggacggctggtggctgtgcagcctgcacggcagacagggcatcgtgcccggcaacagactgaagatcctggtgggcatgtacgacaagaagcccgccggccccggccccggcccccccgccacccccgcccagccccagcccggcctgcacgcccccgccccccccgccagccagtacacccccatgctgcccaacacctaccagccccagcccgacagcgtgtacctggtgcccacccccagcaaggcccagcagggcctgtaccaggtgcccggccccagcccccagttccagagcccccccgccaagcagaccagcaccttcagcaagcagaccccccaccaccccttccccagccccgccaccgacctgtaccaggtgccccccggccccggcggccccgcccaggacatctaccaggtgccccccagcgccggcatgggccacgacatctaccaggtgccccccagcatggacaccagaagctgggagggcaccaagccccccgccaaggtggtggtgcccaccagagtgggccagggctacgtgtacgaggccgcccagcccgagcaggacgagtacgacatccccagacacctgctggcccccggcccccaggacatctacgacgtgccccccgtgagaggcctgctgcccagccagtacggccaggaggtgtacgacaccccccccatggccgtgaagggccccaacggcagagaccccctgctggaggtgtacgacgtgccccccagcgtggagaagggcctgccccccagcaaccaccacgccgtgagcaagtgccagggcaacgccagagccagactgagactgtggggcgtgtgggtgtacgacgtgccccccagcgtgagcaaggacgtgcccgacggccccctgctgagagaggagacctacgacgtgccccccgccttcgccaaggccaagcccttcgaccccgccagaacccccctggtgctggccgcccccccccccgacagcccccccgccgaggacgtgtacgacgtgcccccccccgcccccgacctgtacgacgtgccccccggcctgagaagacccggccccggcaccctgtacgacgtgcccagagagagagtgctgccccccgaggtggccgacggcggcgtggtggacagcggcgtgtacgccgtgcccccccccgccgagagagaggcccccgccgagggcaagagactgagcgccagcagcaccggcagcaccagaagcagccagagcgccagcagcctggaggtggccggccccggcagagagcccctggagctggaggtggccgtggaggccctggccagactgcagcagggcgtgagcgccaccgtggcccacctgctggacctggccggcagcgccggcgccaccggcagctggagaagccccagcgagccccaggagcccctggtgcaggacctgcaggccgccgtggccgccgtgcagagcgccgtgcacgagctgctggagttcgccagaagcgccgtgggcaacgccgcccacaccagcgacagagccctgcacgccaagctgagcagacagctgcagaagatggaggacgtgcaccagaccctggtggcccacggccaggccctggacgccggcagaggcggcagcggcgccaccctggaggacctggacagactggtggcctgcagcagagccgtgcccgaggacgccaagcagctggccagcttcctgcacggcaacgccagcctgctgttcagaagaaccaaggccaccgcccccggccccgagggcggcggcaccctgcaccccaaccccaccgacaagaccagcagcatccagagcagacccctgcccagcccccccaagttcaccagccaggacagccccgacggccagtacgagaacagcgagggcggctggatggaggactacgactacgtgcacctgcagggcaaggaggagttcgagaagacccagaaggagctgctggagaagggcagcatcaccagacagggcaagagccagctggagctgcagcagctgaagcagttcgagagactggagcaggaggtgagcagacccatcgaccacgacctggccaactggacccccgcccagcccctggcccccggcagaaccggcggcctgggccccagcgacagacagctgctgctgttctacctggagcagtgcgaggccaacctgaccaccctgaccaacgccgtggacgccttcttcaccgccgtggccaccaaccagccccccaagatcttcgtggcccacagcaagttcgtgatcctgagcgcccacaagctggtgttcatcggcgacaccctgagcagacaggccaaggccgccgacgtgagaagccaggtgacccactacagcaacctgctgtgcgacctgctgagaggcatcgtggccaccaccaaggccgccgccctgcagtaccccagccccagcgccgcccaggacatggtggagagagtgaaggagctgggccacagcacccagcagttcagaagagtgctgggccagctggccgccgcctag

SEQ ID NO: 9645 - DNA, 2751 bp, synthetic construct
  misc_feature 1..2751: note = Description of Artificial Sequence: Synthetic coding sequence
  source 1..2751: mol_type = other DNA
atgcccgccaagcccttcctgagcagcgtgctgctgagctggaaggtgctggacttcagcggccccggcccccagggcaccggccagccctgcagctgcggccactgggccgagggccagggcggcccccccgagcccgccggcggccccaacgtgctggccaaggccctgtacgacaacgtggccgagagccccgacgagctgagcttcagaaagggcgacatcatgaccgtgctggagcaggacacccagggcctggacggctggtggctgtgcagcctgcacggcagacagggcatcgtgcccggcaacagactgaagatcctggtgggcatgtacgacaagaagcccgccggccccggccccggcccccccgccacccccgcccagccccagcccggcctgcacgcccccgccccccccgccagccagtacacccccatgctgcccaacacctaccagccccagcccgacagcgtgtacctggtgcccacccccagcaaggcccagcagggcctgtaccaggtgcccggccccagcccccagttccagagcccccccgccaagcagaccagcaccttcagcaagcagaccccccaccaccccttccccagccccgccaccgacctgtaccaggtgccccccggccccggcggccccgcccaggacatctaccaggtgccccccagcgccggcatgggccacgacatctaccaggtgccccccagcatggacaccagaagctgggagggcaccaagccccccgccaaggtggtggtgcccaccagagtgggccagggctacgtgtacgaggccgcccagcccgagcaggacgagtacgacatccccagacacctgctggcccccggcccccaggacatctacgacgtgccccccgtgagaggcctgctgcccagccagtacggccaggaggtgtacgacaccccccccatggccgtgaagggccccaacggcagagaccccctgctggaggtgtacgacgtgccccccagcgtggagaagggcctgccccccagcaaccaccacgccgtgtacgacgtgccccccagcgtgagcaaggacgtgcccgacggccccctgctgagagaggagacctacgacgtgccccccgccttcgccaaggccaagcccttcgaccccgccagaacccccctggtgctggccgcccccccccccgacagcccccccgccgaggacgtgtacgacgtgcccccccccgcccccgacctgtacgacgtgccccccggcctgagaagacccggccccggcaccctgtacgacgtgcccagagagagagtgctgccccccgaggtggccgacggcggcgtggtggacagcggcgtgtacgccgtgcccccccccgccgagagagaggcccccgccgagggcaagagactgagcgccagcagcaccggcagcaccagaagcagccagagcgccagcagcctggaggtggccggccccggcagagagcccctggagctggaggtggccgtggaggccctggccagactgcagcagggcgtgagcgccaccgtggcccacctgctggacctggccggcagcgccggcgccaccggcagctggagaagccccagcgagccccaggagcccctggtgcaggacctgcaggccgccgtggccgccgtgcagagcgccgtgcacgagctgctggagttcgccagaagcgccgtgggcaacgccgcccacaccagcgacagagccctgcacgccaagctgagcagacagctgcagaagatggaggacgtgcaccagaccctggtggcccacggccaggccctggacgccggcagaggcggcagcggcgccaccctggaggacctggacagactggtggcctgcagcagagccgtgcccgaggacgccaagcagctggccagcttcctgcacggcaacgccagcctgctgttcagaagaaccaaggccaccgcccccggccccgagggcggcggcaccctgcaccccaaccccaccgacaagaccagcagcatccagagcagacccctgcccagcccccccaagttcaccagccaggacagccccgacggccagtacgagaacagcgagggcggctggatggaggactacgactacgtgcacctgcagggcaaggaggagttcgagaagacccagaaggagctgctggagaagggcagcatcaccagacagggcaagagccagctggagctgcagcagctgaagcagttcgagagactggagcaggaggtgagcagacccatcgaccacgacctggccaactggacccccgcccagcccctggcccccggcagaaccggcggcctgggccccagcgacagacagctgctgctgttctacctggagcagtgcgaggccaacctgaccaccctgaccaacgccgtggacgccttcttcaccgccgtggccaccaaccagccccccaagatcttcgtggcccacagcaagttcgtgatcctgagcgcccacaagctggtgttcatcggcgacaccctgagcagacaggccaaggccgccgacgtgagaagccaggtgacccactacagcaacctgctgtgcgacctgctgagaggcatcgtggccaccaccaaggccgccgccctgcagtaccccagccccagcgccgcccaggacatggtggagagagtgaaggagctgggccacagcacccagcagttcagaagagtgctgggccagctggccgccgcctag

SEQ ID NO: 9646 - DNA, 2667 bp, synthetic construct
  misc_feature 1..2667: note = Description of Artificial Sequence: Synthetic coding sequence
  source 1..2667: mol_type = other DNA
atgctgacccacagaccccaggaggccgagcagagaggcagaacccccggccccagcttcgagtggaacgtgctggccaaggccctgtacgacaacgtggccgagagccccgacgagctgagcttcagaaagggcgacatcatgaccgtgctggagcaggacacccagggcctggacggctggtggctgtgcagcctgcacggcagacagggcatcgtgcccggcaacagactgaagatcctggtgggcatgtacgacaagaagcccgccggccccggccccggcccccccgccacccccgcccagccccagcccggcctgcacgcccccgccccccccgccagccagtacacccccatgctgcccaacacctaccagccccagcccgacagcgtgtacctggtgcccacccccagcaaggcccagcagggcctgtaccaggtgcccggccccagcccccagttccagagcccccccgccaagcagaccagcaccttcagcaagcagaccccccaccaccccttccccagccccgccaccgacctgtaccaggtgccccccggccccggcggccccgcccaggacatctaccaggtgccccccagcgccggcatgggccacgacatctaccaggtgccccccagcatggacaccagaagctgggagggcaccaagccccccgccaaggtggtggtgcccaccagagtgggccagggctacgtgtacgaggccgcccagcccgagcaggacgagtacgacatccccagacacctgctggcccccggcccccaggacatctacgacgtgccccccgtgagaggcctgctgcccagccagtacggccaggaggtgtacgacaccccccccatggccgtgaagggccccaacggcagagaccccctgctggaggtgtacgacgtgccccccagcgtggagaagggcctgccccccagcaaccaccacgccgtgtacgacgtgccccccagcgtgagcaaggacgtgcccgacggccccctgctgagagaggagacctacgacgtgccccccgccttcgccaaggccaagcccttcgaccccgccagaacccccctggtgctggccgcccccccccccgacagcccccccgccgaggacgtgtacgacgtgcccccccccgcccccgacctgtacgacgtgccccccggcctgagaagacccggccccggcaccctgtacgacgtgcccagagagagagtgctgccccccgaggtggccgacggcggcgtggtggacagcggcgtgtacgccgtgcccccccccgccgagagagaggcccccgccgagggcaagagactgagcgccagcagcaccggcagcaccagaagcagccagagcgccagcagcctggaggtggccggccccggcagagagcccctggagctggaggtggccgtggaggccctggccagactgcagcagggcgtgagcgccaccgtggcccacctgctggacctggccggcagcgccggcgccaccggcagctggagaagccccagcgagccccaggagcccctggtgcaggacctgcaggccgccgtggccgccgtgcagagcgccgtgcacgagctgctggagttcgccagaagcgccgtgggcaacgccgcccacaccagcgacagagccctgcacgccaagctgagcagacagctgcagaagatggaggacgtgcaccagaccctggtggcccacggccaggccctggacgccggcagaggcggcagcggcgccaccctggaggacctggacagactggtggcctgcagcagagccgtgcccgaggacgccaagcagctggccagcttcctgcacggcaacgccagcctgctgttcagaagaaccaaggccaccgcccccggccccgagggcggcggcaccctgcaccccaaccccaccgacaagaccagcagcatccagagcagacccctgcccagcccccccaagttcaccagccaggacagccccgacggccagtacgagaacagcgagggcggctggatggaggactacgactacgtgcacctgcagggcaaggaggagttcgagaagacccagaaggagctgctggagaagggcagcatcaccagacagggcaagagccagctggagctgcagcagctgaagcagttcgagagactggagcaggaggtgagcagacccatcgaccacgacctggccaactggacccccgcccagcccctggcccccggcagaaccggcggcctgggccccagcgacagacagctgctgctgttctacctggagcagtgcgaggccaacctgaccaccctgaccaacgccgtggacgccttcttcaccgccgtggccaccaaccagccccccaagatcttcgtggcccacagcaagttcgtgatcctgagcgcccacaagctggtgttcatcggcgacaccctgagcagacaggccaaggccgccgacgtgagaagccaggtgacccactacagcaacctgctgtgcgacctgctgagaggcatcgtggccaccaccaaggccgccgccctgcagtaccccagccccagcgccgcccaggacatggtggagagagtgaaggagctgggccacagcacccagcagttcagaagagtgctgggccagctggccgccgcctag

SEQ ID NO: 9647 - DNA, 2169 bp, synthetic construct
  misc_feature 1..2169: note = Description of Artificial Sequence: Synthetic coding sequence
  source 1..2169: mol_type = other DNA
atgcagggcaagaacgtgctggccaaggccctgtacgacaacgtggccgagagccccgacgagctgagcttcagaaagggcgacatcatgaccgtgctggagcaggacacccagggcctggacggctggtggctgtgcagcctgcacggcagacagggcatcgtgcccggcaacagactgaagatcctggtggtggtgcccaccagagtgggccagggctacgtgtacgaggccgcccagcccgagcaggacgagtacgacatccccagacacctgctggcccccggcccccaggacatctacgacgtgccccccgtgagaggcctgctgcccagccagtacggccaggaggtgtacgacaccccccccatggccgtgaagggccccaacggcagagaccccctgctggaggtgtacgacgtgccccccagcgtggagaagggcctgccccccagcaaccaccacgccgtgtacgacgtgccccccagcgtgagcaaggacgtgcccgacggccccctgctgagagaggagacctacgacgtgccccccgccttcgccaaggccaagcccttcgaccccgccagaacccccctggtgctggccgcccccccccccgacagcccccccgccgaggacgtgtacgacgtgcccccccccgcccccgacctgtacgacgtgccccccggcctgagaagacccggccccggcaccctgtacgacgtgcccagagagagagtgctgccccccgaggtggccgacggcggcgtggtggacagcggcgtgtacgccgtgcccccccccgccgagagagaggcccccgccgagggcaagagactgagcgccagcagcaccggcagcaccagaagcagccagagcgccagcagcctggaggtggccggccccggcagagagcccctggagctggaggtggccgtggaggccctggccagactgcagcagggcgtgagcgccaccgtggcccacctgctggacctggccggcagcgccggcgccaccggcagctggagaagccccagcgagccccaggagcccctggtgcaggacctgcaggccgccgtggccgccgtgcagagcgccgtgcacgagctgctggagttcgccagaagcgccgtgggcaacgccgcccacaccagcgacagagccctgcacgccaagctgagcagacagctgcagaagatggaggacgtgcaccagaccctggtggcccacggccaggccctggacgccggcagaggcggcagcggcgccaccctggaggacctggacagactggtggcctgcagcagagccgtgcccgaggacgccaagcagctggccagcttcctgcacggcaacgccagcctgctgttcagaagaaccaaggccaccgcccccggccccgagggcggcggcaccctgcaccccaaccccaccgacaagaccagcagcatccagagcagacccctgcccagcccccccaagttcaccagccaggacagccccgacggccagtacgagaacagcgagggcggctggatggaggactacgactacgtgcacctgcagggcaaggaggagttcgagaagacccagaaggagctgctggagaagggcagcatcaccagacagggcaagagccagctggagctgcagcagctgaagcagttcgagagactggagcaggaggtgagcagacccatcgaccacgacctggccaactggacccccgcccagcccctggcccccggcagaaccggcggcctgggccccagcgacagacagctgctgctgttctacctggagcagtgcgaggccaacctgaccaccctgaccaacgccgtggacgccttcttcaccgccgtggccaccaaccagccccccaagatcttcgtggcccacagcaagttcgtgatcctgagcgcccacaagctggtgttcatcggcgacaccctgagcagacaggccaaggccgccgacgtgagaagccaggtgacccactacagcaacctgctgtgcgacctgctgagaggcatcgtggccaccaccaaggccgccgccctgcagtaccccagccccagcgccgcccaggacatggtggagagagtgaaggagctgggccacagcacccagcagttcagaagagtgctgggccagctggccgccgcctag

SEQ ID NO: 9648 - DNA, 2613 bp, synthetic construct
  misc_feature 1..2613: note = Description of Artificial Sequence: Synthetic coding sequence
  source 1..2613: mol_type = other DNA
atgagcgtgcccaacgtgctggccaaggccctgtacgacaacgtggccgagagccccgacgagctgagcttcagaaagggcgacatcatgaccgtgctggagcaggacacccagggcctggacggctggtggctgtgcagcctgcacggcagacagggcatcgtgcccggcaacagactgaagatcctggtgggcatgtacgacaagaagcccgccggccccggccccggcccccccgccacccccgcccagccccagcccggcctgcacgcccccgccccccccgccagccagtacacccccatgctgcccaacacctaccagccccagcccgacagcgtgtacctggtgcccacccccagcaaggcccagcagggcctgtaccaggtgcccggccccagcccccagttccagagcccccccgccaagcagaccagcaccttcagcaagcagaccccccaccaccccttccccagccccgccaccgacctgtaccaggtgccccccggccccggcggccccgcccaggacatctaccaggtgccccccagcgccggcatgggccacgacatctaccaggtgccccccagcatggacaccagaagctgggagggcaccaagccccccgccaaggtggtggtgcccaccagagtgggccagggctacgtgtacgaggccgcccagcccgagcaggacgagtacgacatccccagacacctgctggcccccggcccccaggacatctacgacgtgccccccgtgagaggcctgctgcccagccagtacggccaggaggtgtacgacaccccccccatggccgtgaagggccccaacggcagagaccccctgctggaggtgtacgacgtgccccccagcgtggagaagggcctgccccccagcaaccaccacgccgtgtacgacgtgccccccagcgtgagcaaggacgtgcccgacggccccctgctgagagaggagacctacgacgtgccccccgccttcgccaaggccaagcccttcgaccccgccagaacccccctggtgctggccgcccccccccccgacagcccccccgccgaggacgtgtacgacgtgcccccccccgcccccgacctgtacgacgtgccccccggcctgagaagacccggccccggcaccctgtacgacgtgcccagagagagagtgctgccccccgaggtggccgacggcggcgtggtggacagcggcgtgtacgccgtgcccccccccgccgagagagaggcccccgccgagggcaagagactgagcgccagcagcaccggcagcaccagaagcagccagagcgccagcagcctggaggtggccggccccggcagagagcccctggagctggaggtggccgtggaggccctggccagactgcagcagggcgtgagcgccaccgtggcccacctgctggacctggccggcagcgccggcgccaccggcagctggagaagccccagcgagccccaggagcccctggtgcaggacctgcaggccgccgtggccgccgtgcagagcgccgtgcacgagctgctggagttcgccagaagcgccgtgggcaacgccgcccacaccagcgacagagccctgcacgccaagctgagcagacagctgcagaagatggaggacgtgcaccagaccctggtggcccacggccaggccctggacgccggcagaggcggcagcggcgccaccctggaggacctggacagactggtggcctgcagcagagccgtgcccgaggacgccaagcagctggccagcttcctgcacggcaacgccagcctgctgttcagaagaaccaaggccaccgcccccggccccgagggcggcggcaccctgcaccccaaccccaccgacaagaccagcagcatccagagcagacccctgcccagcccccccaagttcaccagccaggacagccccgacggccagtacgagaacagcgagggcggctggatggaggactacgactacgtgcacctgcagggcaaggaggagttcgagaagacccagaaggagctgctggagaagggcagcatcaccagacagggcaagagccagctggagctgcagcagctgaagcagttcgagagactggagcaggaggtgagcagacccatcgaccacgacctggccaactggacccccgcccagcccctggcccccggcagaaccggcggcctgggccccagcgacagacagctgctgctgttctacctggagcagtgcgaggccaacctgaccaccctgaccaacgccgtggacgccttcttcaccgccgtggccaccaaccagccccccaagatcttcgtggcccacagcaagttcgtgatcctgagcgcccacaagctggtgttcatcggcgacaccctgagcagacaggccaaggccgccgacgtgagaagccaggtgacccactacagcaacctgctgtgcgacctgctgagaggcatcgtggccaccaccaaggccgccgccctgcagtaccccagccccagcgccgcccaggacatggtggagagagtgaaggagctgggccacagcacccagcagttcagaagagtgctgggccagctggccgccgcctag

SEQ ID NO: 9649 - DNA, 2607 bp, synthetic construct
  misc_feature 1..2607: note = Description of Artificial Sequence: Synthetic coding sequence
  source 1..2607: mol_type = other DNA
atggagaacgtgctggccaaggccctgtacgacaacgtggccgagagccccgacgagctgagcttcagaaagggcgacatcatgaccgtgctggagcaggacacccagggcctggacggctggtggctgtgcagcctgcacggcagacagggcatcgtgcccggcaacagactgaagatcctggtgggcatgtacgacaagaagcccgccggccccggccccggcccccccgccacccccgcccagccccagcccggcctgcacgcccccgccccccccgccagccagtacacccccatgctgcccaacacctaccagccccagcccgacagcgtgtacctggtgcccacccccagcaaggcccagcagggcctgtaccaggtgcccggccccagcccccagttccagagcccccccgccaagcagaccagcaccttcagcaagcagaccccccaccaccccttccccagccccgccaccgacctgtaccaggtgccccccggccccggcggccccgcccaggacatctaccaggtgccccccagcgccggcatgggccacgacatctaccaggtgccccccagcatggacaccagaagctgggagggcaccaagccccccgccaaggtggtggtgcccaccagagtgggccagggctacgtgtacgaggccgcccagcccgagcaggacgagtacgacatccccagacacctgctggcccccggcccccaggacatctacgacgtgccccccgtgagaggcctgctgcccagccagtacggccaggaggtgtacgacaccccccccatggccgtgaagggccccaacggcagagaccccctgctggaggtgtacgacgtgccccccagcgtggagaagggcctgccccccagcaaccaccacgccgtgtacgacgtgccccccagcgtgagcaaggacgtgcccgacggccccctgctgagagaggagacctacgacgtgccccccgccttcgccaaggccaagcccttcgaccccgccagaacccccctggtgctggccgcccccccccccgacagcccccccgccgaggacgtgtacgacgtgcccccccccgcccccgacctgtacgacgtgccccccggcctgagaagacccggccccggcaccctgtacgacgtgcccagagagagagtgctgccccccgaggtggccgacggcggcgtggtggacagcggcgtgtacgccgtgcccccccccgccgagagagaggcccccgccgagggcaagagactgagcgccagcagcaccggcagcaccagaagcagccagagcgccagcagcctggaggtggccggccccggcagagagcccctggagctggaggtggccgtggaggccctggccagactgcagcagggcgtgagcgccaccgtggcccacctgctggacctggccggcagcgccggcgccaccggcagctggagaagccccagcgagccccaggagcccctggtgcaggacctgcaggccgccgtggccgccgtgcagagcgccgtgcacgagctgctggagttcgccagaagcgccgtgggcaacgccgcccacaccagcgacagagccctgcacgccaagctgagcagacagctgcagaagatggaggacgtgcaccagaccctggtggcccacggccaggccctggacgccggcagaggcggcagcggcgccaccctggaggacctggacagactggtggcctgcagcagagccgtgcccgaggacgccaagcagctggccagcttcctgcacggcaacgccagcctgctgttcagaagaaccaaggccaccgcccccggccccgagggcggcggcaccctgcaccccaaccccaccgacaagaccagcagcatccagagcagacccctgcccagcccccccaagttcaccagccaggacagccccgacggccagtacgagaacagcgagggcggctggatggaggactacgactacgtgcacctgcagggcaaggaggagttcgagaagacccagaaggagctgctggagaagggcagcatcaccagacagggcaagagccagctggagctgcagcagctgaagcagttcgagagactggagcaggaggtgagcagacccatcgaccacgacctggccaactggacccccgcccagcccctggcccccggcagaaccggcggcctgggccccagcgacagacagctgctgctgttctacctggagcagtgcgaggccaacctgaccaccctgaccaacgccgtggacgccttcttcaccgccgtggccaccaaccagccccccaagatcttcgtggcccacagcaagttcgtgatcctgagcgcccacaagctggtgttcatcggcgacaccctgagcagacaggccaaggccgccgacgtgagaagccaggtgacccactacagcaacctgctgtgcgacctgctgagaggcatcgtggccaccaccaaggccgccgccctgcagtaccccagccccagcgccgcccaggacatggtggagagagtgaaggagctgggccacagcacccagcagttcagaagagtgctgggccagctggccgccgcctag

SEQ ID NO: 9650 - DNA, 2526 bp, synthetic construct
  misc_feature 1..2526: note = Description of Artificial Sequence: Synthetic coding sequence
  source 1..2526: mol_type = other DNA
atgaccgtgctggagcaggacacccagggcctggacggctggtggctgtgcagcctgcacggcagacagggcatcgtgcccggcaacagactgaagatcctggtgggcatgtacgacaagaagcccgccggccccggccccggcccccccgccacccccgcccagccccagcccggcctgcacgcccccgccccccccgccagccagtacacccccatgctgcccaacacctaccagccccagcccgacagcgtgtacctggtgcccacccccagcaaggcccagcagggcctgtaccaggtgcccggccccagcccccagttccagagcccccccgccaagcagaccagcaccttcagcaagcagaccccccaccaccccttccccagccccgccaccgacctgtaccaggtgccccccggccccggcggccccgcccaggacatctaccaggtgccccccagcgccggcatgggccacgacatctaccaggtgccccccagcatggacaccagaagctgggagggcaccaagccccccgccaaggtggtggtgcccaccagagtgggccagggctacgtgtacgaggccgcccagcccgagcaggacgagtacgacatccccagacacctgctggcccccggcccccaggacatctacgacgtgccccccgtgagaggcctgctgcccagccagtacggccaggaggtgtacgacaccccccccatggccgtgaagggccccaacggcagagaccccctgctggaggtgtacgacgtgccccccagcgtggagaagggcctgccccccagcaaccaccacgccgtgtacgacgtgccccccagcgtgagcaaggacgtgcccgacggccccctgctgagagaggagacctacgacgtgccccccgccttcgccaaggccaagcccttcgaccccgccagaacccccctggtgctggccgcccccccccccgacagcccccccgccgaggacgtgtacgacgtgcccccccccgcccccgacctgtacgacgtgccccccggcctgagaagacccggccccggcaccctgtacgacgtgcccagagagagagtgctgccccccgaggtggccgacggcggcgtggtggacagcggcgtgtacgccgtgcccccccccgccgagagagaggcccccgccgagggcaagagactgagcgccagcagcaccggcagcaccagaagcagccagagcgccagcagcctggaggtggccggccccggcagagagcccctggagctggaggtggccgtggaggccctggccagactgcagcagggcgtgagcgccaccgtggcccacctgctggacctggccggcagcgccggcgccaccggcagctggagaagccccagcgagccccaggagcccctggtgcaggacctgcaggccgccgtggccgccgtgcagagcgccgtgcacgagctgctggagttcgccagaagcgccgtgggcaacgccgcccacaccagcgacagagccctgcacgccaagctgagcagacagctgcagaagatggaggacgtgcaccagaccctggtggcccacggccaggccctggacgccggcagaggcggcagcggcgccaccctggaggacctggacagactggtggcctgcagcagagccgtgcccgaggacgccaagcagctggccagcttcctgcacggcaacgccagcctgctgttcagaagaaccaaggccaccgcccccggccccgagggcggcggcaccctgcaccccaaccccaccgacaagaccagcagcatccagagcagacccctgcccagcccccccaagttcaccagccaggacagccccgacggccagtacgagaacagcgagggcggctggatggaggactacgactacgtgcacctgcagggcaaggaggagttcgagaagacccagaaggagctgctggagaagggcagcatcaccagacagggcaagagccagctggagctgcagcagctgaagcagttcgagagactggagcaggaggtgagcagacccatcgaccacgacctggccaactggacccccgcccagcccctggcccccggcagaaccggcggcctgggccccagcgacagacagctgctgctgttctacctggagcagtgcgaggccaacctgaccaccctgaccaacgccgtggacgccttcttcaccgccgtggccaccaaccagccccccaagatcttcgtggcccacagcaagttcgtgatcctgagcgcccacaagctggtgttcatcggcgacaccctgagcagacaggccaaggccgccgacgtgagaagccaggtgacccactacagcaacctgctgtgcgacctgctgagaggcatcgtggccaccaccaaggccgccgccctgcagtaccccagccccagcgccgcccaggacatggtggagagagtgaaggagctgggccacagcacccagcagttcagaagagtgctgggccagctggccgccgcctag

SEQ ID NO: 9651 - DNA, 741 bp, synthetic construct
  misc_feature 1..741: note = Description of Artificial Sequence: Synthetic coding sequence
  source 1..741: mol_type = other DNA
atgcccgtgcagccccccagcaaggacaccgaggagatggaggccgagggcgacagcgccgccgagatgaacggcgaggaggaggagagcgaggaggagagaagcggcagccagaccgagagcgaggaggagagcagcgagatggacgacgaggactacgagagaagaagaagcgagtgcgtgagcgagatgctggacctggagaagcagttcagcgagctgaaggagaagctgttcagagagagactgagccagctgagactgagactggaggaggtgggcgccgagagagcccccgagtacaccgagcccctgggcggcctgcagagaagcctgaagatcagaatccaggtggccggcatctacaagggcttctgcctggacgtgatcagaaacaagtacgagtgcgagctgcagggcgccaagcagcacctggagagcgagaagctgctgctgtacgacaccctgcagggcgagctgcaggagagaatccagagactggaggaggacagacagagcctggacctgagcagcgagtggtgggacgacaagctgcacgccagaggcagcagcagaagctgggacagcctgccccccagcaagagaaagaaggcccccctggtgagcggcccctacatcgtgtacatgctgcaggagatcgacatcctggaggactggaccgccatcaagaaggccagagccgccgtgagcccccagaagagaaagagcgacggcccctag

SEQ ID NO: 9652 - DNA, 873 bp, synthetic construct
  misc_feature 1..873: note = Description of Artificial Sequence: Synthetic coding sequence
  source 1..873: mol_type = other DNA
atgcccgtgcagccccccagcaaggacaccgaggagatggaggccgagggcgacagcgccgccgagatgaacggcgaggaggaggagagcgaggaggagagaagcggcagccagaccgagagcgaggaggagagcagcgagatggacgacgaggactacgagagaagaagaagcgagtgcgtgagcgagatgctggacctggagaagcagttcagcgagctgaaggagaagctgttcagagagagactgagccagctgagactgagactggaggaggtgggcgccgagagagcccccgagtacaccgagcccctgggcggcctgcagagaagcctgaagatcagaatccaggtggccggcatctacaagggcttctgcctggacgtgatcagaaacaagtacgagtgcgagctgcagggcgccaagcagcacctggagagcgagaagctgctgctgtacgacaccctgcagggcgagctgcaggagagaatccagagactggaggaggacagacagagcctggacctgagcagcgagtggtgggacgacaagctgcacgccagaggcagcagcagaagctgggacagcctgccccccagcaagagaaagaaggcccccctggtgagcggcccctacatcgtgtacatgctgcaggagatcgacatcctggaggactggaccgccatcaagaaggccagagccgccgtgagcccccagaagagaaagagcgacgacagaagaacccacagacccctgagagtgtgccccgccagactgctgtggtgctgctgggccctgcccctgcacctggccctggcctggaccccccccctgcccagcagcagacccgcccagctgtggccctggagctag

SEQ ID NO: 9653 - DNA, 735 bp, synthetic construct
  misc_feature 1..735: note = Description of Artificial Sequence: Synthetic coding sequence
  source 1..735: mol_type = other DNA
atgcccgtgcagccccccagcaaggacaccgaggagatggaggccgagggcgacagcgccgccgagatgaacggcgaggaggaggagagcgaggaggagagaagcggcagccagaccgagagcgaggaggagagcagcgagatggacgacgaggactacgagagaagaagaagcgagtgcgtgagcgagatgctggacctggagaagcagttcagcgagctgaaggagaagctgttcagagagagactgagccagctgagactgagactggaggaggtgggcgccgagagagcccccgagtacaccgagcccctgggcggcctgcagagaagcctgaagatcagaatccaggtggccggcatctacaagggcttctgcctggacgtgatcagaaacaagtacgagtgcgagctgcagggcgccaagcagcacctggagagcgagaagctgctgctgtacgacaccctgcagggcgagctgcaggagagaatccagagactggaggaggacagacagagcctggacctgagcagcgagtggtgggacgacaagctgcacgccagaggcagcagcagaagctgggacagcctgccccccagcaagagaaagaaggcccccctggtgagcggcccctacatcgtgtacatgctgcaggagatcgacatcctggaggactggaccgccatcaagaaggccagagccgccgtgagcccccagaagagaaagagcgactag

SEQ ID NO: 9654 - DNA, 1494 bp, synthetic construct
  misc_feature 1..1494: note = Description of Artificial Sequence: Synthetic coding sequence
  source 1..1494: mol_type = other DNA
atggccgagatgggcagcaagggcgtgaccgccggcaagatcgccagcaacgtgcagaagaagctgaccagagcccaggagaaggtgctgcagaagctgggcaaggccgacgagaccaaggacgagcagttcgagcagtgcgtgcagaacttcaacaagcagctgaccgagggcaccagactgcagaaggacctgagaacctacctggccagcgtgaaggccatgcacgaggccagcaagaagctgaacgagtgcctgcaggaggtgtacgagcccgactggcccggcagagacgaggccaacaagatcgccgagaacaacgacctgctgtggatggactaccaccagaagctggtggaccaggccctgctgaccatggacacctacctgggccagttccccgacatcaagagcagaatcgccaagagaggcagaaagctggtggactacgacagcgccagacaccactacgagagcctgcagaccgccaagaagaaggacgaggccaagatcgccaaggccgaggaggagctgatcaaggcccagaaggtgttcgaggagatgaacgtggacctgcaggaggagctgcccagcctgtggaacagcagagtgggcttctacgtgaacaccttccagagcatcgccggcctggaggagaacttccacaaggagatgagcaagctgaaccagaacctgaacgacgtgctggtgggcctggagaagcagcacggcagcaacaccttcaccgtgaaggcccagcccagaaagaagagcaagctgttcagcagactgagaagaaagaagaacagcgacaacgcccccgccaagggcaacaagagccccagcccccccgacggcagccccgccgccacccccgagatcagagtgaaccacgagcccgagcccgccggcggcgccacccccggcgccaccctgcccaagagccccagccagctgagaaagggcccccccgtgccccccccccccaagcacacccccagcaaggaggtgaagcaggagcagatcctgagcctgttcgaggacaccttcgtgcccgagatcagcgtgaccacccccagccagcccgccgaggccagcgaggtggccggcggcacccagcccgccgccggcgcccaggagcccggcgagaccgccgccagcgaggccgccagcagcagcctgcccgccgtggtggtggagaccttccccgccaccgtgaacggcaccgtggagggcggcagcggcgccggcagactggacctgccccccggcttcatgttcaaggtgcaggcccagcacgactacaccgccaccgacaccgacgagctgcagctgaaggccggcgacgtggtgctggtgatccccttccagaaccccgaggagcaggacgagggctggctgatgggcgtgaaggagagcgactggaaccagcacaaggagctggagaagtgcagaggcgtgttccccgagaacttcaccgagagagtgccctag

SEQ ID NO: 9655 - DNA, 1782 bp, synthetic construct
  misc_feature 1..1782: note = Description of Artificial Sequence: Synthetic coding sequence
  source 1..1782: mol_type = other DNA
atggccgagatgggcagcaagggcgtgaccgccggcaagatcgccagcaacgtgcagaagaagctgaccagagcccaggagaaggtgctgcagaagctgggcaaggccgacgagaccaaggacgagcagttcgagcagtgcgtgcagaacttcaacaagcagctgaccgagggcaccagactgcagaaggacctgagaacctacctggccagcgtgaaggccatgcacgaggccagcaagaagctgaacgagtgcctgcaggaggtgtacgagcccgactggcccggcagagacgaggccaacaagatcgccgagaacaacgacctgctgtggatggactaccaccagaagctggtggaccaggccctgctgaccatggacacctacctgggccagttccccgacatcaagagcagaatcgccaagagaggcagaaagctggtggactacgacagcgccagacaccactacgagagcctgcagaccgccaagaagaaggacgaggccaagatcgccaagcccgtgagcctgctggagaaggccgccccccagtggtgccagggcaagctgcaggcccacctggtggcccagaccaacctgctgagaaaccaggccgaggaggagctgatcaaggcccagaaggtgttcgaggagatgaacgtggacctgcaggaggagctgcccagcctgtggaacagcagagtgggcttctacgtgaacaccttccagagcatcgccggcctggaggagaacttccacaaggagatgagcaagctgaaccagaacctgaacgacgtgctggtgggcctggagaagcagcacggcagcaacaccttcaccgtgaaggcccagcccagcgacaacgcccccgccaagggcaacaagagccccagcccccccgacggcagccccgccgccacccccgagatcagagtgaaccacgagcccgagcccgccggcggcgccacccccggcgccaccctgcccaagagccccagccagctgagaaagggcccccccgtgccccccccccccaagcacacccccagcaaggaggtgaagcaggagcagatcctgagcctgttcgaggacaccttcgtgcccgagatcagcgtgaccacccccagccagttcgaggcccccggccccttcagcgagcaggccagcctgctggacctggacttcgaccccctgccccccgtgaccagccccgtgaaggcccccacccccagcggccagagcatcccctgggacctgtgggagcccaccgagagccccgccggcagcctgcccagcggcgagcccagcgccgccgagggcaccttcgccgtgagctggcccagccagaccgccgagcccggccccgcccagcccgccgaggccagcgaggtggccggcggcacccagcccgccgccggcgcccaggagcccggcgagaccgccgccagcgaggccgccagcagcagcctgcccgccgtggtggtggagaccttccccgccaccgtgaacggcaccgtggagggcggcagcggcgccggcagactggacctgccccccggcttcatgttcaaggtgcaggcccagcacgactacaccgccaccgacaccgacgagctgcagctgaaggccggcgacgtggtgctggtgatccccttccagaaccccgaggagcaggacgagggctggctgatgggcgtgaaggagagcgactggaaccagcacaaggagctggagaagtgcagaggcgtgttccccgagaacttcaccgagagagtgccctag

SEQ ID NO: 9656 - DNA, 1557 bp, synthetic construct
  misc_feature 1..1557: note = Description of Artificial Sequence: Synthetic coding sequence
  source 1..1557: mol_type = other DNA
atggccgagatgggcagcaagggcgtgaccgccggcaagatcgccagcaacgtgcagaagaagctgaccagagcccaggagaaggtgctgcagaagctgggcaaggccgacgagaccaaggacgagcagttcgagcagtgcgtgcagaacttcaacaagcagctgaccgagggcaccagactgcagaaggacctgagaacctacctggccagcgtgaaggccatgcacgaggccagcaagaagctgaacgagtgcctgcaggaggtgtacgagcccgactggcccggcagagacgaggccaacaagatcgccgagaacaacgacctgctgtggatggactaccaccagaagctggtggaccaggccctgctgaccatggacacctacctgggccagttccccgacatcaagagcagaatcgccaagagaggcagaaagctggtggactacgacagcgccagacaccactacgagagcctgcagaccgccaagaagaaggacgaggccaagatcgccaaggccgaggaggagctgatcaaggcccagaaggtgttcgaggagatgaacgtggacctgcaggaggagctgcccagcctgtggaacagcagagtgggcttctacgtgaacaccttccagagcatcgccggcctggaggagaacttccacaaggagatgagcaagctgaaccagaacctgaacgacgtgctggtgggcctggagaagcagcacggcagcaacaccttcaccgtgaaggcccagcccagcgacaacgcccccgccaagggcaacaagagccccagcccccccgacggcagccccgccgccacccccgagatcagagtgaaccacgagcccgagcccgccggcggcgccacccccggcgccaccctgcccaagagccccagccagctgagaaagggcccccccgtgccccccccccccaagcacacccccagcaaggaggtgaagcaggagcagatcctgagcctgttcgaggacaccttcgtgcccgagatcagcgtgaccacccccagccagcccaccgagagccccgccggcagcctgcccagcggcgagcccagcgccgccgagggcaccttcgccgtgagctggcccagccagaccgccgagcccggccccgcccagcccgccgaggccagcgaggtggccggcggcacccagcccgccgccggcgcccaggagcccggcgagaccgccgccagcgaggccgccagcagcagcctgcccgccgtggtggtggagaccttccccgccaccgtgaacggcaccgtggagggcggcagcggcgccggcagactggacctgccccccggcttcatgttcaaggtgcaggcccagcacgactacaccgccaccgacaccgacgagctgcagctgaaggccggcgacgtggtgctggtgatccccttccagaaccccgaggagcaggacgagggctggctgatgggcgtgaaggagagcgactggaaccagcacaaggagctggagaagtgcagaggcgtgttccccgagaacttcaccgagagagtgccctag

SEQ ID NO: 9657 - DNA, 1230 bp, synthetic construct
  misc_feature 1..1230: note = Description of Artificial Sequence: Synthetic coding sequence
  source 1..1230: mol_type = other DNA
atggccgagatgggcagcaagggcgtgaccgccggcaagatcgccagcaacgtgcagaagaagctgaccagagcccaggagaaggtgctgcagaagctgggcaaggccgacgagaccaaggacgagcagttcgagcagtgcgtgcagaacttcaacaagcagctgaccgagggcaccagactgcagaaggacctgagaacctacctggccagcgtgaaggccatgcacgaggccagcaagaagctgaacgagtgcctgcaggaggtgtacgagcccgactggcccggcagagacgaggccaacaagatcgccgagaacaacgacctgctgtggatggactaccaccagaagctggtggaccaggccctgctgaccatggacacctacctgggccagttccccgacatcaagagcagaatcgccaagagaggcagaaagctggtggactacgacagcgccagacaccactacgagagcctgcagaccgccaagaagaaggacgaggccaagatcgccaaggccgaggaggagctgatcaaggcccagaaggtgttcgaggagatgaacgtggacctgcaggaggagctgcccagcctgtggaacagcagagtgggcttctacgtgaacaccttccagagcatcgccggcctggaggagaacttccacaaggagatgagcaagctgaaccagaacctgaacgacgtgctggtgggcctggagaagcagcacggcagcaacaccttcaccgtgaaggcccagcccagcgacaacgcccccgccaagggcaacaagagccccagcccccccgacggcagccccgccgccacccccgagatcagagtgaaccacgagcccgagcccgccggcggcgccacccccggcgccaccctgcccaagagccccagccagagcagcctgcccgccgtggtggtggagaccttccccgccaccgtgaacggcaccgtggagggcggcagcggcgccggcagactggacctgccccccggcttcatgttcaaggtgcaggcccagcacgactacaccgccaccgacaccgacgagctgcagctgaaggccggcgacgtggtgctggtgatccccttccagaaccccgaggagcaggacgagggctggctgatgggcgtgaaggagagcgactggaaccagcacaaggagctggagaagtgcagaggcgtgttccccgagaacttcaccgagagagtgccctag

SEQ ID NO: 9658 - DNA, 1521 bp, synthetic construct
  misc_feature 1..1521: note = Description of Artificial Sequence: Synthetic coding sequence
  source 1..1521: mol_type = other DNA
atggccgagatgggcagcaagggcgtgaccgccggcaagatcgccagcaacgtgcagaagaagctgaccagagcccaggagaaggtgctgcagaagctgggcaaggccgacgagaccaaggacgagcagttcgagcagtgcgtgcagaacttcaacaagcagctgaccgagggcaccagactgcagaaggacctgagaacctacctggccagcgtgaaggccatgcacgaggccagcaagaagctgaacgagtgcctgcaggaggtgtacgagcccgactggcccggcagagacgaggccaacaagatcgccgagaacaacgacctgctgtggatggactaccaccagaagctggtggaccaggccctgctgaccatggacacctacctgggccagttccccgacatcaagagcagaatcgccaagagaggcagaaagctggtggactacgacagcgccagacaccactacgagagcctgcagaccgccaagaagaaggacgaggccaagatcgccaagcccgtgagcctgctggagaaggccgccccccagtggtgccagggcaagctgcaggcccacctggtggcccagaccaacctgctgagaaaccaggccgaggaggagctgatcaaggcccagaaggtgttcgaggagatgaacgtggacctgcaggaggagctgcccagcctgtggaacagcagagtgggcttctacgtgaacaccttccagagcatcgccggcctggaggagaacttccacaaggagatgagcaagctgaaccagaacctgaacgacgtgctggtgggcctggagaagcagcacggcagcaacaccttcaccgtgaaggcccagcccagcgacaacgcccccgccaagggcaacaagagccccagcccccccgacggcagccccgccgccacccccgagatcagagtgaaccacgagcccgagcccgccggcggcgccacccccggcgccaccctgcccaagagccccagccagcccaccgagagccccgccggcagcctgcccagcggcgagcccagcgccgccgagggcaccttcgccgtgagctggcccagccagaccgccgagcccggccccgcccagcccgccgaggccagcgaggtggccggcggcacccagcccgccgccggcgcccaggagcccggcgagaccgccgccagcgaggccgccagcagcagcctgcccgccgtggtggtggagaccttccccgccaccgtgaacggcaccgtggagggcggcagcggcgccggcagactggacctgccccccggcttcatgttcaaggtgcaggcccagcacgactacaccgccaccgacaccgacgagctgcagctgaaggccggcgacgtggtgctggtgatccccttccagaaccccgaggagcaggacgagggctggctgatgggcgtgaaggagagcgactggaaccagcacaaggagctggagaagtgcagaggcgtgttccccgagaacttcaccgagagagtgccctag

SEQ ID NO: 9659 - DNA, 1365 bp, synthetic construct
  misc_feature 1..1365: note = Description of Artificial Sequence: Synthetic coding sequence
  source 1..1365: mol_type = other DNA
atggccgagatgggcagcaagggcgtgaccgccggcaagatcgccagcaacgtgcagaagaagctgaccagagcccaggagaaggtgctgcagaagctgggcaaggccgacgagaccaaggacgagcagttcgagcagtgcgtgcagaacttcaacaagcagctgaccgagggcaccagactgcagaaggacctgagaacctacctggccagcgtgaaggccatgcacgaggccagcaagaagctgaacgagtgcctgcaggaggtgtacgagcccgactggcccggcagagacgaggccaacaagatcgccgagaacaacgacctgctgtggatggactaccaccagaagctggtggaccaggccctgctgaccatggacacctacctgggccagttccccgacatcaagagcagaatcgccaagagaggcagaaagctggtggactacgacagcgccagacaccactacgagagcctgcagaccgccaagaagaaggacgaggccaagatcgccaaggccgaggaggagctgatcaaggcccagaaggtgttcgaggagatgaacgtggacctgcaggaggagctgcccagcctgtggaacagcagagtgggcttctacgtgaacaccttccagagcatcgccggcctggaggagaacttccacaaggagatgagcaagctgaaccagaacctgaacgacgtgctggtgggcctggagaagcagcacggcagcaacaccttcaccgtgaaggcccagcccagaaagaagagcaagctgttcagcagactgagaagaaagaagaacagcgacaacgcccccgccaagggcaacaagagccccagcccccccgacggcagccccgccgccacccccgagatcagagtgaaccacgagcccgagcccgccggcggcgccacccccggcgccaccctgcccaagagccccagccagcccgccgaggccagcgaggtggccggcggcacccagcccgccgccggcgcccaggagcccggcgagaccgccgccagcgaggccgccagcagcagcctgcccgccgtggtggtggagaccttccccgccaccgtgaacggcaccgtggagggcggcagcggcgccggcagactggacctgccccccggcttcatgttcaaggtgcaggcccagcacgactacaccgccaccgacaccgacgagctgcagctgaaggccggcgacgtggtgctggtgatccccttccagaaccccgaggagcaggacgagggctggctgatgggcgtgaaggagagcgactggaaccagcacaaggagctggagaagtgcagaggcgtgttccccgagaacttcaccgagagagtgccctag

SEQ ID NO: 9660 - DNA, 1653 bp, synthetic construct
  misc_feature 1..1653: note = Description of Artificial Sequence: Synthetic coding sequence
  source 1..1653: mol_type = other DNA
atggccgagatgggcagcaagggcgtgaccgccggcaagatcgccagcaacgtgcagaagaagctgaccagagcccaggagaaggtgctgcagaagctgggcaaggccgacgagaccaaggacgagcagttcgagcagtgcgtgcagaacttcaacaagcagctgaccgagggcaccagactgcagaaggacctgagaacctacctggccagcgtgaaggccatgcacgaggccagcaagaagctgaacgagtgcctgcaggaggtgtacgagcccgactggcccggcagagacgaggccaacaagatcgccgagaacaacgacctgctgtggatggactaccaccagaagctggtggaccaggccctgctgaccatggacacctacctgggccagttccccgacatcaagagcagaatcgccaagagaggcagaaagctggtggactacgacagcgccagacaccactacgagagcctgcagaccgccaagaagaaggacgaggccaagatcgccaagcccgtgagcctgctggagaaggccgccccccagtggtgccagggcaagctgcaggcccacctggtggcccagaccaacctgctgagaaaccaggccgaggaggagctgatcaaggcccagaaggtgttcgaggagatgaacgtggacctgcaggaggagctgcccagcctgtggaacagcagagtgggcttctacgtgaacaccttccagagcatcgccggcctggaggagaacttccacaaggagatgagcaagctgaaccagaacctgaacgacgtgctggtgggcctggagaagcagcacggcagcaacaccttcaccgtgaaggcccagcccagcgacaacgcccccgccaagggcaacaagagccccagcccccccgacggcagccccgccgccacccccgagatcagagtgaaccacgagcccgagcccgccggcggcgccacccccggcgccaccctgcccaagagccccagccagttcgaggcccccggccccttcagcgagcaggccagcctgctggacctggacttcgaccccctgccccccgtgaccagccccgtgaaggcccccacccccagcggccagagcatcccctgggacctgtgggagcccaccgagagccccgccggcagcctgcccagcggcgagcccagcgccgccgagggcaccttcgccgtgagctggcccagccagaccgccgagcccggccccgcccagcccgccgaggccagcgaggtggccggcggcacccagcccgccgccggcgcccaggagcccggcgagaccgccgccagcgaggccgccagcagcagcctgcccgccgtggtggtggagaccttccccgccaccgtgaacggcaccgtggagggcggcagcggcgccggcagactggacctgccccccggcttcatgttcaaggtgcaggcccagcacgactacaccgccaccgacaccgacgagctgcagctgaaggccggcgacgtggtgctggtgatccccttccagaaccccgaggagcaggacgagggctggctgatgggcgtgaaggagagcgactggaaccagcacaaggagctggagaagtgcagaggcgtgttccccgagaacttcaccgagagagtgccctag

SEQ ID NO: 9661 - DNA, 1449 bp, synthetic construct
  misc_feature 1..1449: note = Description of Artificial Sequence: Synthetic coding sequence
  source 1..1449: mol_type = other DNA
atggccgagatgggcagcaagggcgtgaccgccggcaagatcgccagcaacgtgcagaagaagctgaccagagcccaggagaaggtgctgcagaagctgggcaaggccgacgagaccaaggacgagcagttcgagcagtgcgtgcagaacttcaacaagcagctgaccgagggcaccagactgcagaaggacctgagaacctacctggccagcgtgaaggccatgcacgaggccagcaagaagctgaacgagtgcctgcaggaggtgtacgagcccgactggcccggcagagacgaggccaacaagatcgccgagaacaacgacctgctgtggatggactaccaccagaagctggtggaccaggccctgctgaccatggacacctacctgggccagttccccgacatcaagagcagaatcgccaagagaggcagaaagctggtggactacgacagcgccagacaccactacgagagcctgcagaccgccaagaagaaggacgaggccaagatcgccaaggccgaggaggagctgatcaaggcccagaaggtgttcgaggagatgaacgtggacctgcaggaggagctgcccagcctgtggaacagcagagtgggcttctacgtgaacaccttccagagcatcgccggcctggaggagaacttccacaaggagatgagcaagctgaaccagaacctgaacgacgtgctggtgggcctggagaagcagcacggcagcaacaccttcaccgtgaaggcccagcccagcgacaacgcccccgccaagggcaacaagagccccagcccccccgacggcagccccgccgccacccccgagatcagagtgaaccacgagcccgagcccgccggcggcgccacccccggcgccaccctgcccaagagccccagccagctgagaaagggcccccccgtgccccccccccccaagcacacccccagcaaggaggtgaagcaggagcagatcctgagcctgttcgaggacaccttcgtgcccgagatcagcgtgaccacccccagccagcccgccgaggccagcgaggtggccggcggcacccagcccgccgccggcgcccaggagcccggcgagaccgccgccagcgaggccgccagcagcagcctgcccgccgtggtggtggagaccttccccgccaccgtgaacggcaccgtggagggcggcagcggcgccggcagactggacctgccccccggcttcatgttcaaggtgcaggcccagcacgactacaccgccaccgacaccgacgagctgcagctgaaggccggcgacgtggtgctggtgatccccttccagaaccccgaggagcaggacgagggctggctgatgggcgtgaaggagagcgactggaaccagcacaaggagctggagaagtgcagaggcgtgttccccgagaacttcaccgagagagtgccctag

SEQ ID NO: 9662 - DNA, 1428 bp, synthetic construct
  misc_feature 1..1428: note = Description of Artificial Sequence: Synthetic coding sequence
  source 1..1428: mol_type = other DNA
atggccgagatgggcagcaagggcgtgaccgccggcaagatcgccagcaacgtgcagaagaagctgaccagagcccaggagaaggtgctgcagaagctgggcaaggccgacgagaccaaggacgagcagttcgagcagtgcgtgcagaacttcaacaagcagctgaccgagggcaccagactgcagaaggacctgagaacctacctggccagcgtgaaggccatgcacgaggccagcaagaagctgaacgagtgcctgcaggaggtgtacgagcccgactggcccggcagagacgaggccaacaagatcgccgagaacaacgacctgctgtggatggactaccaccagaagctggtggaccaggccctgctgaccatggacacctacctgggccagttccccgacatcaagagcagaatcgccaagagaggcagaaagctggtggactacgacagcgccagacaccactacgagagcctgcagaccgccaagaagaaggacgaggccaagatcgccaaggccgaggaggagctgatcaaggcccagaaggtgttcgaggagatgaacgtggacctgcaggaggagctgcccagcctgtggaacagcagagtgggcttctacgtgaacaccttccagagcatcgccggcctggaggagaacttccacaaggagatgagcaagctgaaccagaacctgaacgacgtgctggtgggcctggagaagcagcacggcagcaacaccttcaccgtgaaggcccagcccagcgacaacgcccccgccaagggcaacaagagccccagcccccccgacggcagccccgccgccacccccgagatcagagtgaaccacgagcccgagcccgccggcggcgccacccccggcgccaccctgcccaagagccccagccagcccaccgagagccccgccggcagcctgcccagcggcgagcccagcgccgccgagggcaccttcgccgtgagctggcccagccagaccgccgagcccggccccgcccagcccgccgaggccagcgaggtggccggcggcacccagcccgccgccggcgcccaggagcccggcgagaccgccgccagcgaggccgccagcagcagcctgcccgccgtggtggtggagaccttccccgccaccgtgaacggcaccgtggagggcggcagcggcgccggcagactggacctgccccccggcttcatgttcaaggtgcaggcccagcacgactacaccgccaccgacaccgacgagctgcagctgaaggccggcgacgtggtgctggtgatccccttccagaaccccgaggagcaggacgagggctggctgatgggcgtgaaggagagcgactggaaccagcacaaggagctggagaagtgcagaggcgtgttccccgagaacttcaccgagagagtgccctag

SEQ ID NO: 9663 - DNA, 1320 bp, synthetic construct
  misc_feature 1..1320: note = Description of Artificial Sequence: Synthetic coding sequence
  source 1..1320: mol_type = other DNA
atggccgagatgggcagcaagggcgtgaccgccggcaagatcgccagcaacgtgcagaagaagctgaccagagcccaggagaaggtgctgcagaagctgggcaaggccgacgagaccaaggacgagcagttcgagcagtgcgtgcagaacttcaacaagcagctgaccgagggcaccagactgcagaaggacctgagaacctacctggccagcgtgaaggccatgcacgaggccagcaagaagctgaacgagtgcctgcaggaggtgtacgagcccgactggcccggcagagacgaggccaacaagatcgccgagaacaacgacctgctgtggatggactaccaccagaagctggtggaccaggccctgctgaccatggacacctacctgggccagttccccgacatcaagagcagaatcgccaagagaggcagaaagctggtggactacgacagcgccagacaccactacgagagcctgcagaccgccaagaagaaggacgaggccaagatcgccaaggccgaggaggagctgatcaaggcccagaaggtgttcgaggagatgaacgtggacctgcaggaggagctgcccagcctgtggaacagcagagtgggcttctacgtgaacaccttccagagcatcgccggcctggaggagaacttccacaaggagatgagcaagctgaaccagaacctgaacgacgtgctggtgggcctggagaagcagcacggcagcaacaccttcaccgtgaaggcccagcccagcgacaacgcccccgccaagggcaacaagagccccagcccccccgacggcagccccgccgccacccccgagatcagagtgaaccacgagcccgagcccgccggcggcgccacccccggcgccaccctgcccaagagccccagccagcccgccgaggccagcgaggtggccggcggcacccagcccgccgccggcgcccaggagcccggcgagaccgccgccagcgaggccgccagcagcagcctgcccgccgtggtggtggagaccttccccgccaccgtgaacggcaccgtggagggcggcagcggcgccggcagactggacctgccccccggcttcatgttcaaggtgcaggcccagcacgactacaccgccaccgacaccgacgagctgcagctgaaggccggcgacgtggtgctggtgatccccttccagaaccccgaggagcaggacgagggctggctgatgggcgtgaaggagagcgactggaaccagcacaaggagctggagaagtgcagaggcgtgttccccgagaacttcaccgagagagtgccctag

SEQ ID NO: 9664 - DNA, 1956 bp, synthetic construct
  misc_feature 1..1956: note = Description of Artificial Sequence: Synthetic coding sequence
  source 1..1956: mol_type = other DNA
atgggcaagaagcacaagaagcacaagagcgacaagcacctgtacgaggagtacgtggagaagcccctgaagctggtgctgaaggtgggcggcaacgaggtgaccgagctgagcaccggcagcagcggccacgacagcagcctgttcgaggacaagaacgaccacgacaagcacaaggacagaaagagaaagaagagaaagaagggcgagaagcagatccccggcgaggagaagggcagaaagagaagaagagtgaaggaggacaagaagaagagagacagagacagagtggagaacgaggccgagaaggacctgcagtgccacgcccccgtgagactggacctgccccccgagaagcccctgaccagcagcctggccaagcaggaggaggtggagcagacccccctgcaggaggccctgaaccagctgatgagacagctgcagagaaaggaccccagcgccttcttcagcttccccgtgaccgacttcatcgcccccggctacagcatgatcatcaagcaccccatggacttcagcaccatgaaggagaagatcaagaacaacgactaccagagcatcgaggagctgaaggacaacttcaagctgatgtgcaccaacgccatgatctacaacaagcccgagaccatctactacaaggccgccaagaagctgctgcacagcggcatgaagatcctgagccaggagagaatccagagcctgaagcagagcatcgacttcatggccgacctgcagaagaccagaaagcagaaggacggcaccgacaccagccagagcggcgaggacggcggctgctggcagagagagagagaggacagcggcgacgccgaggcccacgccttcaagagccccagcaaggagaacaagaagaaggacaaggacatgctggaggacaagttcaagagcaacaacctggagagagagcaggagcagctggacagaatcgtgaaggagagcggcggcaagctgaccagaagactggtgaacagccagtgcgagttcgagagaagaaagcccgacggcaccaccaccctgggcctgctgcaccccgtggaccccatcgtgggcgagcccggctactgccccgtgagactgggcatgaccaccggcagactgcagagcggcgtgaacaccctgcagggcttcaaggaggacaagagaaacaaggtgacccccgtgctgtacctgaactacggcccctacagcagctacgccccccactacgacagcaccttcgccaacatcagcaaggacgacagcgacctgatctacagcacctacggcgaggacagcgacctgcccagcgacttcagcatccacgagttcctggccacctgccaggactacccctacgtgatggccgacagcctgctggacgtgctgaccaagggcggccacagcagaaccctgcaggagatggagatgagcctgcccgaggacgagggccacaccagaaccctggacaccgccaaggagatggagatcaccgaggtggagccccccggcagactggacagcagcacccaggacagactgatcgccctgaaggccgtgaccaacttcggcgtgcccgtggaggtgttcgacagcgaggaggccgagatcttccagaagaagctggacgagaccaccagactgctgagagagctgcaggaggcccagaacgagagactgagcaccagacccccccccaacatgatctgcctgctgggccccagctacagagagatgcacctggccgagcaggtgaccaacaacctgaaggagctggcccagcaggtgacccccggcgacatcgtgagcacctacggcgtgagaaaggccatgggcatcagcatccccagccccgtgatggagaacaacttcgtggacctgaccgaggacaccgaggagcccaagaagaccgacgtggccgagtgcggccccggcggcagctag

SEQ ID NO: 9665 - DNA, 1959 bp, synthetic construct
  misc_feature 1..1959: note = Description of Artificial Sequence: Synthetic coding sequence
  source 1..1959: mol_type = other DNA
atgggcaagaagcacaagaagcacaagagcgacaagcacctgtacgaggagtacgtggagaagcccctgaagctggtgctgaaggtgggcggcaacgaggtgaccgagctgagcaccggcagcagcggccacgacagcagcctgttcgaggacaagaacgaccacgacaagcacaaggacagaaagagaaagaagagaaagaagggcgagaagcagatccccggcgaggagaagggcagaaagagaagaagagtgaaggaggacaagaagaagagagacagagacagagtggagaacgaggccgagaaggacctgcagtgccacgcccccgtgagactggacctgccccccgagaagcccctgaccagcagcctggccaagcaggaggaggtggagcagacccccctgcaggaggccctgaaccagctgatgagacagctgcagagaaaggaccccagcgccttcttcagcttccccgtgaccgacttcatcgcccccggctacagcatgatcatcaagcaccccatggacttcagcaccatgaaggagaagatcaagaacaacgactaccagagcatcgaggagctgaaggacaacttcaagctgatgtgcaccaacgccatgatctacaacaagcccgagaccatctactacaaggccgccaagaagctgctgcacagcggcatgaagatcctgagccaggagagaatccagagcctgaagcagagcatcgacttcatggccgacctgcagaagaccagaaagcagaaggacggcaccgacaccagccagagcggcgaggacggcggctgctggcagagagagagagaggacagcggcgacgccgaggcccacgccttcaagagccccagcaaggagaacaagaagaaggacaaggacatgctggaggacaagttcaagagcaacaacctggagagagagcaggagcagctggacagaatcgtgaaggagagcggcggcaagctgaccagaagactggtgaacagccagtgcgagttcgagagaagaaagcccgacggcaccaccaccctgggcctgctgcaccccgtggaccccatcgtgggcgagcccggctactgccccgtgagactgggcatgaccaccggcagactgcagagcggcgtgaacaccctgcagggcttcaaggaggacaagagaaacaaggtgacccccgtgctgtacctgaactacggcccctacagcagctacgccccccactacgacagcaccttcgccaacatcagcaaggacgacagcgacctgatctacagcacctacggcgaggacagcgacctgcccagcgacttcagcatccacgagttcctggccacctgccaggactacccctacgtgatggccgacagcctgctggacgtgctgaccaagggcggccacagcagaaccctgcaggagatggagatgagcctgcccgaggacgagggccacaccagaaccctggacaccgccaaggagatggagcagatcaccgaggtggagccccccggcagactggacagcagcacccaggacagactgatcgccctgaaggccgtgaccaacttcggcgtgcccgtggaggtgttcgacagcgaggaggccgagatcttccagaagaagctggacgagaccaccagactgctgagagagctgcaggaggcccagaacgagagactgagcaccagacccccccccaacatgatctgcctgctgggccccagctacagagagatgcacctggccgagcaggtgaccaacaacctgaaggagctggcccagcaggtgacccccggcgacatcgtgagcacctacggcgtgagaaaggccatgggcatcagcatccccagccccgtgatggagaacaacttcgtggacctgaccgaggacaccgaggagcccaagaagaccgacgtggccgagtgcggccccggcggcagctag

SEQ ID NO: 9666 - DNA, 1959 bp, synthetic construct; identical to SEQ ID NO: 9665
  misc_feature 1..1959: note = Description of Artificial Sequence: Synthetic coding sequence
  source 1..1959: mol_type = other DNA

SEQ ID NO: 9667 - DNA, 1980 bp, synthetic construct
  misc_feature 1..1980: note = Description of Artificial Sequence: Synthetic coding sequence
  source 1..1980: mol_type = other DNA
atggccgccgtgatcctggagagcatcttcctgaagagaagccagcagaagaagaagaccagccccctgaacttcaagaagagactgttcctgctgaccgtgcacaagctgagctactacgagtacgacttcgagagaggcagaagaggcagcaagaagggcagcatcgacgtggagaagatcacctgcgtggagaccgtggtgcccgagaagaaccccccccccgagagacagatccccagaagaggcgaggagagcagcgagatggagcagatcagcatcatcgagagattcccctaccccttccaggtggtgtacgacgagggccccctgtacgtgttcagccccaccgaggagctgagaaagagatggatccaccagctgaagaacgtgatcagatacaacagcgacctggtgcagaagtaccacccctgcttctggatcgacggccagtacctgtgctgcagccagaccgccaagaacgccatgggctgccagatcctggagaacagaaacggcagcctgaagcccggcagcagccacagaaagaccaagaagcccctgccccccacccccgaggaggaccagatcctgaagaagcccctgccccccgagcccgccgccgcccccgtgagcaccagcgagctgaagaaggtggtggccctgtacgactacatgcccatgaacgccaacgacctgcagctgagaaagggcgacgagtacttcatcctggaggagagcaacctgccctggtggagagccagagacaagaacggccaggagggctacatccccagcaactacgtgaccgaggccgaggacagcatcgagatgtacgagtggtacagcaagcacatgaccagaagccaggccgagcagctgctgaagcaggagggcaaggagggcggcttcatcgtgagagacagcagcaaggccggcaagtacaccgtgagcgtgttcgccaagagcaccggcgacccccagggcgtgatcagacactacgtggtgtgcagcaccccccagagccagtactacctggccgagaagcacctgttcagcaccatccccgagctgatcaactaccaccagcacaacagcgccggcctgatcagcagactgaagtaccccgtgagccagcagaacaagaacgcccccagcaccgccggcctgggctacggcagctgggagatcgaccccaaggacctgaccttcctgaaggagctgggcaccggccagttcggcgtggtgaagtacggcaagtggagaggccagtacgacgtggccatcaagatgatcaaggagggcagcatgagcgaggacgagttcatcgaggaggccaaggtgatgatgaacctgagccacgagaagctggtgcagctgtacggcgtgtgcaccaagcagagacccatcttcatcatcaccgagtacatggccaacggctgcctgctgaactacctgagagagatgagacacagattccagacccagcagctgctggagatgtgcaaggacgtgtgcgaggccatggagtacctggagagcaagcagttcctgcacagagacctggccgccagaaactgcctggtgaacgaccagggcgtggtgaaggtgagcgacttcggcctgagcagatacgtgctggacgacgagtacaccagcagcgtgggcagcaagttccccgtgagatggagcccccccgaggtgctgatgtacagcaagttcagcagcaagagcgacatctgggccttcggcgtgctgatgtgggagatctacagcctgggcaagatgccctacgagagattcaccaacagcgagaccgccgagcacatcgcccagggcctgagactgtacagaccccacctggccagcgagaaggtgtacaccatcatgtacagctgctggcacgagaaggccgacgagagacccaccttcaagatcctgctgagcaacatcctggacgtgatggacgaggagagctag

SEQ ID NO: 9668 - DNA, 627 bp, synthetic construct
  misc_feature 1..627: note = Description of Artificial Sequence: Synthetic coding sequence
  source 1..627: mol_type = other DNA
gtgatcagacactacgtggtgtgcagcaccccccagagccagtactacctggccgagaagcacctgttcagcaccatccccgagctgatcaactaccaccagcacaacagcgccggcctgatcagcagaacccagcagctgctggagatgtgcaaggacgtgtgcgaggccatggagtacctggagagcaagcagttcctgcacagagacctggccgccagaaactgcctggtgaacgaccagggcgtggtgaaggtgagcgacttcggcctgagcagatacgtgctggacgacgagtacaccagcagcgtgggcagcaagttccccgtgagatggagcccccccgaggtgctgatgtacagcaagttcagcagcaagagcgacatctgggccttcggcgtgctgatgtgggagatctacagcctgggcaagatgccctacgagagattcaccaacagcgagaccgccgagcacatcgcccagggcctgagactgtacagaccccacctggccagcgagaaggtgtacaccatcatgtacagctgctggcacgagaaggccgacgagagacccaccttcaagatcctgctgagcaacatcctggacgtgatggacgaggagagctag

SEQ ID NO: 9669 - DNA, 420 bp, synthetic construct
  misc_feature 1..420: note = Description of Artificial Sequence: Synthetic coding sequence
  source 1..420: mol_type = other DNA
gtgatcagacactacgtggtgtgcagcaccccccagagccagtactacctggccgagaagcacctgttcagcaccatccccgagctgatcaactaccaccagcacaacagcgccggcctgatcagcagactgaagtaccccgtgagccagcagaacaagaacgcccccagcaccgccggcctgggctacggcgtgctgatgtgggagatctacagcctgggcaagatgccctacgagagattcaccaacagcgagaccgccgagcacatcgcccagggcctgagactgtacagaccccacctggccagcgagaaggtgtacaccatcatgtacagctgctggcacgagaaggccgacgagagacccaccttcaagatcctgctgagcaacatcctggacgtgatggacgaggagagctag

SEQ ID NO: 9670 - DNA, 705 bp, synthetic construct
  misc_feature 1..705: note = Description of Artificial Sequence: Synthetic coding sequence
  source 1..705: mol_type = other DNA
agacactacgtggtgtgcagcaccccccagagccagtactacctggccgagaagcacctgttcagcaccatccccgagctgatcaactaccaccagcacaacagcgccggcctgatcagcagactgaagtaccccgtgagccagcagaacaagaacgcccccagcaccgccggcctgggctacggcagctgggagatcgaccccaaggacctgaccttcctgaaggagctgggcaccggccagttcggcgtggtgaagtacggcaagtggagaggccagtacgacgtggccatcaagatgatcaaggagggcagcatgagcgaggacgagttcatcgaggaggccaaggtgatgatgtacgtgctggacgacgagtacaccagcagcgtgggcagcaagttccccgtgagatggagcccccccgaggtgctgatgtacagcaagttcagcagcaagagcgacatctgggccttcggcgtgctgatgtgggagatctacagcctgggcaagatgccctacgagagattcaccaacagcgagaccgccgagcacatcgcccagggcctgagactgtacagaccccacctggccagcgagaaggtgtacaccatcatgtacagctgctggcacgagaaggccgacgagagacccaccttcaagatcctgctgagcaacatcctggacgtgatggacgaggagagctag

SEQ ID NO: 9671 - DNA, 225 bp, synthetic construct
  misc_feature 1..225: note = Description of Artificial Sequence: Synthetic coding sequence
  source 1..225: mol_type = other DNA
gtgatcagacactacgtggtgtgcagcaccccccagagccagtactacctggccgagaagcacctgttcagcaccatccccgagctgatcaactaccaccagcacaacagcgccggcctgatcagcagactgaagtaccccgtgagccagcagaacaagaacgcccccagcaccgccggcctgggctacggcatgagctggatgatgaacacccaggcccagtag

SEQ ID NO: 9672 - DNA, 1452 bp, synthetic construct
  misc_feature 1..1452: note = Description of Artificial Sequence: Synthetic coding sequence
  source 1..1452: mol_type = other DNA
atggccgccgtgatcctggagagcatcttcctgaagagaagccagcagaagaagaagaccagccccctgaacttcaagaagagactgttcctgctgaccgtgcacaagctgagctactacgagtacgacttcgagagaggcagaagaggcagcaagaagggcagcatcgacgtggagaagatcacctgcgtggagaccgtggtgcccgagaagaaccccccccccgagagacagatccccagaagaggcgaggagagcagcgagatggagcagatcagcatcatcgagagattcccctaccccttccaggtggtgtacgacgagggccccctgtacgtgttcagccccaccgaggagctgagaaagagatggatccaccagctgaagaacgtgatcagatacaacagcgacctggtgcagaagtaccacccctgcttctggatcgacggccagtacctgtgctgcagccagaccgccaagaacgccatgggctgccagatcctggagaacagaaacggcagcctgaagcccggcagcagccacagaaagaccaagaagcccctgccccccacccccgaggaggaccagatcctgaagaagcccctgccccccgagcccgccgccgcccccgtgagcaccagcgagctgaagaaggtggtggccctgtacgactacatgcccatgaacgccaacgacctgcagctgagaaagggcgacgagtacttcatcctggaggagagcaacctgccctggtggagagccagagacaagaacggccaggagggctacatccccagcaactacgtgaccgaggccgaggacagcatcgagatgtacgagtggtacagcaagcacatgaccagaagccaggccgagcagctgctgaagcaggagggcaaggagggcggcttcatcgtgagagacagcagcaaggccggcaagtacaccgtgagcgtgttcgccaagagcaccggcgacccccagggcgtgatcagacactacgtggtgtgcagcaccccccagagccagtactacctggccgccagaaactgcctggtgaacgaccagggcgtggtgaaggtgagcgacttcggcctgagcagatacgtgctggacgacgagtacaccagcagcgtgggcagcaagttccccgtgagatggagcccccccgaggtgctgatgtacagcaagttcagcagcaagagcgacatctgggccttcggcgtgctgatgtgggagatctacagcctgggcaagatgccctacgagagattcaccaacagcgagaccgccgagcacatcgcccagggcctgagactgtacagaccccacctggccagcgagaaggtgtacaccatcatgtacagctgctggcacgagaaggccgacgagagacccaccttcaagatcctgctgagcaacatcctggacgtgatggacgaggagagctag

SEQ ID NO: 9673 - DNA, 519 bp, synthetic construct
  misc_feature 1..519: note = Description of Artificial Sequence: Synthetic coding sequence
  source 1..519: mol_type = other DNA
gtgatcagacactacgtggtgtgcagcaccccccagagccagtactacctggccgagaagcacctgttcagcaccatccccgagctgatcaactaccaccagcacaacagcgccggcctgatcagcagactgaagtaccccgtgagccagcagaacaagaacgcccccagcaccgccggcctgggctacggcagctgggagatcgaccccaaggacctgaccttcctgaaggagctgggcaccggccagttcggcgtggtgaagtacggcaagtggagaggccagtacgacgtggccatcaagatgatcaaggagggcagcatgagcgaggacgagttcatcgaggaggccaaggtgatgatgaacctgagccacgagaagctggtgcagctgtacggcgtgtgcaccaagcagagacccatcttcatcatcaccgagtacatggccaacggctgcctgccctgcaccgtggccggcatgagaaagcagatgagcgtgcccctgagcaagttcttctag

SEQ ID NO: 9674 - DNA, 594 bp, synthetic construct
  misc_feature 1..594: note = Description of Artificial Sequence: Synthetic coding sequence
  source 1..594: mol_type = other DNA
gtgatcagacactacgtggtgtgcagcaccccccagagccagtactacctggccgagaagcacctgttcagcaccatccccgagctgatcaactaccaccagcacaacagcgccggcctgatcagcagactgaagtaccccgtgagccagcagaacaagaacgcccccagcaccgccggcctgggctacggcagctgggagatcgaccccaaggacctgaccttcctgaaggagctgggcaccggccagttcggcgtggtgaagtacggcaagtggagaggccagtacgacgtggccatcaagatgatcaaggagggcagcatgagcgaggacgagttcatcgaggaggccaaggtgatgatgaacctgagccacgagaagctggtgcagctgtacggcgtgtgcaccaagcagagacccatcttcatcatcaccgagtacatggccaacggctgcctgctgaactacctgagagagatgagacacagattccagacccagcagctgctggagatgtgcaaggacgtgtgcgaggccatggagtacctggagagcaagcagttcctgcacagagacctggtgtgccccggctag

SEQ ID NO: 9675 - DNA, 156 bp, synthetic construct
  misc_feature 1..156: note = Description of Artificial Sequence: Synthetic coding sequence
  source 1..156: mol_type = other DNA
atcagacactacgtggtgtgcagcaccccccagagccagtactacctggccgagaagcacctgttcagcaccatccccgagctgatcaactaccaccagcacaacagcgccggcgaggacagcgccgccgccagagacgtgcagggctgcctgtag

SEQ ID NO: 9676 - DNA, 891 bp, synthetic construct
  misc_feature 1..891: note = Description of Artificial Sequence: Synthetic coding sequence
  source 1..891: mol_type = other DNA
atgaagaacgagatcgccgccgtggtgttcttcttcaccagactggtgagaaagcacgacaagctgaagaaggaggccgtggagagattcgccgagaagctgaccctgatcctgcaggagaagtacaagaaccactggtaccccgagaagcccagcaagggccaggcctacagatgcatcagagtgaacaagttccagagagtggaccccgacgtgctgaaggcctgcgagaacagctgcatcctgtacagcgacctgggcctgcccaaggagctgaccctgtgggtggacccctgcgaggtgtgctgcagaagagacggcgtgagcccctgctggcccgactgcagccagacccccgacctggtgatcagacccccctggccccccaaggccctggactacagaagagagcccctgagacccgccagcagcttcctgatcatgtacggcgagaagaacaacgccttcatcgtggccagcttcgagaacaaggacgagaacaaggacgagatcagcagaaaggtgaccagagccctggacaaggtgaccagcgactaccacagcggcagcagcagcagcgacgaggagaccagcaaggagatggaggtgaagcccagcagcgtgaccgccgccgccagccccgtgtaccagatcagcgagctgatcttcccccccctgcccatgtggcaccccctgcccagaaagaagcccggcatgtacagaggcaacggccaccagaaccactaccccccccccgtgcccttcggctaccccaaccagggcagaaagaacaagccctacagacccatccccgtgacctgggtgcccccccccggcatgcactgcgacagaaaccactggatcaacccccacatgctggccccccactag

SEQ ID NO: 9677 - DNA, 759 bp, synthetic construct
  misc_feature 1..759: note = Description of Artificial Sequence: Synthetic coding sequence
  source 1..759: mol_type = other DNA
atgaagaacgagatcgccgccgtggtgttcttcttcaccagactggtgagaaagcacgacaagctgaagaaggaggccgtggagagattcgccgagaagctgaccctgatcctgcaggagaagtacaagaaccactggtaccccgagaagcccagcaagggccaggcctacagatgcatcagagtgaacaagttccagagagtggaccccgacgtgctgaaggcctgcgagaacagctgcatcctgtacagcgacctgggcctgcccaaggagctgaccctgtgggtggacccctgcgaggtgtgctgcagatacggcgagaagaacaacgccttcatcgtggccagcttcgagaacaaggacgagaacaaggacgagatcagcagaaaggtgaccagagccctggacaaggtgaccagcgactaccacagcggcagcagcagcagcgacgaggagaccagcaaggagatggaggtgaagcccagcagcgtgaccgccgccgccagccccgtgtaccagatcagcgagctgatcttcccccccctgcccatgtggcaccccctgcccagaaagaagcccggcatgtacagaggcaacggccaccagaaccactaccccccccccgtgcccttcggctaccccaaccagggcagaaagaacaagccctacagacccatccccgtgacctgggtgcccccccccggcatgcactgcgacagaaaccactggatcaacccccacatgctggccccccactag

SEQ ID NO: 9678 - DNA, 141 bp, synthetic construct
  misc_feature 1..141: note = Description of Artificial Sequence: Synthetic coding sequence
  source 1..141: mol_type = other DNA
atgaagaacgagatcgccgccgtggtgttcttcttcaccagactggtgagaaagcacgacaagctgaagaaggaggccgtggagagattcgccgagaagctgaccctgatcctgcaggagaagtacaagaaccactggtag

SEQ ID NO: 9679 - DNA, 1560 bp, synthetic construct
  misc_feature 1..1560: note = Description of Artificial Sequence: Synthetic coding sequence
  source 1..1560: mol_type = other DNA
atgatgagcgagcacgacctggccgacgtggtgcagatcgccgtggaggacctgagccccgaccaccccgtggtgctggagaaccacgtggtgaccgacgaggacgagcccgccctgaagagacagagactggagatcaactgccaggaccccagcatcaagaccatctgcctgagactggacagcatcgaggccaagctgcaggccctggaggccacctgcaagagcctggaggagaagctggacctggtgaccaacaagcagcacagccccatccaggtgcccatggtggccggcagccccctgggcgccacccagacctgcaacaaggtgagatgcgtggtgccccagaccaccgtgatcctgaacaacgacagacagaacgccatcgtggccaagatggaggaccccctgagcaacagagcccccgacagcctggagaacgtgatcagcaacgccgtgcccggcagaagacagaacaccatcgtggtgaaggtgcccggccaggaggacagccaccacgaggacggcgagagcggcagcgaggccagcgacagcgtgagcagctgcggccaggccggcagccagagcatcggcagcaacgtgaccctgatcaccctgaacagcgaggaggactaccccaacggcacctggctgggcgacgagaacaaccccgagatgagagtgagatgcgccatcatccccagcgacatgctgcacatcagcaccaactgcagaaccgccgagaagatggccctgaccctgctggactacctgttccacagagaggtgcaggccgtgagcaacctgagcggccagggcaagcacggcaagaagcagctggaccccctgaccatctacggcatcagatgccacctgttctacaagttcggcatcaccgagagcgactggtacagaatcaagcagagcatcgacagcaagtgcagaaccgcctggagaagaaagcagagaggccagagcctggccgtgaagagcttcagcagaagaacccccaacagcagcagctactgccccagcgagcccatgatgagcacccccccccccgccagcgagctgccccagccccagccccagccccaggccctgcactacgccctggccaacgcccagcaggtgcagatccaccagatcggcgaggacggccaggtgcaggtgggccacctgcacatcgcccaggtgccccagggcgagcaggtgcagatcacccaggacagcgagggcaacctgcagatccaccacgtgggccaggacggccagctgctggaggccaccagaatcccctgcctgctggcccccagcgtgttcaaggccagcagcggccaggtgctgcagggcgcccagctgatcgccgtggccagcagcgaccccgccgccgccggcgtggacggcagccccctgcagggcagcgacatccaggtgcagtacgtgcagctggcccccgtgagcgaccacaccgccggcgcccagaccgccgaggccctgcagcccaccctgcagcccgagatgcagctggagcacggcgccatccagatccagtag

SEQ ID NO: 9680 - DNA, 1398 bp, synthetic construct
  misc_feature 1..1398: note = Description of Artificial Sequence: Synthetic coding sequence
  source 1..1398: mol_type = other DNA
atgatgagcgagcacgacctggccgacgtggtgcagatcgccgtggaggacctgagccccgaccaccccgtggtgctggagaaccacgtggtgaccgacgaggacgagcccgccctgaagagacagagactggagatcaactgccaggaccccagcatcaagagcttcctgtacagcatcaaccagaccatctgcctgagactggacagcatcgaggccaagctgcaggccctggaggccacctgcaagagcctggaggagaagctggacctggtgaccaacaagcagcacagccccatccaggtgcccatggtggccggcagccccctgggcgccacccagacctgcaacgccgtgcccggcagaagacagaacaccatcgtggtgaaggtgcccggccaggaggacagccaccacgaggacggcgagagcggcagcgaggccagcgacagcgtgagcagctgcggccaggccggcagccagagcatcggcagcaacgtgaccctgatcaccctgaacagcgaggaggactaccccaacggcacctggctgggcgacgagaacaaccccgagatgagagtgagatgcgccatcatccccagcgacatgctgcacatcagcaccaactgcagaaccgccgagaagatggccctgaccctgctggactacctgttccacagagaggtgcaggccgtgagcaacctgagcggccagggcaagcacggcaagaagcagctggaccccctgaccatctacggcatcagatgccacctgttctacaagttcggcatcaccgagagcgactggtacagaatcaagcagagcatcgacagcaagtgcagaaccgcctggagaagaaagcagagaggccagagcctggccgtgaagagcttcagcagaagaacccccaacagcagcagctactgccccagcgagcccatgatgagcacccccccccccgccagcgagctgccccagccccagccccagccccaggccctgcactacgccctggccaacgcccagcaggtgcagatccaccagatcggcgaggacggccaggtgcaggtgatcccccagggccacctgcacatcgcccaggtgccccagggcgagcaggtgcagatcacccaggacagcgagggcaacctgcagatccaccacgtgggccaggacggccaggtgctgcagggcgcccagctgatcgccgtggccagcagcgaccccgccgccgccggcgtggacggcagccccctgcagggcagcgacatccaggtgcagtacgtgcagctggcccccgtgagcgaccacaccgccggcgcccagaccgccgaggccctgcagcccaccctgcagcccgagatgcagctggagcacggcgccatccagatccagtag

SEQ ID NO: 9681 - DNA, 1410 bp, synthetic construct
  misc_feature 1..1410: note = Description of Artificial Sequence: Synthetic coding sequence
  source 1..1410: mol_type = other DNA
atgatgagcgagcacgacctggccgacgtggtgcagatcgccgtggaggacctgagccccgaccaccccgtggtgctggagaaccacgtggtgaccgacgaggacgagcccgccctgaagagacagagactggagatcaactgccaggaccccagcatcaagagcttcctgtacagcatcaaccagaccatctgcctgagactggacagcatcgaggccaagctgcaggccctggaggccacctgcaagagcctggaggagaagctggacctggtgaccaacaagcagcacagccccatccaggtgcccatggtggccggcagccccctgggcgccacccagacctgcaacaaggtgagatgcgccgtgcccggcagaagacagaacaccatcgtggtgaaggtgcccggccaggaggacagccaccacgaggacggcgagagcggcagcgaggccagcgacagcgtgagcagctgcggccaggccggcagccagagcatcggcagcaacgtgaccctgatcaccctgaacagcgaggaggactaccccaacggcacctggctgggcgacgagaacaaccccgagatgagagtgagatgcgccatcatccccagcgacatgctgcacatcagcaccaactgcagaaccgccgagaagatggccctgaccctgctggactacctgttccacagagaggtgcaggccgtgagcaacctgagcggccagggcaagcacggcaagaagcagctggaccccctgaccatctacggcatcagatgccacctgttctacaagttcggcatcaccgagagcgactggtacagaatcaagcagagcatcgacagcaagtgcagaaccgcctggagaagaaagcagagaggccagagcctggccgtgaagagcttcagcagaagaacccccaacagcagcagctactgccccagcgagcccatgatgagcacccccccccccgccagcgagctgccccagccccagccccagccccaggccctgcactacgccctggccaacgcccagcaggtgcagatccaccagatcggcgaggacggccaggtgcaggtgatcccccagggccacctgcacatcgcccaggtgccccagggcgagcaggtgcagatcacccaggacagcgagggcaacctgcagatccaccacgtgggccaggacggccaggtgctgcagggcgcccagctgatcgccgtggccagcagcgaccccgccgccgccggcgtggacggcagccccctgcagggcagcgacatccaggtgcagtacgtgcagctggcccccgtgagcgaccacaccgccggcgcccagaccgccgaggccctgcagcccaccctgcagcccgagatgcagctggagcacggcgccatccagatccagtag

SEQ ID NO: 9682 - DNA, 1494 bp, synthetic construct
  misc_feature 1..1494: note = Description of Artificial Sequence: Synthetic coding sequence
  source 1..1494: mol_type = other DNA
atgatgagcgagcacgacctggccgacgtggtgcagatcgccgtggaggacctgagccccgaccaccccggcaccgagctgtgggacatcgtgctggagaaccacgtggtgaccgacgaggacgagcccgccctgaagagacagagactggagatcaactgccaggaccccagcatcaagagcttcctgtacagcatcaaccagaccatctgcctgagactggacagcatcgaggccaagctgcaggccctggaggccacctgcaagagcctggaggagaagctggacctggtgaccaacaagcagcacagccccatccaggtgcccatggtggccggcagccccctgggcgccacccagacctgcaacaaggtgagatgcgccgtgcccggcagaagacagaacaccatcgtggtgaaggtgcccggccaggaggacagccaccacgaggacggcgagagcggcagcgaggccagcgacagcgtgagcagctgcggccaggccggcagccagagcatcggcagcaacgtgaccctgatcaccctgaacagcgaggaggactaccccaacggcacctggctgggcgacgagaacaaccccgagatgagagtgagatgcgccatcatccccagcgacatgctgcacatcagcaccaactgcagaaccgccgagaagatggccctgaccctgctggactacctgttccacagagaggtgcaggccgtgagcaacctgagcggccagggcaagcacggcaagaagcagctggaccccctgaccatctacggcatcagatgccacctgttctacaagttcggcatcaccgagagcgactggtacagaatcaagcagagcatcgacagcaagtgcagaaccgcctggagaagaaagcagagaggccagagcctggccgtgaagagcttcagcagaagaacccccaacagcagcagctactgccccagcgagcccatgatgagcacccccccccccgccagcgagctgccccagccccagccccagccccaggccctgcactacgccctggccaacgcccagcaggtgcagatccaccagatcggcgaggacggccaggtgcaggtgatcccccagggccacctgcacatcgcccaggtgccccagggcgagcaggtgcagatcacccaggacagcgagggcaacctgcagatccaccacgtgggccaggacggccagctgctggaggccaccagaatcccctgcctgctggcccccagcgtgttcaaggccagcagcggccaggtgctgcagggcgcccagctgatcgccgtggccagcagcgaccccgccgccgccggcgtggacggcagccccctgcagggcagcgacatccaggtgcagtacgtgcagctggcccccgtgagcgaccacaccgccggcgcccagaccgccgaggccctgcagcccaccctgcagcccgagatgcagctggagcacggcgccatccagatccagtag

SEQ ID NO: 9683 - DNA, 1560 bp, synthetic construct; identical to SEQ ID NO: 9679
  misc_feature 1..1560: note = Description of Artificial Sequence: Synthetic coding sequence
  source 1..1560: mol_type = other DNA

SEQ ID NO: 9684 - DNA, 1476 bp, synthetic construct
  misc_feature 1..1476: note = Description of Artificial Sequence: Synthetic coding sequence
  source 1..1476: mol_type = other DNA
atgatgagcgagcacgacctggccgacgtggtgcagatcgccgtggaggacctgagccccgaccaccccgtggtgctggagaaccacgtggtgaccgacgaggacgagcccgccctgaagagacagagactggagatcaactgccaggaccccagcatcaagagcttcctgtacagcatcaaccagaccatctgcctgagactggacagcatcgaggccaagctgcaggccctggaggccacctgcaagagcctggaggagaagctggacctggtgaccaacaagcagcacagccccatccaggtgcccatggtggccggcagccccctgggcgccacccagacctgcaacaaggtgagatgcgccgtgcccggcagaagacagaacaccatcgtggtgaaggtgcccggccaggaggacagccaccacgaggacggcgagagcggcagcgaggccagcgacagcgtgagcagctgcggccaggccggcagccagagcatcggcagcaacgtgaccctgatcaccctgaacagcgaggaggactaccccaacggcacctggctgggcgacgagaacaaccccgagatgagagtgagatgcgccatcatccccagcgacatgctgcacatcagcaccaactgcagaaccgccgagaagatggccctgaccctgctggactacctgttccacagagaggtgcaggccgtgagcaacctgagcggccagggcaagcacggcaagaagcagctggaccccctgaccatctacggcatcagatgccacctgttctacaagttcggcatcaccgagagcgactggtacagaatcaagcagagcatcgacagcaagtgcagaaccgcctggagaagaaagcagagaggccagagcctggccgtgaagagcttcagcagaagaacccccaacagcagcagctactgccccagcgagcccatgatgagcacccccccccccgccagcgagctgccccagccccagccccagccccaggccctgcactacgccctggccaacgcccagcaggtgcagatccaccagatcggcgaggacggccaggtgcaggtgatcccccagggccacctgcacatcgcccaggtgccccagggcgagcaggtgcagatcacccaggacagcgagggcaacctgcagatccaccacgtgggccaggacggccagctgctggaggccaccagaatcccctgcctgctggcccccagcgtgttcaaggccagcagcggccaggtgctgcagggcgcccagctgatcgccgtggccagcagcgaccccgccgccgccggcgtggacggcagccccctgcagggcagcgacatccaggtgcagtacgtgcagctggcccccgtgagcgaccacaccgccggcgcccagaccgccgaggccctgcagcccaccctgcagcccgagatgcagctggagcacggcgccatccagatccagtag

SEQ ID NO: 9685 - DNA, 357 bp, synthetic construct
  misc_feature 1..357: note = Description of Artificial Sequence: Synthetic coding sequence
  source 1..357: mol_type = other DNA
atgatgagcgagcacgacctggccgacgtggtgcagatcgccgtggaggacctgagccccgaccaccccgtggtgctggagaaccacgtggtgaccgacgaggacgagcccgccctgaagagacagagactggagatcaactgccaggaccccagcatcaagagcttcctgtacagcatcaaccagaccatctgcctgagactggacagcatcgaggccaagctgcaggccctggaggccacctgcaagagcctggaggagaagctggacctggtgaccaacaagcagcacagccccatccaggtgcccatggtggccggcagccccctgggcgccacccagacctgcaacaagtag

SEQ ID NO: 9686 - DNA, 87 bp, synthetic construct
  misc_feature 1..87: note = Description of Artificial Sequence: Synthetic coding sequence
  source 1..87: mol_type = other DNA
atgatgagcgagcacgacctggccgacgtggtgcagatcgccgtggaggacctgagccccgaccaccccgtggtgctggagaactag

SEQ ID NO: 9687 - DNA, 288 bp, synthetic construct
  misc_feature 1..288: note = Description of Artificial Sequence: Synthetic coding sequence
  source 1..288: mol_type = other DNA
atgatgagcgagcacgacctggccgacgtggtgcagatcgccgtggaggacctgagccccgaccaccccgtggtgctggagaaccacgtggtgaccgacgaggacgagcccgccctgaagagacagagactggagatcaactgccaggaccccagcatcaagagcttcctgtacagcatcaaccagaccatctgcctgagactggacagcatcgaggccaagctgcaggccctggaggccacctgcaagagcctggaggagaagctggacctggtgaccaacaagtag

SEQ ID NO: 9688 - DNA, 372 bp, synthetic construct
  misc_feature 1..372: note = Description of Artificial Sequence: Synthetic coding sequence
  source 1..372: mol_type = other DNA
atgatgagcgagcacgacctggccgacgtggtgcagatcgccgtggaggacctgagccccgaccaccccgtggtgctggagaaccacgtggtgaccgacgaggacgagcccgccctgaagagacagagactggagatcaactgccaggaccccagcatcaagagcttcctgtacagcatcaaccagaccatctgcctgagactggacagcatcgaggccaagctgcaggccctggaggccacctgcaagagcctggaggagaagctggacctggtgaccaacaagcagcacagccccatccaggtgcccatggtggccggcagccccctgggcgccacccagacctgcaacaaggtgagatgcgtggtgtag

SEQ ID NO: 9689 - DNA, 588 bp, synthetic construct
  misc_feature 1..588: note = Description of Artificial Sequence: Synthetic coding sequence
  source 1..588: mol_type = other DNA
atgatgagcgagcacgacctggccgacgtggtgcagatcgccgtggaggacctgagccccgaccaccccggcaccgagctgtgggacatcgtgctggagaaccacgtggtgaccgacgaggacgagcccgccctgaagagacagagactggagatcaactgccaggaccccagcatcaagagcttcctgtacagcatcaaccagaccatctgcctgagactggacagcatcgaggccaagctgcaggccctggaggccacctgcaagagcctggaggagaagctggacctggtgaccaacaagcagcacagccccatccaggtgcccatggtggccggcagccccctgggcgccacccagacctgcaacaaggtgagatgcgccgtgcccggcagaagacagaacaccatcgtggtgaaggtgcccggccaggaggacagccaccacgaggacggcgagagcggcagcgaggccagcgacagcgtgagcagctgcggccaggccggcagccagagcatcggcagcaacgtgaccctgatcaccctgaacagcgaggaggactaccccaacggcacctggctgggctag

SEQ ID NO: 9690 - DNA, 360 bp, synthetic construct
  misc_feature 1..360: note = Description of Artificial Sequence: Synthetic coding sequence
  source 1..360: mol_type = other DNA
atgatgagcgagcacgacctggccgacgtggtgcagatcgccgtggaggacctgagccccgaccaccccgtggtgctggagaaccacgtggtgaccgacgaggacgagcccgccctgaagagacagagactggagatcaactgccaggaccccagcatcaagagcttcctgtacagcatcaaccagaccatctgcctgagactggacagcatcgaggccaagctgcaggccctggaggccacctgcaagagcctggaggagaagctggacctggtgaccaacaagcagcacagccccatccaggtgcccatggtggccggcagccccctgggcgccacccagacctgcaacaaggtgtag

SEQ ID NO: 9691 - DNA, 1401 bp, synthetic construct
  misc_feature 1..1401: note = Description of Artificial Sequence: Synthetic coding sequence
  source 1..1401: mol_type = other DNA
atgatgagcgagcacgacctggccgacgtggtgcagatcgccgtggaggacctgagccccgaccaccccgtggtgctggagaaccacgtggtgaccgacgaggacgagcccgccctgaagagacagagactggagatcaactgccaggaccccagcatcaagagcttcctgtacagcatcaaccagaccatctgcctgagactggacagcatcgaggccaagctgcaggccctggaggccacctgcaagagcctggaggagaagctggacctggtgaccaacaagcagcacagccccatccaggtgcccatggtggccggcagccccctgggcgccacccagacctgcaacaaggtgagatgcgccgtgcccggcagaagacagaacaccatcgtggtgaaggtgcccggccaggaggacagccaccacgaggacggcgagagcggcagcgaggccagcgacagcgtgagcagctgcggccaggccggcagccagagcatcggcagcaacgtgaccctgatcaccctgaacagcgaggaggactaccccaacggcacctggctgggcgacgagaacaaccccgagatgagagtgagatgcgccatcatccccagcgacatgctgcacatcagcaccaactgcagaaccgccgagaagatggccctgaccctgctggactacctgttccacagagaggtgcaggccgtgagcaacctgagcggccagggcaagcacggcaagaagcagctggaccccctgaccatctacggcatcagatgccacctgttctacaagttcggcatcaccgagagcgactggtacagaatcaagcagagcatcgacagcaagtgcagaaccgcctggagaagaaagcagagaggccagagcctggccgtgaagagcttcagcagaagaacccccaacagcagcagctactgccccagcgagcccatgatgagcacccccccccccgccagcgagctgccccagccccagccccagccccaggccctgcactacgccctggccaacgcccagcaggtgcagatccaccagatcggcgaggacggccaggtgcaggtgggccacctgcacatcgcccaggtgccccagggcgagcaggtgcagatcacccaggacagcgagggcaacctgcagatccaccacgtgggccaggacggccaggtgctgcagggcgcccagctgatcgccgtggccagcagcgaccccgccgccgccggcgtggacggcagccccctgcagggcagcgacatccaggtgcagtacgtgcagctggcccccgtgagcgaccacaccgccggcgcccagaccgccgaggccctgcagcccaccctgcagcccgagatgcagctggagcacggcgccatccagatccagtag

SEQ ID NO: 9692 - DNA, 753 bp, synthetic construct
  misc_feature 1..753: note = Description of Artificial Sequence: Synthetic coding sequence
  source 1..753: mol_type = other DNA
atgggcagccccgagcccacccagggccccagactgagccccatcctgatcccctacagcggcagaagatacaaggtgggcagagccagcggcgccctgtgccaccaggacagcctgccccccatcctggagctgggcctgaccttcctgagagccagcgccggcttcagcgtgcccaccagcagcagcttcgccctgcccgagcccctgagaagcctgtgcctgggcaacggcgagggcctgggcctgagcctgaccctgaccgtgctggcctggatcctgggcctgagcggcaccctgggcgccctggtgctgttcatggtggccaccggcatcttccaggaggccctgtggcacctgctgctgctgagcttcagcgtggaggccctgccctgcttcttcttcttccccttcttcctgctgtgcagatgcctgagagccgagctgcagatccagcagagactggacggcaccctgagcctggacctgatgagactggagagcgacggcgagaccggctgcgccgccgagagcagcgtgctgcagggcgcccagctgatcgccgtggccagcagcgaccccgccgccgccggcgtggacggcagccccctgcagggcagcgacatccaggtgcagtacgtgcagctggcccccgtgagcgaccacaccgccggcgcccagaccgccgaggccctgcagcccaccctgcagcccgagatgcagctggagcacggcgccatccagatccagtag

SEQ ID NO: 9693 - DNA, 1527 bp, synthetic construct
  misc_feature 1..1527: note = Description of Artificial Sequence: Synthetic coding sequence
  source 1..1527: mol_type = other DNA
atgatgagcgagcacgacctggccgacgtggtgcagatcgccgtggaggacctgagccccgaccaccccgtggtgctggagaaccacgtggtgaccgacgaggacgagcccgccctgaagagacagagactggagatcaactgccaggaccccagcatcaagagcttcctgtacagcatcaaccagaccatctgcctgagactggacagcatcgaggccaagctgcaggccctggaggccacctgcaagagcctggaggagaagctggacctggtgaccaacaagcagcacagccccatccaggtgcccatggtggccggcagccccctgggcgccacccagacctgcaacaaggtgagatgcgtggtgccccagaccaccgtgatcctgaacaacgacagacagaacgccatcgtggccaagatggaggaccccctgagcaacagagcccccgacagcctggagaacgtgatcagcaacgccgtgcccggcagaagacagaacaccatcgtggtgaaggtgcccggccaggaggacagccaccacgaggacggcgagagcggcagcgaggccagcgacagcgtgagcagctgcggccaggccggcagccagagcatcggcagcaacgtgaccctgatcaccctgaacagcgaggaggactaccccaacggcacctggctgggcgacgagaacaaccccgagatgagagtgagatgcgccatcatccccagcgacatgctgcacatcagcaccaactgcagaaccgccgagaagatggccctgaccctgctggactacctgttccacagagaggtgcaggccgtgagcaacctgagcggccagggcaagcacggcaagaagcagctggaccccctgaccatctacggcatcagatgccacctgttctacaagttcggcatcaccgagagcgactggtacagaatcaagcagagcatcgacagcaagtgcagaaccgcctggagaagaaagcagagaggccagagcctggccgtgaagagcttcagcagaagaacccccaacagcagcagctactgccccagcgagcccatgatgagcacccccccccccgccagcgagctgccccagccccagccccagccccaggccctgcactacgccctggccaacgcccagcaggtgcagatccaccagatcggcgaggacggccaggtgcaggtgatcccccagggccacctgcacatcgcccaggtgccccagggcgagcaggtgcagatcacccaggacagcgagggcaacctgcagatccaccacgtgggccaggacggccaggtgctgcagggcgcccagctgatcgccgtggccagcagcgaccccgccgccgccggcgtggacggcagccccctgcagggcagcgacatccaggtgcagtacgtgcagctggcccccgtgagcgaccacaccgccggcgcccagaccgccgaggccctgcagcccaccctgcagcccgagatgcagctggagcacggcgccatccagatccagtag

SEQ ID NO: 9694 - DNA, 1476 bp, synthetic construct; identical to SEQ ID NO: 9684
  misc_feature 1..1476: note = Description of Artificial Sequence: Synthetic coding sequence
  source 1..1476: mol_type = other DNA

SEQ ID NO: 9695 - DNA, 3153 bp, synthetic construct
  misc_feature 1..3153: note = Description of Artificial Sequence: Synthetic coding sequence
  source 1..3153: mol_type = other DNA
atggccgccgtgaagaaggagggcggcgccctgagcgaggccatgagcctggagggcgacgagtgggagctgagcaaggagaacgtgcagcccctgagacagggcagaatcatgagcaccctgcagggcgccctggcccaggagagcgcctgcaacaacaccctgcagcagcagaagagagccttcgagtacgagatcagattctacaccggcaacgaccccctggacgtgtgggacagatacatcagctggaccgagcagaactacccccagggcggcaaggagagcaacatgagcaccctgctggagagagccgtggaggccctgcagggcgagaagagatactacagcgaccccagattcctgaacctgtggctgaagctgggcagactgtgcaacgagcccctggacatgtacagctacctgcacaaccagggcatcggcgtgagcctggcccagttctacatcagctgggccgaggagtacgaggccagagagaacttcagaaaggccgacgccatcttccaggagggcatccagcagaaggccgagcccctggagagactgcagagccagcacagacagttccaggccagagtgagcagacagaccctgctggccctggagaaggaggaggaggaggaggtgttcgagagcagcgtgccccagagaagcaccctggccgagctgaagagcaagggcaagaagaccgccagagcccccatcatcagagtgggcggcgccctgaaggcccccagccagaacagaggcctgcagaaccccttcccccagcagatgcagaacaacagcagaatcaccgtgttcgacgagaacgccgacgaggccagcaccgccgagctgagcaagcccaccgtgcagccctggatcgccccccccatgcccagagccaaggagaacgagctgcaggccggcccctggaacaccggcagaagcctggagcacagacccagaggcaacaccgccagcctgatcgccgtgcccgccgtgctgcccagcttcaccccctacgtggaggagaccgccagacagcccgtgatgaccccctgcaagatcgagcccagcatcaaccacatcctgagcaccagaaagcccggcaaggaggagggcgaccccctgcagagagtgcagagccaccagcaggccagcgaggagaagaaggagaagatgatgtactgcaaggagaagatctacgccggcgtgggcgagttcagcttcgaggagatcagagccgaggtgttcagaaagaagctgaaggagcagagagaggccgagctgctgaccagcgccgagaagagagccgagatgcagaagcagatcgaggagatggagaagaagctgaaggagatccagaccacccagcaggagagaaccggcgaccagcaggaggagaccatgcccaccaaggagaccaccaagctgcagatcgccagcgagagccagaagatccccggcatgaccctgagcagcagcgtgtgccaggtgaactgctgcgccagagagaccagcctggccgagaacatctggcaggagcagccccacagcaagggccccagcgtgcccttcagcatcttcgacgagttcctgctgagcgagaagaagaacaagagcccccccgccgacccccccagagtgctggcccagagaagacccctggccgtgctgaagaccagcgagagcatcaccagcaacgaggacgtgagccccgacgtgtgcgacgagttcaccggcatcgagcccctgagcgaggacgccatcatcaccggcttcagaaacgtgaccatctgccccaaccccgaggacacctgcgacttcgccagagccgccagattcgtgagcacccccttccacgagatcatgagcctgaaggacctgcccagcgaccccgagagactgctgcccgaggaggacctggacgtgaagaccagcgaggaccagcagaccgcctgcggcaccatctacagccagaccctgagcatcaagaagctgagccccatcatcgaggacagcagagaggccacccacagcagcggcttcagcggcagcagcgccagcgtggccagcaccagcagcatcaagtgcctgcagatccccgagaagctggagctgaccaacgagaccagcgagaaccccacccagagcccctggtgcagccagtacagaagacagctgctgaagagcctgcccgagctgagcgccagcgccgagctgtgcatcgaggacagacccatgcccaagctggagatcgagaaggagatcgagctgggcaacgaggactactgcatcaagagagagtacctgatctgcgaggactacaagctgttctgggtggcccccagaaacagcgccgagctgaccgtgatcaaggtgagcagccagcccgtgccctgggacttctacatcaacctgaagctgaaggagagactgaacgaggacttcgaccacttctgcagctgctaccagtaccaggacggctgcatcgtgtggcaccagtacatcaactgcttcaccctgcaggacctgctgcagcacagcgagtacatcacccacgagatcaccgtgctgatcatctacaacctgctgaccatcgtggagatgctgcacaaggccgagatcgtgcacggcgacctgagccccagatgcctgatcctgagaaacagaatccacgacccctacgactgcaacaagaacaaccaggccctgaagatcgtggacttcagctacagcgtggacctgagagtgcagctggacgtgttcaccctgagcggcttcagaaccgtgcagatcctggagggccagaagatcctggccaactgcagcagcccctaccaggtggacctgttcggcatcgccgacctggcccacctgctgctgttcaaggagcacctgcaggtgttctgggacggcagcttctggaagctgagccagaacatcagcgagctgaaggacggcgagctgtggaacaagttcttcgtgagaatcctgaacgccaacgacgaggccaccgtgagcgtgctgggcgagctggccgccgagatgaacggcgtgttcgacaccaccttccagagccacctgaacaaggccctgtggaaggtgggcaagctgaccagccccggcgccctgctgttccagtag

SEQ ID NO: 9696 - DNA, 3195 bp, synthetic construct
  misc_feature 1..3195: note = Description of Artificial Sequence: Synthetic coding sequence
  source 1..3195: mol_type = other DNA
atggccgccgtgaagaaggagggcggcgccctgagcgaggccatgagcctggagggcgacgagtgggagctgagcaaggagaacgtgcagcccctgagacagggcagaatcatgagcaccctgcagggcgccctggcccaggagagcgcctgcaacaacaccctgcagcagcagaagagagccttcgagtacgagatcagattctacaccggcaacgaccccctggacgtgtgggacagatgggtgttcctgttccacaaggacaacagaaacatcaacagatacatcagctggaccgagcagaactacccccagggcggcaaggagagcaacatgagcaccctgctggagagagccgtggaggccctgcagggcgagaagagatactacagcgaccccagattcctgaacctgtggctgaagctgggcagactgtgcaacgagcccctggacatgtacagctacctgcacaaccagggcatcggcgtgagcctggcccagttctacatcagctgggccgaggagtacgaggccagagagaacttcagaaaggccgacgccatcttccaggagggcatccagcagaaggccgagcccctggagagactgcagagccagcacagacagttccaggccagagtgagcagacagaccctgctggccctggagaaggaggaggaggaggaggtgttcgagagcagcgtgccccagagaagcaccctggccgagctgaagagcaagggcaagaagaccgccagagcccccatcatcagagtgggcggcgccctgaaggcccccagccagaacagaggcctgcagaaccccttcccccagcagatgcagaacaacagcagaatcaccgtgttcgacgagaacgccgacgaggccagcaccgccgagctgagcaagcccaccgtgcagccctggatcgccccccccatgcccagagccaaggagaacgagctgcaggccggcccctggaacaccggcagaagcctggagcacagacccagaggcaacaccgccagcctgatcgccgtgcccgccgtgctgcccagcttcaccccctacgtggaggagaccgccagacagcccgtgatgaccccctgcaagatcgagcccagcatcaaccacatcctgagcaccagaaagcccggcaaggaggagggcgaccccctgcagagagtgcagagccaccagcaggccagcgaggagaagaaggagaagatgatgtactgcaaggagaagatctacgccggcgtgggcgagttcagcttcgaggagatcagagccgaggtgttcagaaagaagctgaaggagcagagagaggccgagctgctgaccagcgccgagaagagagccgagatgcagaagcagatcgaggagatggagaagaagctgaaggagatccagaccacccagcaggagagaaccggcgaccagcaggaggagaccatgcccaccaaggagaccaccaagctgcagatcgccagcgagagccagaagatccccggcatgaccctgagcagcagcgtgtgccaggtgaactgctgcgccagagagaccagcctggccgagaacatctggcaggagcagccccacagcaagggccccagcgtgcccttcagcatcttcgacgagttcctgctgagcgagaagaagaacaagagcccccccgccgacccccccagagtgctggcccagagaagacccctggccgtgctgaagaccagcgagagcatcaccagcaacgaggacgtgagccccgacgtgtgcgacgagttcaccggcatcgagcccctgagcgaggacgccatcatcaccggcttcagaaacgtgaccatctgccccaaccccgaggacacctgcgacttcgccagagccgccagattcgtgagcacccccttccacgagatcatgagcctgaaggacctgcccagcgaccccgagagactgctgcccgaggaggacctggacgtgaagaccagcgaggaccagcagaccgcctgcggcaccatctacagccagaccctgagcatcaagaagctgagccccatcatcgaggacagcagagaggccacccacagcagcggcttcagcggcagcagcgccagcgtggccagcaccagcagcatcaagtgcctgcagatccccgagaagctggagctgaccaacgagaccagcgagaaccccacccagagcccctggtgcagccagtacagaagacagctgctgaagagcctgcccgagctgagcgccagcgccgagctgtgcatcgaggacagacccatgcccaagctggagatcgagaaggagatcgagctgggcaacgaggactactgcatcaagagagagtacctgatctgcgaggactacaagctgttctgggtggcccccagaaacagcgccgagctgaccgtgatcaaggtgagcagccagcccgtgccctgggacttctacatcaacctgaagctgaaggagagactgaacgaggacttcgaccacttctgcagctgctaccagtaccaggacggctgcatcgtgtggcaccagtacatcaactgcttcaccctgcaggacctgctgcagcacagcgagtacatcacccacgagatcaccgtgctgatcatctacaacctgctgaccatcgtggagatgctgcacaaggccgagatcgtgcacggcgacctgagccccagatgcctgatcctgagaaacagaatccacgacccctacgactgcaacaagaacaaccaggccctgaagatcgtggacttcagctacagcgtggacctgagagtgcagctggacgtgttcaccctgagcggcttcagaaccgtgcagatcctggagggccagaagatcctggccaactgcagcagcccctaccaggtggacctgttcggcatcgccgacctggcccacctgctgctgttcaaggagcacctgcaggtgttctgggacggcagcttctggaagctgagccagaacatcagcgagctgaaggacggcgagctgtggaacaagttcttcgtgagaatcctgaacgccaacgacgaggccaccgtgagcgtgctgggcgagctggccgccgagatgaacggcgtgttcgacaccaccttccagagccacctgaacaaggccctgtggaaggtgggcaagctgaccagccccggcgccctgctgttccagtag

SEQ ID NO: 9697 - DNA, 2802 bp, synthetic construct
  misc_feature 1..2802: note = Description of Artificial Sequence: Synthetic coding sequence
  source 1..2802: mol_type = other DNA
atggccgccgtgaagaaggagggcggcgccctgagcgaggccatgagcctggagggcgacgagtgggagctgagcaaggagaacgtgcagcccctgagacagggcagaatcatgagcaccctgcagggcgccctggcccaggagagcgcctgcaacaacaccctgcagcagcagaagagagccttcgagtacgagatcagattctacaccggcaacgaccccctggacgtgtgggacagatacatcagctggaccgagcagaactacccccagggcggcaaggagagcaacatgagcaccctgctggagagagccgtggaggccctgcagggcgagaacttctggaaggccgacgccatcttccaggagggcatccagcagaaggccgagcccctggagagactgcagagccagcacagacagttccaggccagagtgagcagacagaccctgctggccctggagaaggaggaggaggaggaggtgttcgagagcagcgtgccccagagaagcaccctggccgagctgaagagcaagggcaagaagaccgccagagcccccatcatcagagtgggcggcgccctgaaggcccccagccagaacagaggcctgcagaaccccttcccccagcagatgcagaacaacagcagaatcaccgtgttcgacgagaacgccgacgaggccagcaccgccgagctgagcaagcccaccgtgcagccctggatcgccccccccatgcccagagccaaggagaacgagctgcaggccggcccctggaacaccggcagaagcctggagcacagacccagaggcaacaccgccagcctgatcgccgtgcccgccgtgctgcccagcttcaccccctacgtggaggagaccgccagacagcccgtgatgaccccctgcaagatcgagcccagcatcaaccacatcctgagcaccagaaagcccggcaaggaggagggcgaccccctgcagagagtgcagagccaccagcaggccagcgaggagaagaaggagaagatgatgtactgcaaggagaagatctacgccggcgtgggcgagttcagcttcgaggagatcagagccgaggtgttcagaaagaagctgaaggagcagagagaggccgagctgctgaccagcgccgagaagagagccgagatgcagaagcagatcgaggagatggagaagaagctgaaggagatccagaccacccagcaggagagaaccggcgaccagcaggaggagaccatgcccaccaaggagaccaccaagctgcagatcgccagcgagagccagaagatccccggcatgaccctgagcagcagcgtgtgccaggtgaactgctgcgccagagagaccagcctggccgagaacatctggcaggagcagccccacagcaaggtgagcctgagcctgggccccagcgtgcccttcagcatcttcgacgagttcctgctgagcgagaagaagaacaagagcccccccgccgacccccccagagtgctggcccagagaagacccctggccgtgctgaagaccagcgagagcatcaccagcaacgaggacgtgagccccgacgtgtgcgacgagttcaccggcatcgagcccctgagcgaggacgccatcatcaccggcttcagaaacgtgaccatctgccccaaccccgaggacaccagagaggccacccacagcagcggcttcagcggcagcagcgccagcgtggccagcaccagcagcatcaagtgcctgcagatccccgagaagctggagctgaccaacgagaccagcgagaaccccacccagagcccctggtgcagccagtacagaagacagctgctgaagagcctgcccgagctgagcgccagcgccgagctgtgcatcgaggacagacccatgcccaagctggagatcgagaaggagatcgagctgggcaacgaggactactgcatcaagagagagtacctgatctgcgaggactacaagctgttctgggtggcccccagaaacagcgccgagctgaccgtgatcaaggtgagcagccagcccgtgccctgggacttctacatcaacctgaagctgaaggagagactgaacgaggacttcgaccacttctgcagctgctaccagtaccaggacggctgcatcgtgtggcaccagtacatcaactgcttcaccctgcaggacctgctgcagcacagcgagtacatcacccacgagatcaccgtgctgatcatctacaacctgctgaccatcgtggagatgctgcacaaggccgagatcgtgcacggcgacctgagccccagatgcctgatcctgagaaacagaatccacgacccctacgactgcaacaagaacaaccaggccctgaagatcgtggacttcagctacagcgtggacctgagagtgcagctggacgtgttcaccctgagcggcttcagaaccgtgcagatcctggagggccagaagatcctggccaactgcagcagcccctaccaggtggacctgttcggcatcgccgacctggcccacctgctgctgttcaaggagcacctgcaggtgttctgggacggcagcttctggaagctgagccagaacatcagcgagctgaaggacggcgagctgtggaacaagttcttcgtgagaatcctgaacgccaacgacgaggccaccgtgagcgtgctgggcgagctggccgccgagatgaacggcgtgttcgacaccaccttccagagccacctgaacaaggccctgtggaaggtgggcaagctgaccagccccggcgccctgctgttccagtag

SEQ ID NO: 9698 - DNA, 3393 bp, synthetic construct
  misc_feature 1..3393: note = Description of Artificial Sequence: Synthetic coding sequence
  source 1..3393: mol_type = other DNA
atgctggagatctgcctgaagctggtgggctgcaagagcaagaagggcctgagcagcagcagcagctgctacctggaggaggccctgcagagacccgtggccagcgacttcgagccccagggcctgagcgaggccgccagatggaacagcaaggagaacctgctggccggccccagcgagaacgaccccaacctgttcgtggccctgtacgacttcgtggccagcggcgacaacaccctgagcatcaccaagggcgagaagctgagagtgctgggctacaaccacaacggcgagtggtgcgaggcccagaccaagaacggccagggctgggtgcccagcaactacatcacccccgtgaacagcctggagaagcacagctggtaccacggccccgtgagcagaaacgccgccgagtacctgctgagcagcggcatcaacggcagcttcctggtgagagagagcgagagcagccccggccagagaagcatcagcctgagatacgagggcagagtgtaccactacagaatcaacaccgccagcgacggcaagctgtacgtgagcagcgagagcagattcaacaccctggccgagctggtgcaccaccacagcaccgtggccgacggcctgatcaccaccctgcactaccccgcccccaagagaaacaagcccaccgtgtacggcgtgagccccaactacgacaagtgggagatggagagaaccgacatcaccatgaagcacaagctgggcggcggccagtacggcgaggtgtacgagggcgtgtggaagaagtacagcctgaccgtggccgtgaagaccctgaaggaggacaccatggaggtggaggagttcctgaaggaggccgccgtgatgaaggagatcaagcaccccaacctggtgcagctgctgggcgtgtgcaccagagagccccccttctacatcatcaccgagttcatgacctacggcaacctgctggactacctgagagagtgcaacagacaggaggtgaacgccgtggtgctgctgtacatggccacccagatcagcagcgccatggagtacctggagaagaagaacttcatccacagagacctggccgccagaaactgcctggtgggcgagaaccacctggtgaaggtggccgacttcggcctgagcagactgatgaccggcgacacctacaccgcccacgccggcgccaagttccccatcaagtggaccgcccccgagagcctggcctacaacaagttcagcatcaagagcgacgtgtgggccttcggcgtgctgctgtgggagatcgccacctacggcatgagcccctaccccggcatcgacctgagccaggtgtacgagctgctggagaaggactacagaatggagagacccgagggctgccccgagaaggtgtacgagctgatgagagcctgctggcagtggaaccccagcgacagacccagcttcgccgagatccaccaggccttcgagaccatgttccaggagagcagcatcagcgacgaggtggagaaggagctgggcaagcagggcgtgagaggcgccgtgagcaccctgctgcaggcccccgagctgcccaccaagaccagaaccagcagaagagccgccgagcacagagacaccaccgacgtgcccgagatgccccacagcaagggccagggcgagagcgaccccctggaccacgagcccgccgtgagccccctgctgcccagaaaggagagaggcccccccgagggcggcctgaacgaggacgagagactgctgcccaaggacaagaagaccaacctgttcagcgccctgatcaagaagaagaagaagaccgcccccaccccccccaagagaagcagcagcttcagagagatggacggccagcccgagagaagaggcgccggcgaggaggagggcagagacatcagcaacggcgccctggccttcacccccctggacaccgccgaccccgccaagagccccaagcccagcaacggcgccggcgtgcccaacggcgccctgagagagagcggcggcagcggcttcagaagcccccacctgtggaagaagagcagcaccctgaccagcagcagactggccaccggcgaggaggagggcggcggcagcagcagcaagagattcctgagaagctgcagcgccagctgcgtgccccacggcgccaaggacaccgagtggagaagcgtgaccctgcccagagacctgcagagcaccggcagacagttcgacagcagcaccttcggcggccacaagagcgagaagcccgccctgcccagaaagagagccggcgagaacagaagcgaccaggtgaccagaggcaccgtgacccccccccccagactggtgaagaagaacgaggaggccgccgacgaggtgttcaaggacatcatggagagcagccccggcagcagcccccccaacctgacccccaagcccctgagaagacaggtgaccgtggcccccgccagcggcctgccccacaaggaggaggccggcaagggcagcgccctgggcacccccgccgccgccgagcccgtgacccccaccagcaaggccggcagcggcgcccccggcggcaccagcaagggccccgccgaggagagcagagtgagaagacacaagcacagcagcgagagccccggcagagacaagggcaagctgagcagactgaagcccgcccccccccccccccccgccgccagcgccggcaaggccggcggcaagcccagccagagccccagccaggaggccgccggcgaggccgtgctgggcgccaagaccaaggccaccagcctggtggacgccgtgaacagcgacgccgccaagcccagccagcccggcgagggcctgaagaagcccgtgctgcccgccacccccaagccccagagcgccaagcccagcggcacccccatcagccccgcccccgtgcccagcaccctgcccagcgccagcagcgccctggccggcgaccagcccagcagcaccgccttcatccccctgatcagcaccagagtgagcctgagaaagaccagacagccccccgagagaatcgccagcggcgccatcaccaagggcgtggtgctggacagcaccgaggccctgtgcctggccatcagcagaaacagcgagcagatggccagccacagcgccgtgctggaggccggcaagaacctgtacaccttctgcgtgagctacgtggacagcatccagcagatgagaaacaagttcgccttcagagaggccatcaacaagctggagaacaacctgagagagctgcagatctgccccgccaccgccggcagcggccccgccgccacccaggacttcagcaagctgctgagcagcgtgaaggagatcagcgacatcgtgcagagatag

SEQ ID NO: 9699 - DNA, 3450 bp, synthetic construct
  misc_feature 1..3450: note = Description of Artificial Sequence: Synthetic coding sequence
  source 1..3450: mol_type = other DNA
atgggccagcagcccggcaaggtgctgggcgaccagagaagacccagcctgcccgccctgcacttcatcaagggcgccggcaagaaggagagcagcagacacggcggcccccactgcaacgtgttcgtggagcacgaggccctgcagagacccgtggccagcgacttcgagccccagggcctgagcgaggccgccagatggaacagcaaggagaacctgctggccggccccagcgagaacgaccccaacctgttcgtggccctgtacgacttcgtggccagcggcgacaacaccctgagcatcaccaagggcgagaagctgagagtgctgggctacaaccacaacggcgagtggtgcgaggcccagaccaagaacggccagggctgggtgcccagcaactacatcacccccgtgaacagcctggagaagcacagctggtaccacggccccgtgagcagaaacgccgccgagtacctgctgagcagcggcatcaacggcagcttcctggtgagagagagcgagagcagccccggccagagaagcatcagcctgagatacgagggcagagtgtaccactacagaatcaacaccgccagcgacggcaagctgtacgtgagcagcgagagcagattcaacaccctggccgagctggtgcaccaccacagcaccgtggccgacggcctgatcaccaccctgcactaccccgcccccaagagaaacaagcccaccgtgtacggcgtgagccccaactacgacaagtgggagatggagagaaccgacatcaccatgaagcacaagctgggcggcggccagtacggcgaggtgtacgagggcgtgtggaagaagtacagcctgaccgtggccgtgaagaccctgaaggaggacaccatggaggtggaggagttcctgaaggaggccgccgtgatgaaggagatcaagcaccccaacctggtgcagctgctgggcgtgtgcaccagagagccccccttctacatcatcaccgagttcatgacctacggcaacctgctggactacctgagagagtgcaacagacaggaggtgaacgccgtggtgctgctgtacatggccacccagatcagcagcgccatggagtacctggagaagaagaacttcatccacagagacctggccgccagaaactgcctggtgggcgagaaccacctggtgaaggtggccgacttcggcctgagcagactgatgaccggcgacacctacaccgcccacgccggcgccaagttccccatcaagtggaccgcccccgagagcctggcctacaacaagttcagcatcaagagcgacgtgtgggccttcggcgtgctgctgtgggagatcgccacctacggcatgagcccctaccccggcatcgacctgagccaggtgtacgagctgctggagaaggactacagaatggagagacccgagggctgccccgagaaggtgtacgagctgatgagagcctgctggcagtggaaccccagcgacagacccagcttcgccgagatccaccaggccttcgagaccatgttccaggagagcagcatcagcgacgaggtggagaaggagctgggcaagcagggcgtgagaggcgccgtgagcaccctgctgcaggcccccgagctgcccaccaagaccagaaccagcagaagagccgccgagcacagagacaccaccgacgtgcccgagatgccccacagcaagggccagggcgagagcgaccccctggaccacgagcccgccgtgagccccctgctgcccagaaaggagagaggcccccccgagggcggcctgaacgaggacgagagactgctgcccaaggacaagaagaccaacctgttcagcgccctgatcaagaagaagaagaagaccgcccccaccccccccaagagaagcagcagcttcagagagatggacggccagcccgagagaagaggcgccggcgaggaggagggcagagacatcagcaacggcgccctggccttcacccccctggacaccgccgaccccgccaagagccccaagcccagcaacggcgccggcgtgcccaacggcgccctgagagagagcggcggcagcggcttcagaagcccccacctgtggaagaagagcagcaccctgaccagcagcagactggccaccggcgaggaggagggcggcggcagcagcagcaagagattcctgagaagctgcagcgccagctgcgtgccccacggcgccaaggacaccgagtggagaagcgtgaccctgcccagagacctgcagagcaccggcagacagttcgacagcagcaccttcggcggccacaagagcgagaagcccgccctgcccagaaagagagccggcgagaacagaagcgaccaggtgaccagaggcaccgtgacccccccccccagactggtgaagaagaacgaggaggccgccgacgaggtgttcaaggacatcatggagagcagccccggcagcagcccccccaacctgacccccaagcccctgagaagacaggtgaccgtggcccccgccagcggcctgccccacaaggaggaggccggcaagggcagcgccctgggcacccccgccgccgccgagcccgtgacccccaccagcaaggccggcagcggcgcccccggcggcaccagcaagggccccgccgaggagagcagagtgagaagacacaagcacagcagcgagagccccggcagagacaagggcaagctgagcagactgaagcccgcccccccccccccccccgccgccagcgccggcaaggccggcggcaagcccagccagagccccagccaggaggccgccggcgaggccgtgctgggcgccaagaccaaggccaccagcctggtggacgccgtgaacagcgacgccgccaagcccagccagcccggcgagggcctgaagaagcccgtgctgcccgccacccccaagccccagagcgccaagcccagcggcacccccatcagccccgcccccgtgcccagcaccctgcccagcgccagcagcgccctggccggcgaccagcccagcagcaccgccttcatccccctgatcagcaccagagtgagcctgagaaagaccagacagccccccgagagaatcgccagcggcgccatcaccaagggcgtggtgctggacagcaccgaggccctgtgcctggccatcagcagaaacagcgagcagatggccagccacagcgccgtgctggaggccggcaagaacctgtacaccttctgcgtgagctacgtggacagcatccagcagatgagaaacaagttcgccttcagagaggccatcaacaagctggagaacaacctgagagagctgcagatctgccccgccaccgccggcagcggccccgccgccacccaggacttcagcaagctgctgagcagcgtgaaggagatcagcgacatcgtgcagagatag

SEQ ID NO: 9700 - DNA, 195 bp, synthetic construct
  misc_feature 1..195: note = Description of Artificial Sequence: Synthetic coding sequence
  source 1..195: mol_type = other DNA
atgggccagcagcccggcaaggtgctgggcgaccagagaagacccagcctgcccgccctgcacttcatcaagggcgccggcaagaaggagagcagcagacacggcggcccccactgcaacgtgttcgtggagcaggccctgcagagacccgtggccagcgacttcgagccccagggcctgagcgaggccgcctag

SEQ ID NO: 9701 - DNA, 486 bp, synthetic construct
  misc_feature 1..486: note = Description of Artificial Sequence: Synthetic coding sequence
  source 1..486: mol_type = other DNA
ggcagacccggcagaagcagagccagaggcggcggcgagggcggctggagaggcggcggcagagccggcagagccggccccgagcccggccccagagccggcagaggcgtgcccgcccccgactgctggagaggcaagatgctggagatctgcctgaagctggtgggctgcaagagcaagaagggcctgagcagcagcagcagctgctacctggaggaggccctgcagagacccgtggccagcgacttcgagccccagggcctgagcgaggccgccagatggaacagcaaggagaacctgctggccggccccagcgagaacgaccccaacctgttcgtggccctgtacgacttcgtggccagcggcgacaacaccctgagcatcaccaagggcgagaagctgagagtgctgggctacaaccacaacggcgagtggtgcgaggcccagaccaagaacggccagggctgggtgcccagcaactactag

SEQ ID NO: 9702 - DNA, 2838 bp, synthetic construct
  misc_feature 1..2838: note = Description of Artificial Sequence: Synthetic coding sequence
  source 1..2838: mol_type = other DNA
ctgagactgctgagagagcccctgcagcaccccggcagagtgggcagcagcagcttcaacggcggcagaagagcccaccaccacgcccccctgagcagccccaaggcccagcaggcccactgcctgtggtgcgtgccccagctgagacaggtgggcgacggcacccacggccaccaccacgaggcccagggcggcggccagtacggcgaggtgtacgagggcgtgtggaagaagtacagcctgaccgtggccgtgaagaccctgaaggaggacaccatggaggtggaggagttcctgaaggaggccgccgtgatgaaggagatcaagcaccccaacctggtgcagctgctgggcgtgtgcaccagagagccccccttctacatcatcaccgagttcatgacctacggcaacctgctggactacctgagagagtgcaacagacaggaggtgaacgccgtggtgctgctgtacatggccacccagatcagcagcgccatggagtacctggagaagaagaacttcatccacagagacctggccgccagaaactgcctggtgggcgagaaccacctggtgaaggtggccgacttcggcctgagcagactgatgaccggcgacacctacaccgcccacgccggcgccaagttccccatcaagtggaccgcccccgagagcctggcctacaacaagttcagcatcaagagcgacgtgtgggccttcggcgtgctgctgtgggagatcgccacctacggcatgagcccctaccccggcatcgacctgagccaggtgtacgagctgctggagaaggactacagaatggagagacccgagggctgccccgagaaggtgtacgagctgatgagagcctgctggcagtggaaccccagcgacagacccagcttcgccgagatccaccaggccttcgagaccatgttccaggagagcagcatcagcgacgaggtggagaaggagctgggcaagcagggcgtgagaggcgccgtgagcaccctgctgcaggcccccgagctgcccaccaagaccagaaccagcagaagagccgccgagcacagagacaccaccgacgtgcccgagatgccccacagcaagggccagggcgagagcgaccccctggaccacgagcccgccgtgagccccctgctgcccagaaaggagagaggcccccccgagggcggcctgaacgaggacgagagactgctgcccaaggacaagaagaccaacctgttcagcgccctgatcaagaagaagaagaagaccgcccccaccccccccaagagaagcagcagcttcagagagatggacggccagcccgagagaagaggcgccggcgaggaggagggcagagacatcagcaacggcgccctggccttcacccccctggacaccgccgaccccgccaagagccccaagcccagcaacggcgccggcgtgcccaacggcgccctgagagagagcggcggcagcggcttcagaagcccccacctgtggaagaagagcagcaccctgaccagcagcagactggccaccggcgaggaggagggcggcggcagcagcagcaagagattcctgagaagctgcagcgccagctgcgtgccccacggcgccaaggacaccgagtggagaagcgtgaccctgcccagagacctgcagagcaccggcagacagttcgacagcagcaccttcggcggccacaagagcgagaagcccgccctgcccagaaagagagccggcgagaacagaagcgaccaggtgaccagaggcaccgtgacccccccccccagactggtgaagaagaacgaggaggccgccgacgaggtgttcaaggacatcatggagagcagccccggcagcagcccccccaacctgacccccaagcccctgagaagacaggtgaccgtggcccccgccagcggcctgccccacaaggaggaggccggcaagggcagcgccctgggcacccccgccgccgccgagcccgtgacccccaccagcaaggccggcagcggcgcccccggcggcaccagcaagggccccgccgaggagagcagagtgagaagacacaagcacagcagcgagagccccggcagagacaagggcaagctgagcagactgaagcccgcccccccccccccccccgccgccagcgccggcaaggccggcggcaagcccagccagagccccagccaggaggccgccggcgaggccgtgctgggcgccaagaccaaggccaccagcctggtggacgccgtgaacagcgacgccgccaagcccagccagcccggcgagggcctgaagaagcccgtgctgcccgccacccccaagccccagagcgccaagcccagcggcacccccatcagccccgcccccgtgcccagcaccctgcccagcgccagcagcgccctggccggcgaccagcccagcagcaccgccttcatccccctgatcagcaccagagtgagcctgagaaagaccagacagccccccgagagaatcgccagcggcgccatcaccaagggcgtggtgctggacagcaccgaggccctgtgcctggccatcagcagaaacagcgagcagatggccagccacagcgccgtgctggaggccggcaagaacctgtacaccttctgcgtgagctacgtggacagcatccagcagatgagaaacaagttcgccttcagagaggccatcaacaagctggagaacaacctgagagagctgcagatctgccccgccaccgccggcagcggccccgccgccacccaggacttcagcaagctgctgagcagcgtgaaggagatcagcgacatcgtgcagagatag

SEQ ID NO: 9703 - DNA, 2649 bp, synthetic construct
  misc_feature 1..2649: note = Description of Artificial Sequence: Synthetic coding sequence
  source 1..2649: mol_type = other DNA
atgggcccctggagcagaagcctgagcgccctgctgctgctgctgcaggtgagcagctggctgtgccaggagcccgagccctgccaccccggcttcgacgccgagagctacaccttcaccgtgcccagaagacacctggagagaggcagagtgctgggcagagtgaacttcgaggactgcaccggcagacagagaaccgcctacttcagcctggacaccagattcaaggtgggcaccgacggcgtgatcaccgtgaagagacccctgagattccacaacccccagatccacttcctggtgtacgcctgggacagcacctacagaaagttcagcaccaaggtgaccctgaacaccgtgggccaccaccacagaccccccccccaccaggccagcgtgagcggcatccaggccgagctgctgaccttccccaacagcagccccggcctgagaagacagaagagagactgggtgatcccccccatcagctgccccgagaacgagaagggccccttccccaagaacctggtgcagatcaagagcaacaaggacaaggagggcaaggtgttctacagcatcaccggccagggcgccgacaccccccccgtgggcgtgttcatcatcgagagagagaccggctggctgaaggtgaccgagcccctggacagagagagaatcgccacctacaccctgttcagccacgccgtgagcagcaacggcaacgccgtggaggaccccatggagatcctgatcaccgtgaccgaccagaacgacaacaagcccgagttcacccaggaggtgttcaagggcagcgtgatggagggcgccctgcccggcaccagcgtgatggaggtgaccgccaccgacgccgacgacgacgtgaacacctacaacgccgccatcgcctacaccatcctgagccaggaccccgagctgcccgacaagaacatgttcaccatcaacagaaacaccggcgtgatcagcgtggtgaccaccggcctggacagagagagcttccccacctacaccctggtggtgcaggccgccgacctgcagggcgagggcctgagcaccaccgccaccgccgtgatcaccgtgaccgacaccaacgacaacccccccatcttcaaccccaccacctacaagggccaggtgcccgagaacgaggccaacgtggtgatcaccaccctgaaggtgaccgacgccgacgcccccaacacccccgcctgggaggccgtgtacaccatcctgaacgacgacggcggccagttcgtggtgaccaccaaccccgtgaacaacgacggcatcctgaagaccgccaagggcctggacttcgaggccaagcagcagtacatcctgcacgtggccgtgaccaacgtggtgcccttcgaggtgagcctgaccaccagcaccgccaccgtgaccgtggacgtgctggacgtgaacgaggcccccatcttcgtgccccccgagaagagagtggaggtgagcgaggacttcggcgtgggccaggagatcaccagctacaccgcccaggagcccgacaccttcatggagcagaagatcacctacagaatctggagagacaccgccaactggctggagatcaaccccgacaccggcgccatcagcaccagagccgagctggacagagaggacttcgagcacgtgaagaacagcacctacaccgccctgatcatcgccaccgacaacggcagccccgtggccaccggcaccggcaccctgctgctgatcctgagcgacgtgaacgacaacgcccccatccccgagcccagaaccatcttcttctgcgagagaaaccccaagccccaggtgatcaacatcatcgacgccgacctgccccccaacaccagccccttcaccgccgagctgacccacggcgccagcgccaactggaccatccagtacaacgaccccacccaggagagcatcatcctgaagcccaagatggccctggaggtgggcgactacaagatcaacctgaagctgatggacaaccagaacaaggaccaggtgaccaccctggaggtgagcgtgtgcgactgcgagggcgccgccggcgtgtgcagaaaggcccagcccgtggaggccggcctgcagatccccgccatcctgggcatcctgggcggcatcctggccctgctgatcctgatcctgctgctgctgctgttcctgagaagaagagccgtggtgaaggagcccctgctgccccccgaggacgacaccagagacaacgtgtactactacgacgaggagggcggcggcgaggaggaccaggacttcgacctgagccagctgcacagaggcctggacgccagacccgaggtgaccagaaacgacgtggcccccaccctgatgagcgtgcccagatacctgcccagacccgccaaccccgacgagatcggcaacttcatcgacgagaacctgaaggccgccgacaccgaccccaccgcccccccctacgacagcctgctggtgttcgactacgagggcagcggcagcgaggccgccagcctgagcagcctgaacagcagcgagagcgacaaggaccaggactacgactacctgaacgagtggggcaacagattcaagaagctggccgacatgtacggcggcggcgaggacgactag

SEQ ID NO: 9704 - DNA, 1944 bp, synthetic construct
  misc_feature 1..1944: note = Description of Artificial Sequence: Synthetic coding sequence
  source 1..1944: mol_type = other DNA
atgggcccctggagcagaagcctgagcgccctgctgctgctgctgcaggtgagcagctggctgtgccaggagcccgagccctgccaccccggcttcgacgccgagagctacaccttcaccgtgcccagaagacacctggagagaggcagagtgctgggcagagtgaacttcgaggactgcaccggcagacagagaaccgcctacttcagcctggacaccagattcaaggtgggcaccgacggcgtgatcaccgtgaagagacccctgagattccacaacccccagatccacttcctggtgtacgcctgggacagcacctacagaaagttcagcaccaaggtgaccctgaacaccgtgggccaccaccacagaccccccccccaccaggccagcgtgagcggcatccaggccgagctgctgaccttccccaacagcagccccggcctgagaagacagaagagagactgggtgatcccccccatcagctgccccgagaacgagaagggccccttccccaagaacctggtgcagatcaagagcaacaaggacaaggagggcaaggtgttctacagcatcaccggccagggcgccgacaccccccccgtgggcgtgttcatcatcgagagagagaccggctggctgaaggtgaccgagcccctggacagagagagaatcgccacctacaccctgttcagccacgccgtgagcagcaacggcaacgccgtggaggaccccatggagatcctgatcaccgtgaccgaccagaacgacaacaagcccgagttcacccaggaggtgttcaagggcagcgtgatggagggcgccctgcccggcaccagcgtgatggaggtgaccgccaccgacgccgacgacgacgtgaacacctacaacgccgccatcgcctacaccatcctgagccaggaccccgagctgcccgacaagaacatgttcaccatcaacagaaacaccggcgtgatcagcgtggtgaccaccggcctggacagagagagcttccccacctacaccctggtggtgcaggccgccgacctgcagggcgagggcctgagcaccaccgccaccgccgtgatcaccgtgaccgacaccaacgacaacccccccatcttcaaccccaccacctacaagggccaggtgcccgagaacgaggccaacgtggtgatcaccaccctgaaggtgaccgacgccgacgcccccaacacccccgcctgggaggccgtgtacaccatcctgaacgacgacggcggccagttcgtggtgaccaccaaccccgtgaacaacgacggcatcctgaagaccgccaagggcctggacttcgaggccaagcagcagtacatcctgcacgtggccgtgaccaacgtggtgcccttcgaggtgagcctgaccaccagcaccgccaccgtgaccgtggacgtgctggacgtgaacgaggcccccatcttcgtgccccccgagaagagagtggaggtgagcgaggacttcggcgtgggccaggagatcaccagctacaccgcccaggagcccgacaccttcatggagcagaagatcacctacagaatctggagagacaccgccaactggctggagatcaaccccgacaccggcgccatcagcaccagagccgagctggacagagaggacttcgagcacgtgaagaacagcacctacaccgccctgatcatcgccaccgacaacggcagccccgtggccaccggcaccggcaccctgctgctgatcctgagcgacgtgaacgacaacgcccccatccccgagcccagaaccatcttcttctgcgagagaaaccccaagccccaggtgatcaacatcatcgacgccgacctgccccccaacctggccagccagagcatcggcatcaccgacatgagccactgcacctgccccgccccccagctgcccgccatcttctag

SEQ ID NO: 9705 - DNA, 2703 bp, synthetic construct
  misc_feature 1..2703: note = Description of Artificial Sequence: Synthetic coding sequence
  source 1..2703: mol_type = other DNA
atgggcccctggagcagaagcctgagcgccctgctgctgctgctgcaggtgagcagctggctgtgccaggagcccgagccctgccaccccggcttcgacgccgagagctacaccttcaccgtgcccagaagacacctggagagaggcagagtgctgggcagagtgaacttcgaggactgcaccggcagacagagaaccgcctacttcagcctggacaccagattcaaggtgggcaccgacggcgtgatcaccgtgaagagacccctgagattccacaacccccagatccacttcctggtgtacgcctgggacagcacctacagaaagttcagcaccaaggtgaccctgaacaccgtgggccaccaccacagaccccccccccaccaggccagcgtgagcggcatccaggccgagctgctgaccttccccaacagcagccccggcctgagaagacagaagagagactgggtgatcccccccatcagctgccccgagaacgagaagggccccttccccaagaacctggtgcagatcaagagcaacaaggacaaggagggcaaggtgttctacagcatcaccggccagggcgccgacaccccccccgtgggcgtgttcatcatcgagagagagaccggctggctgaaggtgaccgagcccctggacagagagagaatcgccacctacaccctgttcagccacgccgtgagcagcaacggcaacgccgtggaggaccccatggagatcctgatcaccgtgaccgaccagaacgacaacaagcccgagttcacccaggaggtgttcaagggcagcgtgatggagggcgccctgcccggcaccagcgtgatggaggtgaccgccaccgacgccgacgacgacgtgaacacctacaacgccgccatcgcctacaccatcctgagccaggaccccgagctgcccgacaagaacatgttcaccatcaacagaaacaccggcgtgatcagcgtggtgaccaccggcctggacagagagagcttccccacctacaccctggtggtgcaggccgccgacctgcagggcgagggcctgagcaccaccgccaccgccgtgatcaccgtgaccgacaccaacgacaacccccccatcttcaaccccaccacctacaagggccaggtgcccgagaacgaggccaacgtggtgatcaccaccctgaaggtgaccgacgccgacgcccccaacacccccgcctgggaggccgtgtacaccatcctgaacgacgacggcggccagttcgtggtgaccaccaaccccgtgaacaacgacggcatcctgaagaccgccaagctggccagatgcagaaactggcacccccacagctgcagctacccctgccccctgggcctggacttcgaggccaagcagcagtacatcctgcacgtggccgtgaccaacgtggtgcccttcgaggtgagcctgaccaccagcaccgccaccgtgaccgtggacgtgctggacgtgaacgaggcccccatcttcgtgccccccgagaagagagtggaggtgagcgaggacttcggcgtgggccaggagatcaccagctacaccgcccaggagcccgacaccttcatggagcagaagatcacctacagaatctggagagacaccgccaactggctggagatcaaccccgacaccggcgccatcagcaccagagccgagctggacagagaggacttcgagcacgtgaagaacagcacctacaccgccctgatcatcgccaccgacaacggcagccccgtggccaccggcaccggcaccctgctgctgatcctgagcgacgtgaacgacaacgcccccatccccgagcccagaaccatcttcttctgcgagagaaaccccaagccccaggtgatcaacatcatcgacgccgacctgccccccaacaccagccccttcaccgccgagctgacccacggcgccagcgccaactggaccatccagtacaacgaccccacccaggagagcatcatcctgaagcccaagatggccctggaggtgggcgactacaagatcaacctgaagctgatggacaaccagaacaaggaccaggtgaccaccctggaggtgagcgtgtgcgactgcgagggcgccgccggcgtgtgcagaaaggcccagcccgtggaggccggcctgcagatccccgccatcctgggcatcctgggcggcatcctggccctgctgatcctgatcctgctgctgctgctgttcctgagaagaagagccgtggtgaaggagcccctgctgccccccgaggacgacaccagagacaacgtgtactactacgacgaggagggcggcggcgaggaggaccaggacttcgacctgagccagctgcacagaggcctggacgccagacccgaggtgaccagaaacgacgtggcccccaccctgatgagcgtgcccagatacctgcccagacccgccaaccccgacgagatcggcaacttcatcgacgagaacctgaaggccgccgacaccgaccccaccgcccccccctacgacagcctgctggtgttcgactacgagggcagcggcagcgaggccgccagcctgagcagcctgaacagcagcgagagcgacaaggaccaggactacgactacctgaacgagtggggcaacagattcaagaagctggccgacatgtacggcggcggcgaggacgactag

SEQ ID NO: 9706 - DNA, 2466 bp, synthetic construct
  misc_feature 1..2466: note = Description of Artificial Sequence: Synthetic coding sequence
  source 1..2466: mol_type = other DNA
atgggcccctggagcagaagcctgagcgccctgctgctgctgctgcaggtgagcagctggctgtgccaggagcccgagccctgccaccccggcttcgacgccgagagctacaccttcaccgtgcccagaagacacctggagagaggcagagtgctgggcagagtgaacttcgaggactgcaccggcagacagagaaccgcctacttcagcctggacaccagattcaaggtgggcaccgacggcgtgatcaccgtgaagagacccctgagattccacaacccccagatccacttcctggtgtacgcctgggacagcacctacagaaagttcagcaccaaggtgaccctgaacaccgtgggccaccaccacagaccccccccccaccaggccagcgtgagcggcatccaggccgagctgctgaccttccccaacagcagccccggcctgagaagacagaagagagactgggtgatcccccccatcagctgccccgagaacgagaagggccccttccccaagaacctggtgcagatcaagagcaacaaggacaaggagggcaaggtgttctacagcatcaccggccagggcgccgacaccccccccgtgggcgtgttcatcatcgagagagagaccggctggctgaaggtgaccgagcccctggacagagagagaatcgccacctacaccctgttcagccacgccgtgagcagcaacggcaacgccgtggaggaccccatggagatcctgatcaccgtgaccgaccagaacgacaacaagcccgagttcacccaggaggtgttcaagggcagcgtgatggagggcgccctgcccggcaccagcgtgatggaggtgaccgccaccgacgccgacgacgacgtgaacacctacaacgccgccatcgcctacaccatcctgagccaggaccccgagctgcccgacaagaacatgttcaccatcaacagaaacaccggcgtgatcagcgtggtgaccaccggcctggacagagagagcttccccacctacaccctggtggtgcaggccgccgacctgcagggcgagggcctgagcaccaccgccaccgccgtgatcaccgtgaccgacaccaacgacaacccccccatcttcaaccccaccaccggcctggacttcgaggccaagcagcagtacatcctgcacgtggccgtgaccaacgtggtgcccttcgaggtgagcctgaccaccagcaccgccaccgtgaccgtggacgtgctggacgtgaacgaggcccccatcttcgtgccccccgagaagagagtggaggtgagcgaggacttcggcgtgggccaggagatcaccagctacaccgcccaggagcccgacaccttcatggagcagaagatcacctacagaatctggagagacaccgccaactggctggagatcaaccccgacaccggcgccatcagcaccagagccgagctggacagagaggacttcgagcacgtgaagaacagcacctacaccgccctgatcatcgccaccgacaacggcagccccgtggccaccggcaccggcaccctgctgctgatcctgagcgacgtgaacgacaacgcccccatccccgagcccagaaccatcttcttctgcgagagaaaccccaagccccaggtgatcaacatcatcgacgccgacctgccccccaacaccagccccttcaccgccgagctgacccacggcgccagcgccaactggaccatccagtacaacgaccccacccaggagagcatcatcctgaagcccaagatggccctggaggtgggcgactacaagatcaacctgaagctgatggacaaccagaacaaggaccaggtgaccaccctggaggtgagcgtgtgcgactgcgagggcgccgccggcgtgtgcagaaaggcccagcccgtggaggccggcctgcagatccccgccatcctgggcatcctgggcggcatcctggccctgctgatcctgatcctgctgctgctgctgttcctgagaagaagagccgtggtgaaggagcccctgctgccccccgaggacgacaccagagacaacgtgtactactacgacgaggagggcggcggcgaggaggaccaggacttcgacctgagccagctgcacagaggcctggacgccagacccgaggtgaccagaaacgacgtggcccccaccctgatgagcgtgcccagatacctgcccagacccgccaaccccgacgagatcggcaacttcatcgacgagaacctgaaggccgccgacaccgaccccaccgcccccccctacgacagcctgctggtgttcgactacgagggcagcggcagcgaggccgccagcctgagcagcctgaacagcagcgagagcgacaaggaccaggactacgactacctgaacgagtggggcaacagattcaagaagctggccgacatgtacggcggcggcgaggacgactag

SEQ ID NO: 9707 - DNA, 2391 bp, synthetic construct
  misc_feature 1..2391: note = Description of Artificial Sequence: Synthetic coding sequence
  source 1..2391: mol_type = other DNA
atgaaggagaactactgcctgcaggccgccctggtgtgcctgggcatgctgtgccacagccacgccttcgcccccgagagaagaggccacctgagacccagcttccacggccaccacgagaagggcaaggagggccaggtgctgcagagaagcaagagaggctgggtgtggaaccagttcttcgtgatcgaggagtacaccggccccgaccccgtgctggtgggcagactgcacagcgacatcgacagcggcgacggcaacatcaagtacatcctgagcggcgagggcgccggcaccatcttcgtgatcgacgacaagagcggcaacatccacgccaccaagaccctggacagagaggagagagcccagtacaccctgatggcccaggccgtggacagagacaccaacagacccctggagccccccagcgagttcatcgtgaaggtgcaggacatcaacgacaacccccccgagttcctgcacgagacctaccacgccaacgtgcccgagagaagcaacgtgggcaccagcgtgatccaggtgaccgccagcgacgccgacgaccccacctacggcaacagcgccaagctggtgtacagcatcctggagggccagccctacttcagcgtggaggcccagaccggcatcatcagaaccgccctgcccaacatggacagagaggccaaggaggagtaccacgtggtgatccaggccaaggacatgggcggccacatgggcggcctgagcggcaccaccaaggtgaccatcaccctgaccgacgtgaacgacaacccccccaagttcccccagagcgtgtaccagatgagcgtgagcgaggccgccgtgcccggcgaggaggtgggcagagtgaaggccaaggaccccgacatcggcgagaacggcctggtgacctacaacatcgtggacggcgacggcatggagagcttcgagatcaccaccgactacgagacccaggagggcgtgatcaagctgaagaagcccgtggacttcgagaccaagagagcctacagcctgaaggtggaggccgccaacgtgcacatcgaccccaagttcatcagcaacggccccttcaaggacaccgtgaccgtgaagatcagcgtggaggacgccgacgagccccccatgttcctggcccccagctacatccacgaggtgcaggagaacgccgccgccggcaccgtggtgggcagagtgcacgccaaggaccccgacgccgccaacagccccatcagatacagcatcgacagacacaccgacctggacagattcttcaccatcaaccccgaggacggcttcatcaagaccaccaagcccctggacagagaggagaccgcctggctgaacatcaccgtgttcgccgccgagatccacaacagacaccaggaggccaaggtgcccgtggccatcagagtgctggacgtgaacgacaacgcccccaagttcgccgccccctacgagggcttcatctgcgagagcgaccagaccaagcccctgagcaaccagcccatcgtgaccatcagcgccgacgacaaggacgacaccgccaacggccccagattcatcttcagcctgccccccgagatcatccacaaccccaacttcaccgtgagagacaacagagacaacaccgccggcgtgtacgccagaagaggcggcttcagcagacagaagcaggacctgtacctgctgcccatcgtgatcagcgacggcggcatcccccccatgagcagcaccaacaccctgaccatcaaggtgtgcggctgcgacgtgaacggcgccctgctgagctgcaacgccgaggcctacatcctgaacgccggcctgagcaccggcgccctgatcgccatcctggcctgcatcgtgatcctgctggtgatcgtggtgctgttcgtgaccctgagaagacagaagaaggagcccctgatcgtgttcgaggaggaggacgtgagagagaacatcatcacctacgacgacgagggcggcggcgaggaggacaccgaggccttcgacatcgccaccctgcagaaccccgacggcatcaacggcttcatccccagaaaggacatcaagcccgagtaccagtacatgcccagacccggcctgagacccgcccccaacagcgtggacgtggacgacttcatcaacaccagaatccaggaggccgacaacgaccccaccgcccccccctacgacagcatccagatctacggctacgagggcagaggcagcgtggccggcagcctgagcagcctggagagcgccaccaccgacagcgacctggactacgactacctgcagaactggggccccagattcaagaagctggccgacctgtacggcagcaaggacaccttcgacgacgacagctag

SEQ ID NO: 9708 - DNA, 2082 bp, synthetic construct
  misc_feature 1..2082: note = Description of Artificial Sequence: Synthetic coding sequence
  source 1..2082: mol_type = other DNA
atgaaggagaactactgcctgcaggccgccctggtgtgcctgggcatgctgtgccacagccacgccttcgcccccgagagaagaggccacctgagacccagcttccacggccaccacgagaagggcaaggagggccaggtgctgcagagaagcaagagaggctgggtgtggaaccagttcttcgtgatcgaggagtacaccggccccgaccccgtgctggtgggcagactgcacagcgacatcgacagcggcgacggcaacatcaagtacatcctgagcggcgagggcgccggcaccatcttcgtgatcgacgacaagagcggcaacatccacgccaccaagaccctggacagagaggagagagcccagtacaccctgatggcccaggccgtggacagagacaccaacagacccctggagccccccagcgagttcatcgtgaaggtgcaggacatcaacgacaacccccccgagttcctgcacgagacctaccacgccaacgtgcccgagagaagcaacgtgggcaccagcgtgatccaggtgaccgccagcgacgccgacgaccccacctacggcaacagcgccaagctggtgtacagcatcctggagggccagccctacttcagcgtggaggcccagaccggcatcatcagaaccgccctgcccaacatggacagagaggccaaggaggagtaccacgtggtgatccaggccaaggacatgggcggccacatgggcggcctgagcggcaccaccaaggtgaccatcaccctgaccgacgtgaacgacaacccccccaagttcccccagagcgtgtaccagatgagcgtgagcgaggccgccgtgcccggcgaggaggtgggcagagtgaaggccaaggaccccgacatcggcgagaacggcctggtgacctacaacatcgtggacggcgacggcatggagagcttcgagatcaccaccgactacgagacccaggagggcgtgatcaagctgaagaagcccgtggacttcgagaccaagagagcctacagcctgaaggtggaggccgccaacgtgcacatcgaccccaagttcatcagcaacggccccttcaaggacaccgtgaccgtgaagatcagcgtggaggacgccgacgagccccccatgttcctggcccccagctacatccacgaggtgcaggagaacgccgccgccggcaccgtggtgggcagagtgcacgccaaggaccccgacgccgccaacagccccatcagatacagcatcgacagacacaccgacctggacagattcttcaccatcaaccccgaggacggcttcatcaagaccaccaagcccctggacagagaggagaccgcctggctgaacatcaccgtgttcgccgccgagatccacaacagacaccaggaggccaaggtgcccgtggccatcagagtgctggacgtgaacgacaacgcccccaagttcgccgccccctacgagggcttcatctgcgagagcgaccagaccaagcccctgagcaaccagcccatcgtgaccatcagcgccgacgacaaggacgacaccgccaacggccccagattcatcttcagcctgccccccgagatcatccacaaccccaacttcaccgtgagagacaacagagacaacaccgccggcgtgtacgccagaagaggcggcttcagcagacagaagcaggacctgtacctgctgcccatcgtgatcagcgacggcggcatcccccccatgagcagcaccaacaccctgaccatcaaggtgtgcggctgcgacgtgaacggcgccctgctgagctgcaacgccgaggcctacatcctgaacgccggcctgagcaccggcgccctgatcgccatcctggcctgcatcgtgatcctgctgggctgccccagcctgatggagccccccagccccagagaggacatgagactgctgtacctgggcttccagctgatgctgttcagctacgtgaaggtgaacagaagattctgcctgctgggcgtgttcatcaagctgcccttcctgtacgtggtggccaccgagagccccaccaccctgaccagcctgtag

SEQ ID NO: 9709 - DNA, 516 bp, synthetic construct
  misc_feature 1..516: note = Description of Artificial Sequence: Synthetic coding sequence
  source 1..516: mol_type = other DNA
atgaaggagaactactgcctgcaggccgccctggtgtgcctgggcatgctgtgccacagccacgccttcgcccccgagagaagaggccacctgagacccagcttccacggccaccacgagaagggcaaggagggccaggtgctgcagagaagcaagagaggctgggtgtggaaccagttcttcgtgatcgaggagtacaccggccccgaccccgtgctggtgggcagactgcacagcgacatcgacagcggcgacggcaacatcaagtacatcctgagcggcgagggcgccggcaccatcttcgtgatcgacgacaagagcggcaacatccacgccaccaagaccctggacagagaggagagagcccagtacaccctgatggcccaggccgtggacagagacaccaacagaaacagcctgagcagaagcagaaccctgatgaccaccctgagaagcagctgcaccagacccatcatgcccacctgcctgagaggccccatgtgggtgagaacctag

SEQ ID NO: 9710 - DNA, 2340 bp, synthetic construct
  misc_feature 1..2340: note = Description of Artificial Sequence: Synthetic coding sequence
  source 1..2340: mol_type = other DNA
atgggccccggcctggccgccagaagactgagaccccccagcagagcccccgagatcaccgtgttcagcgcccagagaccctgcgacatccccagctgctgccacctgctgagcgaccagagcgacggctggagcgtgctgcagaagctggccgccagcatccagtgggtgaagaagctgcacagcgacatcgacagcggcgacggcaacatcaagtacatcctgagcggcgagggcgccggcaccatcttcgtgatcgacgacaagagcggcaacatccacgccaccaagaccctggacagagaggagagagcccagtacaccctgatggcccaggccgtggacagagacaccaacagacccctggagccccccagcgagttcatcgtgaaggtgcaggacatcaacgacaacccccccgagttcctgcacgagacctaccacgccaacgtgcccgagagaagcaacgtgggcaccagcgtgatccaggtgaccgccagcgacgccgacgaccccacctacggcaacagcgccaagctggtgtacagcatcctggagggccagccctacttcagcgtggaggcccagaccggcatcatcagaaccgccctgcccaacatggacagagaggccaaggaggagtaccacgtggtgatccaggccaaggacatgggcggccacatgggcggcctgagcggcaccaccaaggtgaccatcaccctgaccgacgtgaacgacaacccccccaagttcccccagagcgtgtaccagatgagcgtgagcgaggccgccgtgcccggcgaggaggtgggcagagtgaaggccaaggaccccgacatcggcgagaacggcctggtgacctacaacatcgtggacggcgacggcatggagagcttcgagatcaccaccgactacgagacccaggagggcgtgatcaagctgaagaagcccgtggacttcgagaccaagagagcctacagcctgaaggtggaggccgccaacgtgcacatcgaccccaagttcatcagcaacggccccttcaaggacaccgtgaccgtgaagatcagcgtggaggacgccgacgagccccccatgttcctggcccccagctacatccacgaggtgcaggagaacgccgccgccggcaccgtggtgggcagagtgcacgccaaggaccccgacgccgccaacagccccatcagatacagcatcgacagacacaccgacctggacagattcttcaccatcaaccccgaggacggcttcatcaagaccaccaagcccctggacagagaggagaccgcctggctgaacatcaccgtgttcgccgccgagatccacaacagacaccaggaggccaaggtgcccgtggccatcagagtgctggacgtgaacgacaacgcccccaagttcgccgccccctacgagggcttcatctgcgagagcgaccagaccaagcccctgagcaaccagcccatcgtgaccatcagcgccgacgacaaggacgacaccgccaacggccccagattcatcttcagcctgccccccgagatcatccacaaccccaacttcaccgtgagagacaacagagacaacaccgccggcgtgtacgccagaagaggcggcttcagcagacagaagcaggacctgtacctgctgcccatcgtgatcagcgacggcggcatcccccccatgagcagcaccaacaccctgaccatcaaggtgtgcggctgcgacgtgaacggcgccctgctgagctgcaacgccgaggcctacatcctgaacgccggcctgagcaccggcgccctgatcgccatcctggcctgcatcgtgatcctgctggtgatcgtggtgctgttcgtgaccctgagaagacagaagaaggagcccctgatcgtgttcgaggaggaggacgtgagagagaacatcatcacctacgacgacgagggcggcggcgaggaggacaccgaggccttcgacatcgccaccctgcagaaccccgacggcatcaacggcttcatccccagaaaggacatcaagcccgagtaccagtacatgcccagacccggcctgagacccgcccccaacagcgtggacgtggacgacttcatcaacaccagaatccaggaggccgacaacgaccccaccgcccccccctacgacagcatccagatctacggctacgagggcagaggcagcgtggccggcagcctgagcagcctggagagcgccaccaccgacagcgacctggactacgactacctgcagaactggggccccagattcaagaagctggccgacctgtacggcagcaaggacaccttcgacgacgacagctag

SEQ ID NO: 9711 - DNA, 528 bp, synthetic construct
  misc_feature 1..528: note = Description of Artificial Sequence: Synthetic coding sequence
  source 1..528: mol_type = other DNA
atgcagcccagaacccccctggtgctgtgcgtgctgctgagccaggtgctgctgctgaccagcgccgaggacctggactgcacccccggcttccagcagaaggtgttccacatcaaccagcccgccgagttcatcgaggaccagagcatcctgaacctgaccttcagcgactgcaagggcaacgacaagctgagatacgaggtgagcagcccctacttcaaggtgaacagcgacggcggcctggtggccctgagaaacatcaccgccgtgggcaagaccctgttcgtgcacgccagaaccccccacgccgaggacatggccgagctggtgatcgtgggcggcaaggacatccagggcagcctgcaggacatcttcaagttcgccagaaccagccccgtgcccagacagaagagaagcatcgtggtgagccccatcctgatccccgagaaccagagacagcccttccccagagacgtgggcaagatgaagatctggcaggtgctgtgcctggccagatggctgacctag

SEQ ID NO: 9712 - DNA, 2142 bp, synthetic construct
  misc_feature 1..2142: note = Description of Artificial Sequence: Synthetic coding sequence
  source 1..2142: mol_type = other DNA
atgcagcccagaacccccctggtgctgtgcgtgctgctgagccaggtgctgctgctgaccagcgccgaggacctggactgcacccccggcttccagcagaaggtgttccacatcaaccagcccgccgagttcatcgaggaccagagcatcctgaacctgaccttcagcgactgcaagggcaacgacaagctgagatacgaggtgagcagcccctacttcaaggtgaacagcgacggcggcctggtggccctgagaaacatcaccgccgtgggcaagaccctgttcgtgcacgccagaaccccccacgccgaggacatggccgagctggtgatcgtgggcggcaaggacatccagggcagcctgcaggacatcttcaagttcgccagaaccagccccgtgcccagacagaagagaagcatcgtggtgagccccatcctgatccccgagaaccagagacagcccttccccagagacgtgggcaaggtggtggacagcgacagacccgagagaagcaagttcagactgaccggcaagggcgtggaccaggagcccaagggcatcttcagaatcaacgagaacaccggcagcgtgagcgtgaccagaaccctggacagagaggtgatcgccgtgtaccagctgttcgtggagaccaccgacgtgaacggcaagaccctggagggccccgtgcccctggaggtgatcgtgatcgaccagaacgacaacagacccatcttcagagagggcccctacatcggccacgtgatggagggcagccccaccggcaccaccgtgatgagaatgaccgccttcgacgccgacgaccccgccaccgacaacgccctgctgagatacaacatcagacagcagacccccgacaagcccagccccaacatgttctacatcgaccccgagaagggcgacatcgtgaccgtggtgagccccgccctgctggacagagagaccctggagaaccccaagtacgagctgatcatcgaggcccaggacatggccggcctggacgtgggcctgaccggcaccgccaccgccaccatcatgatcgacgacaagaacgaccacagccccaagttcaccaagaaggagttccaggccaccgtggaggagggcgccgtgggcgtgatcgtgaacctgaccgtggaggacaaggacgaccccaccaccggcgcctggagagccgcctacaccatcatcaacggcaaccccggccagagcttcgagatccacaccaacccccagaccaacgagggcatgctgagcgtggtgaagcccctggactacgagatcagcgccttccacaccctgctgatcaaggtggagaacgaggaccccctggtgcccgacgtgagctacggccccagcagcaccgccaccgtgcacatcaccgtgctggacgtgaacgagggccccgtgttctaccccgaccccatgatggtgaccagacaggaggacctgagcgtgggcagcgtgctgctgaccgtgaacgccaccgaccccgacagcctgcagcaccagaccatcagatacagcgtgtacaaggaccccgccggctggctgaacatcaaccccatcaacggcaccgtggacaccaccgccgtgctggacagagagagccccttcgtggacaacagcgtgtacaccgccctgttcctggccatcgacagcggcaacccccccgccaccggcaccggcaccctgctgatcaccctggaggacgtgaacgacaacgcccccttcatctaccccaccgtggccgaggtgtgcgacgacgccaagaacctgagcgtggtgatcctgggcgccagcgacaaggacctgcaccccaacaccgaccccttcaagttcgagatccacaagcaggccgtgcccgacaaggtgtggaagatcagcaagatcaacaacacccacgccctggtgagcctgctgcagaacctgaacaaggccaactacaacctgcccatcatggtgaccgacagcggcaagccccccatgaccaacatcaccgacctgagagtgcaggtgtgcagctgcagaaacagcaaggtggactgcaacgccgccggcgccctgagattcagcctgcccagcgtgctgctgctgagcctgttcagcctggcctgcctgtag

SEQ ID NO: 9713 - DNA, 2283 bp, synthetic construct
  misc_feature 1..2283: note = Description of Artificial Sequence: Synthetic coding sequence
  source 1..2283: mol_type = other DNA
atgaagaccccccccggcgccagcagcagaaccaagtgcagcagagagctgagaagcttctgcgccttcagctgccccagagccaagcagcccacctgcaccgcctggttcccccagcaggagcaccccagcgagaacggcccccagatgcccggcagagacccccccgccgccagcaccatgcaggtgctgctgctgaccagcgccgaggacctggactgcacccccggcttccagcagaaggtgttccacatcaaccagcccgccgagttcatcgaggaccagagcatcctgaacctgaccttcagcgactgcaagggcaacgacaagctgagatacgaggtgagcagcccctacttcaaggtgaacagcgacggcggcctggtggccctgagaaacatcaccgccgtgggcaagaccctgttcgtgcacgccagaaccccccacgccgaggacatggccgagctggtgatcgtgggcggcaaggacatccagggcagcctgcaggacatcttcaagttcgccagaaccagccccgtgcccagacagaagagaagcatcgtggtgagccccatcctgatccccgagaaccagagacagcccttccccagagacgtgggcaaggtggtggacagcgacagacccgagagaagcaagttcagactgaccggcaagggcgtggaccaggagcccaagggcatcttcagaatcaacgagaacaccggcagcgtgagcgtgaccagaaccctggacagagaggtgatcgccgtgtaccagctgttcgtggagaccaccgacgtgaacggcaagaccctggagggccccgtgcccctggaggtgatcgtgatcgaccagaacgacaacagacccatcttcagagagggcccctacatcggccacgtgatggagggcagccccaccggcaccaccgtgatgagaatgaccgccttcgacgccgacgaccccgccaccgacaacgccctgctgagatacaacatcagacagcagacccccgacaagcccagccccaacatgttctacatcgaccccgagaagggcgacatcgtgaccgtggtgagccccgccctgctggacagagagaccctggagaaccccaagtacgagctgatcatcgaggcccaggacatggccggcctggacgtgggcctgaccggcaccgccaccgccaccatcatgatcgacgacaagaacgaccacagccccaagttcaccaagaaggagttccaggccaccgtggaggagggcgccgtgggcgtgatcgtgaacctgaccgtggaggacaaggacgaccccaccaccggcgcctggagagccgcctacaccatcatcaacggcaaccccggccagagcttcgagatccacaccaacccccagaccaacgagggcatgctgagcgtggtgaagcccctggactacgagatcagcgccttccacaccctgctgatcaaggtggagaacgaggaccccctggtgcccgacgtgagctacggccccagcagcaccgccaccgtgcacatcaccgtgctggacgtgaacgagggccccgtgttctaccccgaccccatgatggtgaccagacaggaggacctgagcgtgggcagcgtgctgctgaccgtgaacgccaccgaccccgacagcctgcagcaccagaccatcagatacagcgtgtacaaggaccccgccggctggctgaacatcaaccccatcaacggcaccgtggacaccaccgccgtgctggacagagagagccccttcgtggacaacagcgtgtacaccgccctgttcctggccatcgacagcggcaacccccccgccaccggcaccggcaccctgctgatcaccctggaggacgtgaacgacaacgcccccttcatctaccccaccgtggccgaggtgtgcgacgacgccaagaacctgagcgtggtgatcctgggcgccagcgacaaggacctgcaccccaacaccgaccccttcaagttcgagatccacaagcaggccgtgcccgacaaggtgtggaagatcagcaagatcaacaacacccacgccctggtgagcctgctgcagaacctgaacaaggccaactacaacctgcccatcatggtgaccgacagcggcaagccccccatgaccaacatcaccgacctgagagtgcaggtgtgcagctgcagaaacagcaaggtggactgcaacgccgccggcgccctgagattcagcctgcccagcgtgctgctgctgagcctgttcagcctggcctgcaagtag

SEQ ID NO: 9714 - DNA, 2142 bp, synthetic construct
  misc_feature 1..2142: note = Description of Artificial Sequence: Synthetic coding sequence
  source 1..2142: mol_type = other DNA
atgcagcccagaacccccctggtgctgtgcgtgctgctgagccaggtgctgctgctgaccagcgccgaggacctggactgcacccccggcttccagcagaaggtgttccacatcaaccagcccgccgagttcatcgaggaccagagcatcctgaacctgaccttcagcgactgcaagggcaacgacaagctgagatacgaggtgagcagcccctacttcaaggtgaacagcgacggcggcctggtggccctgagaaacatcaccgccgtgggcaagaccctgttcgtgcacgccagaaccccccacgccgaggacatggccgagctggtgatcgtgggcggcaaggacatccagggcagcctgcaggacatcttcaagttcgccagaaccagccccgtgcccagacagaagagaagcatcgtggtgagccccatcctgatccccgagaaccagagacagcccttccccagagacgtgggcaaggtggtggacagcgacagacccgagagaagcaagttcagactgaccggcaagggcgtggaccaggagcccaagggcatcttcagaatcaacgagaacaccggcagcgtgagcgtgaccagaaccctggacagagaggtgatcgccgtgtaccagctgttcgtggagaccaccgacgtgaacggcaagaccctggagggccccgtgcccctggaggtgatcgtgatcgaccagaacgacaacagacccatcttcagagagggcccctacatcggccacgtgatggagggcagccccaccggcaccaccgtgatgagaatgaccgccttcgacgccgacgaccccgccaccgacaacgccctgctgagatacaacatcagacagcagacccccgacaagcccagccccaacatgttctacatcgaccccgagaagggcgacatcgtgaccgtggtgagccccgccctgctggacagagagaccctggagaaccccaagtacgagctgatcatcgaggcccaggacatggccggcctggacgtgggcctgaccggcaccgccaccgccaccatcatgatcgacgacaagaacgaccacagccccaagttcaccaagaaggagttccaggccaccgtggaggagggcgccgtgggcgtgatcgtgaacctgaccgtggaggacaaggacgaccccaccaccggcgcctggagagccgcctacaccatcatcaacggcaaccccggccagagcttcgagatccacaccaacccccagaccaacgagggcatgctgagcgtggtgaagcccctggactacgagatcagcgccttccacaccctgctgatcaaggtggagaacgaggaccccctggtgcccgacgtgagctacggccccagcagcaccgccaccgtgcacatcaccgtgctggacgtgaacgagggccccgtgttctaccccgaccccatgatggtgaccagacaggaggacctgagcgtgggcagcgtgctgctgaccgtgaacgccaccgaccccgacagcctgcagcaccagaccatcagatacagcgtgtacaaggaccccgccggctggctgaacatcaaccccatcaacggcaccgtggacaccaccgccgtgctggacagagagagccccttcgtggacaacagcgtgtacaccgccctgttcctggccatcgacagcggcaacccccccgccaccggcaccggcaccctgctgatcaccctggaggacgtgaacgacaacgcccccttcatctaccccaccgtggccgaggtgtgcgacgacgccaagaacctgagcgtggtgatcctgggcgccagcgacaaggacctgcaccccaacaccgaccccttcaagttcgagatccacaagcaggccgtgcccgacaaggtgtggaagatcagcaagatcaacaacacccacgccctggtgagcctgctgcagaacctgaacaaggccaactacaacctgcccatcatggtgaccgacagcggcaagccccccatgaccaacatcaccgacctgagagtgcaggtgtgcagctgcagaaacagcaaggtggactgcaacgccgccggcgccctgagattcagcctgcccagcgtgctgctgctgagcctgttcagcctggcctgcaagtag

SEQ ID NO: 9715 - DNA, 573 bp, synthetic construct
  misc_feature 1..573: note = Description of Artificial Sequence: Synthetic coding sequence
  source 1..573: mol_type = other DNA
atgcagcccagaacccccctggtgctgtgcgtgctgctgagccaggtgctgctgctgaccagcgccgaggacctggactgcacccccggcttccagcagaaggtgttccacatcaaccagcccgccgagttcatcgaggaccagagcatcctgaacctgaccttcagcgactgcaagggcaacgacaagctgagatacgaggtgagcagcccctacttcaaggtgaacagcgacggcggcctggtggccctgagaaacatcaccgccgtgggcaagaccctgttcgtgcacgccagaaccccccacgccgaggacatggccgagctggtgatcgtgggcggcaaggacatccagggcagcctgcaggacatcttcaagttcgccagaaccagccccgtgcccagacagaagagaagcatcgtggtgagccccatcctgatccccgagaaccagagacagcccttccccagagacgtgggcaagagaacccacaaccccatcaacagcgagctgctgctgaacgagggcatcaccgccgacctgaacccctgcatcaccatcctggccatctag

SEQ ID NO: 9716 - DNA, 528 bp, synthetic construct; identical to SEQ ID NO: 9711
  misc_feature 1..528: note = Description of Artificial Sequence: Synthetic coding sequence
  source 1..528: mol_type = other DNA

SEQ ID NO: 9717 - DNA, 2025 bp, synthetic construct
  misc_feature 1..2025: note = Description of Artificial Sequence: Synthetic coding sequence
  source 1..2025: mol_type = other DNA
atgcagcccagaacccccctggtgctgtgcgtgctgctgagccaggtgctgctgctgaccagcgccgaggacctggactgcacccccggcttccagcagaaggtgttccacatcaaccagcccgccgagttcatcgaggaccagagcatcctgaacctgaccttcagcgactgcaagggcaacgacaagctgagatacgaggtgagcagcccctacttcaaggtgaacagcgacggcggcctggtggccctgagaaacatcaccgccgtgggcaagaccctgttcgtgcacgccagaaccccccacgccgaggacatggccgagctggtgatcgtgggcggcaaggacatccagggcagcctgcaggtggtggacagcgacagacccgagagaagcaagttcagactgaccggcaagggcgtggaccaggagcccaagggcatcttcagaatcaacgagaacaccggcagcgtgagcgtgaccagaaccctggacagagaggtgatcgccgtgtaccagctgttcgtggagaccaccgacgtgaacggcaagaccctggagggccccgtgcccctggaggtgatcgtgatcgaccagaacgacaacagacccatcttcagagagggcccctacatcggccacgtgatggagggcagccccaccggcaccaccgtgatgagaatgaccgccttcgacgccgacgaccccgccaccgacaacgccctgctgagatacaacatcagacagcagacccccgacaagcccagccccaacatgttctacatcgaccccgagaagggcgacatcgtgaccgtggtgagccccgccctgctggacagagagaccctggagaaccccaagtacgagctgatcatcgaggcccaggacatggccggcctggacgtgggcctgaccggcaccgccaccgccaccatcatgatcgacgacaagaacgaccacagccccaagttcaccaagaaggagttccaggccaccgtggaggagggcgccgtgggcgtgatcgtgaacctgaccgtggaggacaaggacgaccccaccaccggcgcctggagagccgcctacaccatcatcaacggcaaccccggccagagcttcgagatccacaccaacccccagaccaacgagggcatgctgagcgtggtgaagcccctggactacgagatcagcgccttccacaccctgctgatcaaggtggagaacgaggaccccctggtgcccgacgtgagctacggccccagcagcaccgccaccgtgcacatcaccgtgctggacgtgaacgagggccccgtgttctaccccgaccccatgatggtgaccagacaggaggacctgagcgtgggcagcgtgctgctgaccgtgaacgccaccgaccccgacagcctgcagcaccagaccatcagatacagcgtgtacaaggaccccgccggctggctgaacatcaaccccatcaacggcaccgtggacaccaccgccgtgctggacagagagagccccttcgtggacaacagcgtgtacaccgccctgttcctggccatcgacagcggcaacccccccgccaccggcaccggcaccctgctgatcaccctggaggacgtgaacgacaacgcccccttcatctaccccaccgtggccgaggtgtgcgacgacgccaagaacctgagcgtggtgatcctgggcgccagcgacaaggacctgcaccccaacaccgaccccttcaagttcgagatccacaagcaggccgtgcccgacaaggtgtggaagatcagcaagatcaacaacacccacgccctggtgagcctgctgcagaacctgaacaaggccaactacaacctgcccatcatggtgaccgacagcggcaagccccccatgaccaacatcaccgacctgagagtgcaggtgtgcagctgcagaaacagcaaggtggactgcaacgccgccggcgccctgagattcagcctgcccagcgtgctgctgctgagcctgttcagcctggcctgcaagtag

SEQ ID NO: 9718 - DNA, 1248 bp, synthetic construct
  misc_feature 1..1248: note = Description of Artificial Sequence: Synthetic coding sequence
  source 1..1248: mol_type = other DNA
atgcagcccagaacccccctggtgctgtgcgtgctgctgagccaggtggccctgctggacagagagaccctggagaaccccaagtacgagctgatcatcgaggcccaggacatggccggcctggacgtgggcctgaccggcaccgccaccgccaccatcatgatcgacgacaagaacgaccacagccccaagttcaccaagaaggagttccaggccaccgtggaggagggcgccgtgggcgtgatcgtgaacctgaccgtggaggacaaggacgaccccaccaccggcgcctggagagccgcctacaccatcatcaacggcaaccccggccagagcttcgagatccacaccaacccccagaccaacgagggcatgctgagcgtggtgaagcccctggactacgagatcagcgccttccacaccctgctgatcaaggtggagaacgaggaccccctggtgcccgacgtgagctacggccccagcagcaccgccaccgtgcacatcaccgtgctggacgtgaacgagggccccgtgttctaccccgaccccatgatggtgaccagacaggaggacctgagcgtgggcagcgtgctgctgaccgtgaacgccaccgaccccgacagcctgcagcaccagaccatcagatacagcgtgtacaaggaccccgccggctggctgaacatcaaccccatcaacggcaccgtggacaccaccgccgtgctggacagagagagccccttcgtggacaacagcgtgtacaccgccctgttcctggccatcgacagcggcaacccccccgccaccggcaccggcaccctgctgatcaccctggaggacgtgaacgacaacgcccccttcatctaccccaccgtggccgaggtgtgcgacgacgccaagaacctgagcgtggtgatcctgggcgccagcgacaaggacctgcaccccaacaccgaccccttcaagttcgagatccacaagcaggccgtgcccgacaaggtgtggaagatcagcaagatcaacaacacccacgccctggtgagcctgctgcagaacctgaacaaggccaactacaacctgcccatcatggtgaccgacagcggcaagccccccatgaccaacatcaccgacctgagagtgcaggtgtgcagctgcagaaacagcaaggtggactgcaacgccgccggcgccctgagattcagcctgcccagcgtgctgctgctgagcctgttcagcctggcctgcaagtag

SEQ ID NO: 9719 - DNA, 819 bp, synthetic construct
  misc_feature 1..819: note = Description of Artificial Sequence: Synthetic coding sequence
  source 1..819: mol_type = other DNA
atgcagcccagaacccccctggtgctgtgcgtgctgctgagccaggtgctgctgctgaccagcgccgaggacctggactgcacccccggcttccagcagaaggtgttccacatcaaccagcccgccgagttcatcgaggaggacctgagcgtgggcagcgtgctgctgaccgtgaacgccaccgaccccgacagcctgcagcaccagaccatcagatacagcgtgtacaaggaccccgccggctggctgaacatcaaccccatcaacggcaccgtggacaccaccgccgtgctggacagagagagccccttcgtggacaacagcgtgtacaccgccctgttcctggccatcgacagcggcaacccccccgccaccggcaccggcaccctgctgatcaccctggaggacgtgaacgacaacgcccccttcatctaccccaccgtggccgaggtgtgcgacgacgccaagaacctgagcgtggtgatcctgggcgccagcgacaaggacctgcaccccaacaccgaccccttcaagttcgagatccacaagcaggccgtgcccgacaaggtgtggaagatcagcaagatcaacaacacccacgccctggtgagcctgctgcagaacctgaacaaggccaactacaacctgcccatcatggtgaccgacagcggcaagccccccatgaccaacatcaccgacctgagagtgcaggtgtgcagctgcagaaacagcaaggtggactgcaacgccgccggcgccctgagattcagcctgcccagcgtgctgctgctgagcctgttcagcctggcctgcaagtag

SEQ ID NO: 9720 - DNA, 1212 bp, synthetic construct
  misc_feature 1..1212: note = Description of Artificial Sequence: Synthetic coding sequence
  source 1..1212: mol_type = other DNA
gtggtgagccccgccctgctggacagagagaccctggagaaccccaagtacgagctgatcatcgaggcccaggacatggccggcctggacgtgggcctgaccggcaccgccaccgccaccatcatgatcgacgacaagaacgaccacagccccaagttcaccaagaaggagttccaggccaccgtggaggagggcgccgtgggcgtgatcgtgaacctgaccgtggaggacaaggacgaccccaccaccggcgcctggagagccgcctacaccatcatcaacggcaaccccggccagagcttcgagatccacaccaacccccagaccaacgagggcatgctgagcgtggtgaagcccctggactacgagatcagcgccttccacaccctgctgatcaaggtggagaacgaggaccccctggtgcccgacgtgagctacggccccagcagcaccgccaccgtgcacatcaccgtgctggacgtgaacgagggccccgtgttctaccccgaccccatgatggtgaccagacaggaggacctgagcgtgggcagcgtgctgctgaccgtgaacgccaccgaccccgacagcctgcagcaccagaccatcagatacagcgtgtacaaggaccccgccggctggctgaacatcaaccccatcaacggcaccgtggacaccaccgccgtgctggacagagagagccccttcgtggacaacagcgtgtacaccgccctgttcctggccatcgacagcggcaacccccccgccaccggcaccggcaccctgctgatcaccctggaggacgtgaacgacaacgcccccttcatctaccccaccgtggccgaggtgtgcgacgacgccaagaacctgagcgtggtgatcctgggcgccagcgacaaggacctgcaccccaacaccgaccccttcaagttcgagatccacaagcaggccgtgcccgacaaggtgtggaagatcagcaagatcaacaacacccacgccctggtgagcctgctgcagaacctgaacaaggccaactacaacctgcccatcatggtgaccgacagcggcaagccccccatgaccaacatcaccgacctgagagtgcaggtgtgcagctgcagaaacagcaaggtggactgcaacgccgccggcgccctgagattcagcctgcccagcgtgctgctgctgagcctgttcagcctggcctgcctgtag

SEQ ID NO: 9721 - DNA, 2721 bp, synthetic construct
  misc_feature 1..2721: note = Description of Artificial Sequence: Synthetic coding sequence
  source 1..2721: mol_type = other DNA
atgtgcagaatcgccggcgccctgagaaccctgctgcccctgctggccgccctgctgcaggccagcgtggaggccagcggcgagatcgccctgtgcaagaccggcttccccgaggacgtgtacagcgccgtgctgagcaaggacgtgcacgagggccagcccctgctgaacgtgaagttcagcaactgcaacggcaagagaaaggtgcagtacgagagcagcgagcccgccgacttcaaggtggacgaggacggcatggtgtacgccgtgagaagcttccccctgagcagcgagcacgccaagttcctgatctacgcccaggacaaggagacccaggagaagtggcaggtggccgtgaagctgagcctgaagcccaccctgaccgaggagagcgtgaaggagagcgccgaggtggaggagatcgtgttccccagacagttcagcaagcacagcggccacctgcagagacagaagagagactgggtgatcccccccatcaacctgcccgagaacagcagaggccccttcccccaggagctggtgagaatcagaagcgacagagacaagaacctgagcctgagatacagcgtgaccggccccggcgccgaccagccccccaccggcatcttcatcatcaaccccatcagcggccagctgagcgtgaccaagcccctggacagagagcagatcgccagattccacctgagagcccacgccgtggacatcaacggcaaccaggtggagaaccccatcgacatcgtgatcaacgtgatcgacatgaacgacaacagacccgagttcctgcaccaggtgtggaacggcaccgtgcccgagggcagcaagcccggcacctacgtgatgaccgtgaccgccatcgacgccgacgaccccaacgccctgaacggcatgctgagatacagaatcgtgagccaggcccccagcacccccagccccaacatgttcaccatcaacaacgagaccggcgacatcatcaccgtggccgccggcctggacagagagaaggtgcagcagtacaccctgatcatccaggccaccgacatggagggcaaccccacctacggcctgagcaacaccgccaccgccgtgatcaccgtgaccgacgtgaacgacaacccccccgagttcaccgccatgaccttctacggcgaggtgcccgagaacagagtggacatcatcgtggccaacctgaccgtgaccgacaaggaccagccccacacccccgcctggaacgccgtgtacagaatcagcggcggcgaccccaccggcagattcgccatccagaccgaccccaacagcaacgacggcctggtgaccgtggtgaagcccatcgacttcgagaccaacagaatgttcgtgctgaccgtggccgccgagaaccaggtgcccctggccaagggcatccagcaccccccccagagcaccgccaccgtgagcgtgaccgtgatcgacgtgaacgagaacccctacttcgcccccaaccccaagatcatcagacaggaggagggcctgcacgccggcaccatgctgaccaccttcaccgcccaggaccccgacagatacatgcagcagaacatcagatacaccaagctgagcgaccccgccaactggctgaagatcgaccccgtgaacggccagatcaccaccatcgccgtgctggacagagagagccccaacgtgaagaacaacatctacaacgccaccttcctggccagcgacaacggcatcccccccatgagcggcaccggcaccctgcagatctacctgctggacatcaacgacaacgccccccaggtgctgccccaggaggccgagacctgcgagacccccgaccccaacagcatcaacatcaccgccctggactacgacatcgaccccaacgccggccccttcgccttcgacctgcccctgagccccgtgaccatcaagagaaactggaccatcaccagactgaacggcgacttcgcccagctgaacctgaagatcaagttcctggaggccggcatctacgaggtgcccatcatcatcaccgacagcggcaacccccccaagagcaacatcagcatcctgagagtgaaggtgtgccagtgcgacagcaacggcgactgcaccgacgtggacagaatcgtgggcgccggcctgggcaccggcgccatcatcgccatcctgctgtgcatcatcatcctgctgatcctggtgctgatgttcgtggtgtggatgaagagaagagacaaggagagacaggccaagcagctgctgatcgaccccgaggacgacgtgagagacaacatcctgaagtacgacgaggagggcggcggcgaggaggaccaggactacgacctgagccagctgcagcagcccgacaccgtggagcccgacgccatcaagcccgtgggcatcagaagaatggacgagagacccatccacgccgagccccagtaccccgtgagaagcgccgccccccaccccggcgacatcggcgacttcatcaacgagggcctgaaggccgccgacaacgaccccaccgcccccccctacgacagcctgctggtgttcgactacgagggcagcggcagcaccgccggcagcctgagcagcctgaacagcagcagcagcggcggcgagcaggactacgactacctgaacgactggggccccagattcaagaagctggccgacatgtacggcggcggcgacgactag

SEQ ID NO: 9722 - DNA, 2628 bp, synthetic construct
  misc_feature 1..2628: note = Description of Artificial Sequence: Synthetic coding sequence
  source 1..2628: mol_type = other DNA
atgttcctgctgagaagatacgtgtgcatcttcaccgagaagctgaagaaccaggccgagctgtacgtgttcctgagcgtgaagttcagcaactgcaacggcaagagaaaggtgcagtacgagagcagcgagcccgccgacttcaaggtggacgaggacggcatggtgtacgccgtgagaagcttccccctgagcagcgagcacgccaagttcctgatctacgcccaggacaaggagacccaggagaagtggcaggtggccgtgaagctgagcctgaagcccaccctgaccgaggagagcgtgaaggagagcgccgaggtggaggagatcgtgttccccagacagttcagcaagcacagcggccacctgcagagacagaagagagactgggtgatcccccccatcaacctgcccgagaacagcagaggccccttcccccaggagctggtgagaatcagaagcgacagagacaagaacctgagcctgagatacagcgtgaccggccccggcgccgaccagccccccaccggcatcttcatcatcaaccccatcagcggccagctgagcgtgaccaagcccctggacagagagcagatcgccagattccacctgagagcccacgccgtggacatcaacggcaaccaggtggagaaccccatcgacatcgtgatcaacgtgatcgacatgaacgacaacagacccgagttcctgcaccaggtgtggaacggcaccgtgcccgagggcagcaagcccggcacctacgtgatgaccgtgaccgccatcgacgccgacgaccccaacgccctgaacggcatgctgagatacagaatcgtgagccaggcccccagcacccccagccccaacatgttcaccatcaacaacgagaccggcgacatcatcaccgtggccgccggcctggacagagagaaggtgcagcagtacaccctgatcatccaggccaccgacatggagggcaaccccacctacggcctgagcaacaccgccaccgccgtgatcaccgtgaccgacgtgaacgacaacccccccgagttcaccgccatgaccttctacggcgaggtgcccgagaacagagtggacatcatcgtggccaacctgaccgtgaccgacaaggaccagccccacacccccgcctggaacgccgtgtacagaatcagcggcggcgaccccaccggcagattcgccatccagaccgaccccaacagcaacgacggcctggtgaccgtggtgaagcccatcgacttcgagaccaacagaatgttcgtgctgaccgtggccgccgagaaccaggtgcccctggccaagggcatccagcaccccccccagagcaccgccaccgtgagcgtgaccgtgatcgacgtgaacgagaacccctacttcgcccccaaccccaagatcatcagacaggaggagggcctgcacgccggcaccatgctgaccaccttcaccgcccaggaccccgacagatacatgcagcagaacatcagatacaccaagctgagcgaccccgccaactggctgaagatcgaccccgtgaacggccagatcaccaccatcgccgtgctggacagagagagccccaacgtgaagaacaacatctacaacgccaccttcctggccagcgacaacggcatcccccccatgagcggcaccggcaccctgcagatctacctgctggacatcaacgacaacgccccccaggtgctgccccaggaggccgagacctgcgagacccccgaccccaacagcatcaacatcaccgccctggactacgacatcgaccccaacgccggccccttcgccttcgacctgcccctgagccccgtgaccatcaagagaaactggaccatcaccagactgaacggcgacttcgcccagctgaacctgaagatcaagttcctggaggccggcatctacgaggtgcccatcatcatcaccgacagcggcaacccccccaagagcaacatcagcatcctgagagtgaaggtgtgccagtgcgacagcaacggcgactgcaccgacgtggacagaatcgtgggcgccggcctgggcaccggcgccatcatcgccatcctgctgtgcatcatcatcctgctgatcctggtgctgatgttcgtggtgtggatgaagagaagagacaaggagagacaggccaagcagctgctgatcgaccccgaggacgacgtgagagacaacatcctgaagtacgacgaggagggcggcggcgaggaggaccaggactacgacctgagccagctgcagcagcccgacaccgtggagcccgacgccatcaagcccgtgggcatcagaagaatggacgagagacccatccacgccgagccccagtaccccgtgagaagcgccgccccccaccccggcgacatcggcgacttcatcaacgagggcctgaaggccgccgacaacgaccccaccgcccccccctacgacagcctgctggtgttcgactacgagggcagcggcagcaccgccggcagcctgagcagcctgaacagcagcagcagcggcggcgagcaggactacgactacctgaacgactggggccccagattcaagaagctggccgacatgtacggcggcggcgacgactag

SEQ ID NO: 9723 - DNA, 2355 bp, synthetic construct
  misc_feature 1..2355: note = Description of Artificial Sequence: Synthetic coding sequence
  source 1..2355: mol_type = other DNA
atgcagagactgatgatgctgctggccaccagcggcgcctgcctgggcctgctggccgtggccgccgtggccgccgccggcgccaaccccgcccagagagacacccacagcctgctgcccacccacagaagacagaagagagactggatctggaaccagatgcacatcgacgaggagaagaacaccagcctgccccaccacgtgggcaagatcaagagcagcgtgagcagaaagaacgccaagtacctgctgaagggcgagtacgtgggcaaggtgttcagagtggacgccgagaccggcgacgtgttcgccatcgagagactggacagagagaacatcagcgagtaccacctgaccgccgtgatcgtggacaaggacaccggcgagaacctggagacccccagcagcttcaccatcaaggtgcacgacgtgaacgacaactggcccgtgttcacccacagactgttcaacgccagcgtgcccgagagcagcgccgtgggcaccagcgtgatcagcgtgaccgccgtggacgccgacgaccccaccgtgggcgaccacgccagcgtgatgtaccagatcctgaagggcaaggagtacttcgccatcgacaacagcggcagaatcatcaccatcaccaagagcctggacagagagaagcaggccagatacgagatcgtggtggaggccagagacgcccagggcctgagaggcgacagcggcaccgccaccgtgctggtgaccctgcaggacatcaacgacaacttccccttcttcacccagaccaagtacaccttcgtggtgcccgaggacaccagagtgggcaccagcgtgggcagcctgttcgtggaggaccccgacgagccccagaacagaatgaccaagtacagcatcctgagaggcgactaccaggacgccttcaccatcgagaccaaccccgcccacaacgagggcatcatcaagcccatgaagcccctggactacgagtacatccagcagtacagcttcatcgtggaggccaccgaccccaccatcgacctgagatacatgagcccccccgccggcaacagagcccaggtgatcatcaacatcaccgacgtggacgagccccccatcttccagcagcccttctaccacttccagctgaaggagaaccagaagaagcccctgatcggcaccgtgctggccatggaccccgacgccgccagacacagcatcggctacagcatcagaagaaccagcgacaagggccagttcttcagagtgaccaagaagggcgacatctacaacgagaaggagctggacagagaggtgtacccctggtacaacctgaccgtggaggccaaggagctggacagcaccggcacccccaccggcaaggagagcatcgtgcaggtgcacatcgaggtgctggacgagaacgacaacgcccccgagttcgccaagccctaccagcccaaggtgtgcgagaacgccgtgcacggccagctggtgctgcagatcagcgccatcgacaaggacatcacccccagaaacgtgaagttcaagttcatcctgaacaccgagaacaacttcaccctgaccgacaaccacgacaacaccgccaacatcaccgtgaagtacggccagttcgacagagagcacaccaaggtgcacttcctgcccgtggtgatcagcgacaacggcatgcccagcagaaccggcaccagcaccctgaccgtggccgtgtgcaagtgcaacgagcagggcgagttcaccttctgcgaggacatggccgcccaggtgggcgtgagcatccaggccgtggtggccatcctgctgtgcatcctgaccatcaccgtgatcaccctgctgatcttcctgagaagaagactgagaaagcaggccagagcccacggcaagagcgtgcccgagatccacgagcagctggtgacctacgacgaggagggcggcggcgagatggacaccaccagctacgacgtgagcgtgctgaacagcgtgagaagaggcggcgccaagccccccagacccgccctggacgccagacccagcctgtacgcccaggtgcagaagccccccagacacgcccccggcgcccacggcggccccggcgagatggccgccatgatcgaggtgaagaaggacgaggccgaccacgacggcgacggccccccctacgacaccctgcacatctacggctacgagggcagcgagagcatcgccgagagcctgagcagcctgggcaccgacagcagcgacagcgacgtggactacgacttcctgaacgactggggccccagattcaagatgctggccgagctgtacggcagcgaccccagagaggagctgctgtactag

SEQ ID NO: 9724 - DNA, 2010 bp, synthetic construct
  misc_feature 1..2010: note = Description of Artificial Sequence: Synthetic coding sequence
  source 1..2010: mol_type = other DNA
atgcagagactgatgatgctgctggccaccagcggcgcctgcctgggcctgctggccgtggccgccgtggccgccgccggcgccaaccccgcccagagagacacccacagcctgctgcccacccacagaagacagaagagagactggatctggaaccagatgcacatcgacgaggagaagaacaccagcctgccccaccacgtgggcaagatcaagagcagcgtgagcagaaagaacgccaagtacctgctgaagggcgagtacgtgggcaaggtgttcagagtggacgccgagaccggcgacgtgttcgccatcgagagactggacagagagaacatcagcgagtaccacctgaccgccgtgatcgtggacaaggacaccggcgagaacctggagacccccagcagcttcaccatcaaggtgcacgacgtgaacgacaactggcccgtgttcacccacagactgttcaacgccagcgtgcccgagagcagcgccgtgggcaccagcgtgatcagcgtgaccgccgtggacgccgacgaccccaccgtgggcgaccacgccagcgtgatgtaccagatcctgaagggcaaggagtacttcgccatcgacaacagcggcagaatcatcaccatcaccaagagcctggacagagagaagcaggccagatacgagatcgtggtggaggccagagacgcccagggcctgagaggcgacagcggcaccgccaccgtgctggtgaccctgcaggacatcaacgacaacttccccttcttcacccagaccaagtacaccttcgtggtgcccgaggacaccagagtgggcaccagcgtgggcagcctgttcgtggaggaccccgacgagccccagaacagaatgaccaagtacagcatcctgagaggcgactaccaggacgccttcaccatcgagaccaaccccgcccacaacgagggcatcatcaagcccatgaagcccctggactacgagtacatccagcagtacagcttcatcgtggaggccaccgaccccaccatcgacctgagatacatgagcccccccgccggcaacagagcccaggtgatcatcaacatcaccgacgtggacgagccccccatcttccagcagcccttctaccacttccagctggtgctgcagatcagcgccatcgacaaggacatcacccccagaaacgtgaagttcaagttcatcctgaacaccgagaacaacttcaccctgaccgacaaccacgacaacaccgccaacatcaccgtgaagtacggccagttcgacagagagcacaccaaggtgcacttcctgcccgtggtgatcagcgacaacggcatgcccagcagaaccggcaccagcaccctgaccgtggccgtgtgcaagtgcaacgagcagggcgagttcaccttctgcgaggacatggccgcccaggtgggcgtgagcatccaggccgtggtggccatcctgctgtgcatcctgaccatcaccgtgatcaccctgctgatcttcctgagaagaagactgagaaagcaggccagagcccacggcaagagcgtgcccgagatccacgagcagctggtgacctacgacgaggagggcggcggcgagatggacaccaccagctacgacgtgagcgtgctgaacagcgtgagaagaggcggcgccaagccccccagacccgccctggacgccagacccagcctgtacgcccaggtgcagaagccccccagacacgcccccggcgcccacggcggccccggcgagatggccgccatgatcgaggtgaagaaggacgaggccgaccacgacggcgacggccccccctacgacaccctgcacatctacggctacgagggcagcgagagcatcgccgagagcctgagcagcctgggcaccgacagcagcgacagcgacgtggactacgacttcctgaacgactggggccccagattcaagatgctggccgagctgtacggcagcgaccccagagaggagctgctgtactag

SEQ ID NO: 9725 - DNA, 672 bp, synthetic construct
  misc_feature 1..672: note = Description of Artificial Sequence: Synthetic coding sequence
  source 1..672: mol_type = other DNA
atgcccagcagaaccggcaccagcaccctgaccgtggccgtgtgcaagtgcaacgagcagggcgagttcaccttctgcgaggacatggccgcccaggtgggcgtgagcatccaggccgtggtggccatcctgctgtgcatcctgaccatcaccgtgatcaccctgctgatcttcctgagaagaagactgagaaagcaggccagagcccacggcaagagcgtgcccgagatccacgagcagctggtgacctacgacgaggagggcggcggcgagatggacaccaccagctacgacgtgagcgtgctgaacagcgtgagaagaggcggcgccaagccccccagacccgccctggacgccagacccagcctgtacgcccaggtgcagaagccccccagacacgcccccggcgcccacggcggccccggcgagatggccgccatgatcgaggtgaagaaggacgaggccgaccacgacggcgacggccccccctacgacaccctgcacatctacggctacgagggcagcgagagcatcgccgagagcctgagcagcctgggcaccgacagcagcgacagcgacgtggactacgacttcctgaacgactggggccccagattcaagatgctggccgagctgtacggcagcgaccccagagaggagctgctgtactag

SEQ ID NO: 9726 - DNA, 1578 bp, synthetic construct
  misc_feature 1..1578: note = Description of Artificial Sequence: Synthetic coding sequence
  source 1..1578: mol_type = other DNA
atgcccagcacctgcagcaaggagaacatgtgggccagaagcagcggcagcatgcagagacaggagacctgcagccccctgagagcccagaacagaatgaccaagtacagcatcctgagaggcgactaccaggacgccttcaccatcgagaccaaccccgcccacaacgagggcatcatcaagcccatgaagcccctggactacgagtacatccagcagtacagcttcatcgtggaggccaccgaccccaccatcgacctgagatacatgagcccccccgccggcaacagagcccaggtgatcatcaacatcaccgacgtggacgagccccccatcttccagcagcccttctaccacttccagctgaaggagaaccagaagaagcccctgatcggcaccgtgctggccatggaccccgacgccgccagacacagcatcggctacagcatcagaagaaccagcgacaagggccagttcttcagagtgaccaagaagggcgacatctacaacgagaaggagctggacagagaggtgtacccctggtacaacctgaccgtggaggccaaggagctggacagcaccggcacccccaccggcaaggagagcatcgtgcaggtgcacatcgaggtgctggacgagaacgacaacgcccccgagttcgccaagccctaccagcccaaggtgtgcgagaacgccgtgcacggccagctggtgctgcagatcagcgccatcgacaaggacatcacccccagaaacgtgaagttcaagttcatcctgaacaccgagaacaacttcaccctgaccgacaaccacgacaacaccgccaacatcaccgtgaagtacggccagttcgacagagagcacaccaaggtgcacttcctgcccgtggtgatcagcgacaacggcatgcccagcagaaccggcaccagcaccctgaccgtggccgtgtgcaagtgcaacgagcagggcgagttcaccttctgcgaggacatggccgcccaggtgggcgtgagcatccaggccgtggtggccatcctgctgtgcatcctgaccatcaccgtgatcaccctgctgatcttcctgagaagaagactgagaaagcaggccagagcccacggcaagagcgtgcccgagatccacgagcagctggtgacctacgacgaggagggcggcggcgagatggacaccaccagctacgacgtgagcgtgctgaacagcgtgagaagaggcggcgccaagccccccagacccgccctggacgccagacccagcctgtacgcccaggtgcagaagccccccagacacgcccccggcgcccacggcggccccggcgagatggccgccatgatcgaggtgaagaaggacgaggccgaccacgacggcgacggccccccctacgacaccctgcacatctacggctacgagggcagcgagagcatcgccgagagcctgagcagcctgggcaccgacagcagcgacagcgacgtggactacgacttcctgaacgactggggccccagattcaagatgctggccgagctgtacggcagcgaccccagagaggagctgctgtactag

SEQ ID NO: 9727 - DNA, 2373 bp, synthetic construct
  misc_feature 1..2373: note = Description of Artificial Sequence: Synthetic coding sequence
  source 1..2373: mol_type = other DNA
atgagaacctacagatacttcctgctgctgttctgggtgggccagccctaccccaccctgagcacccccctgagcaagagaaccagcggcttccccgccaagaagagagccctggagctgagcggcaacagcaagaacgagctgaacagaagcaagagaagctggatgtggaaccagttcttcctgctggaggagtacaccggcagcgactaccagtacgtgggcaagctgcacagcgaccaggacagaggcgacggcagcctgaagtacatcctgagcggcgacggcgccggcgacctgttcatcatcaacgagaacaccggcgacatccaggccaccaagagactggacagagaggagaagcccgtgtacatcctgagagcccaggccatcaacagaagaaccggcagacccgtggagcccgagagcgagttcatcatcaagatccacgacatcaacgacaacgagcccatcttcaccaaggaggtgtacaccgccaccgtgcccgagatgagcgacgtgggcaccttcgtggtgcaggtgaccgccaccgacgccgacgaccccacctacggcaacagcgccaaggtggtgtacagcatcctgcagggccagccctacttcagcgtggagagcgagaccggcatcatcaagaccgccctgctgaacatggacagagagaacagagagcagtaccaggtggtgatccaggccaaggacatgggcggccagatgggcggcctgagcggcaccaccaccgtgaacatcaccctgaccgacgtgaacgacaacccccccagattcccccagagcacctaccagttcaagacccccgagagcagcccccccggcacccccatcggcagaatcaaggccagcgacgccgacgtgggcgagaacgccgagatcgagtacagcatcaccgacggcgagggcctggacatgttcgacgtgatcaccgaccaggagacccaggagggcatcatcaccgtgaagaagctgctggacttcgagaagaagaaggtgtacaccctgaaggtggaggccagcaacccctacgtggagcccagattcctgtacctgggccccttcaaggacagcgccaccgtgagaatcgtggtggaggacgtggacgagccccccgtgttcagcaagctggcctacatcctgcagatcagagaggacgcccagatcaacaccaccatcggcagcgtgaccgcccaggaccccgacgccgccagaaaccccgtgaagtacagcgtggacagacacaccgacatggacagaatcttcaacatcgacagcggcaacggcagcatcttcaccagcaagctgctggacagagagaccctgctgtggcacaacatcaccgtgatcgccaccgagatcaacaaccccaagcagagcagcagagtgcccctgtacatcaaggtgctggacgtgaacgacaacgcccccgagttcgccgagttctacgagaccttcgtgtgcgagaaggccaaggccgaccagctgatccagaccctgcacgccgtggacaaggacgacccctacagcggccaccagttcagcttcagcctggcccccgaggccgccagcggcagcaacttcaccatccaggacaacaaggacaacaccgccggcatcctgaccagaaagaacggctacaacagacacgagatgagcacctacctgctgcccgtggtgatcagcgacaacgactaccccgtgcagagcagcaccggcaccgtgaccgtgagagtgtgcgcctgcgaccaccacggcaacatgcagagctgccacgccgaggccctgatccaccccaccggcctgagcaccggcgccctggtggccatcctgctgtgcatcgtgatcctgctggtgaccgtggtgctgttcgccgccctgagaagacagagaaagaaggagcccctgatcatcagcaaggaggacatcagagacaacatcgtgagctacaacgacgagggcggcggcgaggaggacacccaggccttcgacatcggcaccctgagaaaccccgaggccatcgaggacaacaagctgagaagagacatcgtgcccgaggccctgttcctgcccagaagaacccccaccgccagagacaacaccgacgtgagagacttcatcaaccagagactgaaggagaacgacaccgaccccaccgcccccccctacgacagcctggccacctacgcctacgagggcaccggcagcgtggccgacagcctgagcagcctggagagcgtgaccaccgacgccgaccaggactacgactacctgagcgactggggccccagattcaagaagctggccgacatgtacggcggcgtggacagcgacaaggacagctag

SEQ ID NO: 9728 - DNA, 576 bp, synthetic construct
  misc_feature 1..576: note = Description of Artificial Sequence: Synthetic coding sequence
  source 1..576: mol_type = other DNA
atgggcggcagcggcagcagactgagcaaggagctgctggccgagtaccaggacctgaccttcctgaccaagcaggagatcctgctggcccacagaagattctgcgagctgctgccccaggagcagagaagcgtggagagcagcctgagagcccaggtgcccttcgagcagatcctgagcctgcccgagctgaaggccaaccccttcaaggagagaatctgcagagtgttcagcaccagccccgccaaggacagcctgagcttcgaggacttcctggacctgctgagcgtgttcagcgacaccgccacccccgacatcaagagccactacgccttcagaatcttcgacttcgacgacgacggcaccctgaacagagaggacctgagcagactggtgaactgcctgaccggcgagggcgaggacaccagactgagcgccagcgagatgaagcagctgatcgacaacatcctggaggagagcgacatcgacagagacggcaccatcaacctgagcgagttccagcacgtgatcagcagaagccccgacttcgccagcagcttcaagatcgtgctgtag

SEQ ID NO: 9729 - DNA, 237 bp, synthetic construct
  misc_feature 1..237: note = Description of Artificial Sequence: Synthetic coding sequence
  source 1..237: mol_type = other DNA
atgagcgaggtgctgccctacggcgacgagaagctgagcccctacggcgacggcggcgacgtgggccagatcttcagctgcagactgcaggacaccaacaacttcttcggcgccggccagaacaagagaccccccaagctgggccagatcggcagaagcaagagagtggtgatcgaggacgacagaatcgacgacgtgctgaagaacatgaccgacaaggccccccccggcgtgtag

SEQ ID NO: 9730 - DNA, 1563 bp, synthetic construct
  misc_feature 1..1563: note = Description of Artificial Sequence: Synthetic coding sequence
  source 1..1563: mol_type = other DNA
atggagggcggccccgccgtgtgctgccaggaccccagagccgagctggtggagagagtggccgccatcgacgtgacccacctggaggaggccgacggcggccccgagcccaccagaaacggcgtggaccccccccccagagccagagccgccagcgtgatccccggcagcaccagcagactgctgcccgccagacccagcctgagcgccagaaagctgagcctgcaggagagacccgccggcagctacctggaggcccaggccggcccctacgccaccggccccgccagccacatcagccccagagcctggagaagacccaccatcgagagccaccacgtggccatcagcgacgccgaggactgcgtgcagctgaaccagtacaagctgcagagcgagatcggcaagggcgcctacggcgtggtgagactggcctacaacgagagcgaggacagacactacgccatgaaggtgctgagcaagaagaagctgctgaagcagtacggcttccccagaagacccccccccagaggcagccaggccgcccagggcggccccgccaagcagctgctgcccctggagagagtgtaccaggagatcgccatcctgaagaagctggaccacgtgaacgtggtgaagctgatcgaggtgctggacgaccccgccgaggacaacctgtacctggccctgcagaaccaggcccagaacatccagctggacagcaccaacatcgccaagccccacagcctgctgcccagcgagcagcaggacagcggcagcacctgggccgccagaagcgtgttcgacctgctgagaaagggccccgtgatggaggtgccctgcgacaagcccttcagcgaggagcaggccagactgtacctgagagacgtgatcctgggcctggagtacctgcactgccagaagatcgtgcacagagacatcaagcccagcaacctgctgctgggcgacgacggccacgtgaagatcgccgacttcggcgtgagcaaccagttcgagggcaacgacgcccagctgagcagcaccgccggcacccccgccttcatggcccccgaggccatcagcgacagcggccagagcttcagcggcaaggccctggacgtgtgggccaccggcgtgaccctgtactgcttcgtgtacggcaagtgccccttcatcgacgacttcatcctggccctgcacagaaagatcaagaacgagcccgtggtgttccccgaggagcccgagatcagcgaggagctgaaggacctgatcctgaagatgctggacaagaaccccgagaccagaatcggcgtgcccgacatcaagctgcacccctgggtgaccaagaacggcgaggagcccctgcccagcgaggaggagcactgcagcgtggtggaggtgaccgaggaggaggtgaagaacagcgtgagactgatccccagctggaccaccgtgatcctggtgaagagcatgctgagaaagagaagcttcggcaaccccttcgagccccaggccagaagagaggagagaagcatgagcgcccccggcaacctgctggtgtag

SEQ ID NO: 9731 - DNA, 1518 bp, synthetic construct
  misc_feature 1..1518: note = Description of Artificial Sequence: Synthetic coding sequence
  source 1..1518: mol_type = other DNA
atggagggcggccccgccgtgtgctgccaggaccccagagccgagctggtggagagagtggccgccatcgacgtgacccacctggaggaggccgacggcggccccgagcccaccagaaacggcgtggaccccccccccagagccagagccgccagcgtgatccccggcagcaccagcagactgctgcccgccagacccagcctgagcgccagaaagctgagcctgcaggagagacccgccggcagctacctggaggcccaggccggcccctacgccaccggccccgccagccacatcagccccagagcctggagaagacccaccatcgagagccaccacgtggccatcagcgacgccgaggactgcgtgcagctgaaccagtacaagctgcagagcgagatcggcaagggcgcctacggcgtggtgagactggcctacaacgagagcgaggacagacactacgccatgaaggtgctgagcaagaagaagctgctgaagcagtacggcttccccagaagacccccccccagaggcagccaggccgcccagggcggccccgccaagcagctgctgcccctggagagagtgtaccaggagatcgccatcctgaagaagctggaccacgtgaacgtggtgaagctgatcgaggtgctggacgaccccgccgaggacaacctgtacctggtgttcgacctgctgagaaagggccccgtgatggaggtgccctgcgacaagcccttcagcgaggagcaggccagactgtacctgagagacgtgatcctgggcctggagtacctgcactgccagaagatcgtgcacagagacatcaagcccagcaacctgctgctgggcgacgacggccacgtgaagatcgccgacttcggcgtgagcaaccagttcgagggcaacgacgcccagctgagcagcaccgccggcacccccgccttcatggcccccgaggccatcagcgacagcggccagagcttcagcggcaaggccctggacgtgtgggccaccggcgtgaccctgtactgcttcgtgtacggcaagtgccccttcatcgacgacttcatcctggccctgcacagaaagatcaagaacgagcccgtggtgttccccgaggagcccgagatcagcgaggagctgaaggacctgatcctgaagatgctggacaagaaccccgagaccagaatcggcgtgcccgacatcaagctgcacccctgggtgaccaagaacggcgaggagcccctgcccagcgaggaggagcactgcagcgtggtggaggtgaccgaggaggaggtgaagaacagcgtgagactgatccccagctggaccaccgtgatcctggtgaagagcatgctgagaaagagaagcttcggcaaccccttcgagccccaggccagaagagaggagagaagcatgagcgcccccggcaacctgctggtgaaggagggcttcggcgagggcggcaagagccccgagctgcccggcgtgcaggaggacgaggccgccagctag

SEQ ID NO: 9732 - DNA, 1599 bp, synthetic construct
  misc_feature 1..1599: note = Description of Artificial Sequence: Synthetic coding sequence
  source 1..1599: mol_type = other DNA
atgcagttcggcaagctgtggtgcggctgcagcggcgagttccccaccagactgagaagaagaacccccctgaccgaggccatggagggcggccccgccgtgtgctgccaggaccccagagccgagctggtggagagagtggccgccatcgacgtgacccacctggaggaggccgacggcggccccgagcccaccagaaacggcgtggaccccccccccagagccagagccgccagcgtgatccccggcagcaccagcagactgctgcccgccagacccagcctgagcgccagaaagctgagcctgcaggagagacccgccggcagctacctggaggcccaggccggcccctacgccaccggccccgccagccacatcagccccagagcctggagaagacccaccatcgagagccaccacgtggccatcagcgacgccgaggactgcgtgcagctgaaccagtacaagctgcagagcgagatcggcaagggcgcctacggcgtggtgagactggcctacaacgagagcgaggacagacactacgccatgaaggtgctgagcaagaagaagctgctgaagcagtacggcttccccagaagacccccccccagaggcagccaggccgcccagggcggccccgccaagcagctgctgcccctggagagagtgtaccaggagatcgccatcctgaagaagctggaccacgtgaacgtggtgaagctgatcgaggtgctggacgaccccgccgaggacaacctgtacctggtgttcgacctgctgagaaagggccccgtgatggaggtgccctgcgacaagcccttcagcgaggagcaggccagactgtacctgagagacgtgatcctgggcctggagtacctgcactgccagaagatcgtgcacagagacatcaagcccagcaacctgctgctgggcgacgacggccacgtgaagatcgccgacttcggcgtgagcaaccagttcgagggcaacgacgcccagctgagcagcaccgccggcacccccgccttcatggcccccgaggccatcagcgacagcggccagagcttcagcggcaaggccctggacgtgtgggccaccggcgtgaccctgtactgcttcgtgtacggcaagtgccccttcatcgacgacttcatcctggccctgcacagaaagatcaagaacgagcccgtggtgttccccgaggagcccgagatcagcgaggagctgaaggacctgatcctgaagatgctggacaagaaccccgagaccagaatcggcgtgcccgacatcaagctgcacccctgggtgaccaagaacggcgaggagcccctgcccagcgaggaggagcactgcagcgtggtggaggtgaccgaggaggaggtgaagaacagcgtgagactgatccccagctggaccaccgtgatcctggtgaagagcatgctgagaaagagaagcttcggcaaccccttcgagccccaggccagaagagaggagagaagcatgagcgcccccggcaacctgctggtgaaggagggcttcggcgagggcggcaagagccccgagctgcccggcgtgcaggaggacgaggccgccagctag

SEQ ID NO: 9733 - DNA, 1632 bp, synthetic construct
  misc_feature 1..1632: note = Description of Artificial Sequence: Synthetic coding sequence
  source 1..1632: mol_type = other DNA
atggagggcggccccgccgtgtgctgccaggaccccagagccgagctggtggagagagtggccgccatcgacgtgacccacctggaggaggccgacggcggccccgagcccaccagaaacggcgtggaccccccccccagagccagagccgccagcgtgatccccggcagcaccagcagactgctgcccgccagacccagcctgagcgccagaaagctgagcctgcaggagagacccgccggcagctacctggaggcccaggccggcccctacgccaccggccccgccagccacatcagccccagagcctggagaagacccaccatcgagagccaccacgtggccatcagcgacgccgaggactgcgtgcagctgaaccagtacaagctgcagagcgagatcggcaagggcgcctacggcgtggtgagactggcctacaacgagagcgaggacagacactacgccatgaaggtgctgagcaagaagaagctgctgaagcagtacggcttccccagaagacccccccccagaggcagccaggccgcccagggcggccccgccaagcagctgctgcccctggagagagtgtaccaggagatcgccatcctgaagaagctggaccacgtgaacgtggtgaagctgatcgaggtgctggacgaccccgccgaggacaacctgtacctggccctgcagaaccaggcccagaacatccagctggacagcaccaacatcgccaagccccacagcctgctgcccagcgagcagcaggacagcggcagcacctgggccgccagaagcgtgttcgacctgctgagaaagggccccgtgatggaggtgccctgcgacaagcccttcagcgaggagcaggccagactgtacctgagagacgtgatcctgggcctggagtacctgcactgccagaagatcgtgcacagagacatcaagcccagcaacctgctgctgggcgacgacggccacgtgaagatcgccgacttcggcgtgagcaaccagttcgagggcaacgacgcccagctgagcagcaccgccggcacccccgccttcatggcccccgaggccatcagcgacagcggccagagcttcagcggcaaggccctggacgtgtgggccaccggcgtgaccctgtactgcttcgtgtacggcaagtgccccttcatcgacgacttcatcctggccctgcacagaaagatcaagaacgagcccgtggtgttccccgaggagcccgagatcagcgaggagctgaaggacctgatcctgaagatgctggacaagaaccccgagaccagaatcggcgtgcccgacatcaagctgcacccctgggtgaccaagaacggcgaggagcccctgcccagcgaggaggagcactgcagcgtggtggaggtgaccgaggaggaggtgaagaacagcgtgagactgatccccagctggaccaccgtgatcctggtgaagagcatgctgagaaagagaagcttcggcaaccccttcgagccccaggccagaagagaggagagaagcatgagcgcccccggcaacctgctggtgaaggagggcttcggcgagggcggcaagagccccgagctgcccggcgtgcaggaggacgaggccgccagctag

SEQ ID NO: 9734 - DNA, 1695 bp, synthetic construct
  misc_feature 1..1695: note = Description of Artificial Sequence: Synthetic coding sequence
  source 1..1695: mol_type = other DNA
atggacgacttcgagagaagaagagagctgagaagacagaagagagaggagatgagactggaggccgagagaatcgcctaccagagaaacgacgacgacgaggaggaggccgccagagagagaagaagaagagccagacaggagagactgagacagaagcaggaggaggagagcctgggccaggtgaccgaccaggtggaggtgaacgcccagaacagcgtgcccgacgaggaggccaagaccaccaccaccaacacccaggtggagggcgacgacgaggccgccttcctggagagactggccagaagagaggagagaagacagaagagactgcaggaggccctggagagacagaaggagttcgaccccaccatcaccgacgccagcctgagcctgcccagcagaagaatgcagaacgacaccgccgagaacgagaccaccgagaaggaggagaagagcgagagcagacaggagagatacgagatcgaggagaccgagaccgtgaccaagagctaccagaagaacgactggagagacgccgaggagaacaagaaggaggacaaggagaaggaggaggaggaggaggagaagcccaagagaggcagcatcggcgagaaccagggcgaggagaagggcaccaaggtgcaggccaagagagagaagctgcaggaggacaagcccaccttcaagaaggaggagatcaaggacgagaagatcaagaaggacaaggagcccaaggaggaggtgaagagcttcatggacagaaagaagggcttcaccgaggtgaagagccagaacggcgagttcatgacccacaagctgaagcacaccgagaacaccttcagcagacccggcggcagagccagcgtggacaccaaggaggccgagggcgccccccaggtggaggccggcaagagactggaggagctgagaagaagaagaggcgagaccgagagcgaggagttcgagaagctgaagcagaagcagcaggaggccgccctggagctggaggagctgaagaagaagagagaggagagaagaaaggtgctggaggaggaggagcagagaagaaagcaggaggaggccgacagaaagctgagagaggaggaggagaagagaagactgaaggaggagatcgagagaagaagagccgaggccgccgagaagagacagaagatgcccgaggacggcctgagcgacgacaagaagcccttcaagtgcttcacccccaagggcagcagcctgaagatcgaggagagagccgagttcctgaacaagagcgtgcagaagagcagcggcgtgaagagcacccaccaggccgccatcgtgagcaagatcgacagcagactggagcagtacaccagcgccatcgagggcaccaagagcgccaagcccaccaagcccgccgccagcgacctgcccgtgcccgccgagggcgtgagaaacatcaagagcatgtgggagaagggcaacgtgttcagcagccccaccgccgccggcacccccaacaaggagaccgccggcctgaaggtgggcgtgagcagcagaatcaacgagtggctgaccaagacccccgacggcaacaagagccccgcccccaagcccagcgacctgagacccggcgacgtgagcagcaagagaaacctgtgggagaagcagagcgtggacaaggtgaccagccccaccaaggtgtag

SEQ ID NO: 9735 - DNA, 2382 bp, synthetic construct
  misc_feature 1..2382: note = Description of Artificial Sequence: Synthetic coding sequence
  source 1..2382: mol_type = other DNA
atggacgacttcgagagaagaagagagctgagaagacagaagagagaggagatgagactggaggccgagagaatcgcctaccagagaaacgacgacgacgaggaggaggccgccagagagagaagaagaagagccagacaggagagactgagacagaagcaggaggaggagagcctgggccaggtgaccgaccaggtggaggtgaacgcccagaacagcgtgcccgacgaggaggccaagaccaccaccaccaacacccaggtggagggcgacgacgaggccgccttcctggagagactggccagaagagaggagagaagacagaagagactgcaggaggccctggagagacagaaggagttcgaccccaccatcaccgacgccagcctgagcctgcccagcagaagaatgcagaacgacaccgccgagaacgagaccaccgagaaggaggagaagagcgagagcagacaggagagatacgagatcgaggagaccgagaccgtgaccaagagctaccagaagaacgactggagagacgccgaggagaacaagaaggaggacaaggagaaggaggaggaggaggaggagaagcccaagagaggcagcatcggcgagaaccaggtggaggtgatggtggaggagaagaccaccgagagccaggaggagaccgtggtgatgagcctgaagaacggccagatcagcagcgaggagcccaagcaggaggaggagagagagcagggcagcgacgagatcagccaccacgagaagatggaggaggaggacaaggagagagccgaggccgagagagccagactggaggccgaggagagagagagaatcaaggccgagcaggacaagaagatcgccgacgagagagccagaatcgaggccgaggagaaggccgccgcccaggagagagagagaagagaggccgaggagagagagagaatgagagaggaggagaagagagccgccgaggagagacagagaatcaaggaggaggagaagagagccgccgaggagagacagagaatcaaggaggaggagaagagagccgccgaggagagacagagaatcaaggaggaggagaagagagccgccgaggagagacagagagccagagccgaggaggaggagaaggccaaggtggaggagcagaagagaaacaagcagctggaggagaagaagcacgccatgcaggagaccaagatcaagggcgagaaggtggagcagaagatcgagggcaagtgggtgaacgagaagaaggcccaggaggacaagctgcagaccgccgtgctgaagaagcagggcgaggagaagggcaccaaggtgcaggccaagagagagaagctgcaggaggacaagcccaccttcaagaaggaggagatcaaggacgagaagatcaagaaggacaaggagcccaaggaggaggtgaagagcttcatggacagaaagaagggcttcaccgaggtgaagagccagaacggcgagttcatgacccacaagctgaagcacaccgagaacaccttcagcagacccggcggcagagccagcgtggacaccaaggaggccgagggcgccccccaggtggaggccggcaagagactggaggagctgagaagaagaagaggcgagaccgagagcgaggagttcgagaagctgaagcagaagcagcaggaggccgccctggagctggaggagctgaagaagaagagagaggagagaagaaaggtgctggaggaggaggagcagagaagaaagcaggaggaggccgacagaaagctgagagaggaggaggagaagagaagactgaaggaggagatcgagagaagaagagccgaggccgccgagaagagacagaagatgcccgaggacggcctgagcgacgacaagaagcccttcaagtgcttcacccccaagggcagcagcctgaagatcgaggagagagccgagttcctgaacaagagcgtgcagaagagcagcggcgtgaagagcacccaccaggccgccatcgtgagcaagatcgacagcagactggagcagtacaccagcgccatcgagggcaccaagagcgccaagcccaccaagcccgccgccagcgacctgcccgtgcccgccgagggcgtgagaaacatcaagagcatgtgggagaagggcaacgtgttcagcagccccaccgccgccggcacccccaacaaggagaccgccggcctgaaggtgggcgtgagcagcagaatcaacgagtggctgaccaagacccccgacggcaacaagagccccgcccccaagcccagcgacctgagacccggcgacgtgagcagcaagagaaacctgtgggagaagcagagcgtggacaaggtgaccagccccaccaaggtgtag

SEQ ID NO: 9736 - DNA, 1617 bp, synthetic construct
  misc_feature 1..1617: note = Description of Artificial Sequence: Synthetic coding sequence
  source 1..1617: mol_type = other DNA
atggacgacttcgagagaagaagagagctgagaagacagaagagagaggagatgagactggaggccgagagaatcgcctaccagagaaacgacgacgacgaggaggaggccgccagagagagaagaagaagagccagacaggagagactgagacagaagcaggaggaggagagcctgggccaggtgaccgaccaggtggaggtgaacgcccagaacagcgtgcccgacgaggaggccaagaccaccaccaccaacacccaggtggagggcgacgacgaggccgccttcctggagagactggccagaagagaggagagaagacagaagagactgcaggaggccctggagagacagaaggagttcgaccccaccatcaccgacgccagcctgagcctgcccagcagaagaatgcagaacgacaccgccgagaacgagaccaccgagaaggaggagaagagcgagagcagacaggagagatacgagatcgaggagaccgagaccgtgaccaagagctaccagaagaacgactggagagacgccgaggagaacaagaaggaggacaaggagaaggaggaggaggaggaggagaagcccaagagaggcagcatcggcgagaaccagatcaaggacgagaagatcaagaaggacaaggagcccaaggaggaggtgaagagcttcatggacagaaagaagggcttcaccgaggtgaagagccagaacggcgagttcatgacccacaagctgaagcacaccgagaacaccttcagcagacccggcggcagagccagcgtggacaccaaggaggccgagggcgccccccaggtggaggccggcaagagactggaggagctgagaagaagaagaggcgagaccgagagcgaggagttcgagaagctgaagcagaagcagcaggaggccgccctggagctggaggagctgaagaagaagagagaggagagaagaaaggtgctggaggaggaggagcagagaagaaagcaggaggaggccgacagaaagctgagagaggaggaggagaagagaagactgaaggaggagatcgagagaagaagagccgaggccgccgagaagagacagaagatgcccgaggacggcctgagcgacgacaagaagcccttcaagtgcttcacccccaagggcagcagcctgaagatcgaggagagagccgagttcctgaacaagagcgtgcagaagagcagcggcgtgaagagcacccaccaggccgccatcgtgagcaagatcgacagcagactggagcagtacaccagcgccatcgagggcaccaagagcgccaagcccaccaagcccgccgccagcgacctgcccgtgcccgccgagggcgtgagaaacatcaagagcatgtgggagaagggcaacgtgttcagcagccccaccgccgccggcacccccaacaaggagaccgccggcctgaaggtgggcgtgagcagcagaatcaacgagtggctgaccaagacccccgacggcaacaagagccccgcccccaagcccagcgacctgagacccggcgacgtgagcagcaagagaaacctgtgggagaagcagagcgtggacaaggtgaccagccccaccaaggtgtag

SEQ ID NO: 9737 - DNA, 1677 bp, synthetic construct
  misc_feature 1..1677: note = Description of Artificial Sequence: Synthetic coding sequence
  source 1..1677: mol_type = other DNA
atgctgggcggcagcggcagccacggcagaagaagcctggccgccctgagccagatcgcctaccagagaaacgacgacgacgaggaggaggccgccagagagagaagaagaagagccagacaggagagactgagacagaagcaggaggaggagagcctgggccaggtgaccgaccaggtggaggtgaacgcccagaacagcgtgcccgacgaggaggccaagaccaccaccaccaacacccaggtggagggcgacgacgaggccgccttcctggagagactggccagaagagaggagagaagacagaagagactgcaggaggccctggagagacagaaggagttcgaccccaccatcaccgacgccagcctgagcctgcccagcagaagaatgcagaacgacaccgccgagaacgagaccaccgagaaggaggagaagagcgagagcagacaggagagatacgagatcgaggagaccgagaccgtgaccaagagctaccagaagaacgactggagagacgccgaggagaacaagaaggaggacaaggagaaggaggaggaggaggaggagaagcccaagagaggcagcatcggcgagaaccagggcgaggagaagggcaccaaggtgcaggccaagagagagaagctgcaggaggacaagcccaccttcaagaaggaggagatcaaggacgagaagatcaagaaggacaaggagcccaaggaggaggtgaagagcttcatggacagaaagaagggcttcaccgaggtgaagagccagaacggcgagttcatgacccacaagctgaagcacaccgagaacaccttcagcagacccggcggcagagccagcgtggacaccaaggaggccgagggcgccccccaggtggaggccggcaagagactggaggagctgagaagaagaagaggcgagaccgagagcgaggagttcgagaagctgaagcagaagcagcaggaggccgccctggagctggaggagctgaagaagaagagagaggagagaagaaaggtgctggaggaggaggagcagagaagaaagcaggaggaggccgacagaaagctgagagaggaggaggagaagagaagactgaaggaggagatcgagagaagaagagccgaggccgccgagaagagacagaagatgcccgaggacggcctgagcgacgacaagaagcccttcaagtgcttcacccccaagggcagcagcctgaagatcgaggagagagccgagttcctgaacaagagcgtgcagaagagcagcggcgtgaagagcacccaccaggccgccatcgtgagcaagatcgacagcagactggagcagtacaccagcgccatcgagggcaccaagagcgccaagcccaccaagcccgccgccagcgacctgcccgtgcccgccgagggcgtgagaaacatcaagagcatgtgggagaagggcaacgtgttcagcagccccaccgccgccggcacccccaacaaggagaccgccggcctgaaggtgggcgtgagcagcagaatcaacgagtggctgaccaagacccccgacggcaacaagagccccgcccccaagcccagcgacctgagacccggcgacgtgagcagcaagagaaacctgtgggagaagcagagcgtggacaaggtgaccagccccaccaaggtgtag

SEQ ID NO: 9738 - DNA, 1617 bp, synthetic construct; identical to SEQ ID NO: 9736
  misc_feature 1..1617: note = Description of Artificial Sequence: Synthetic coding sequence
  source 1..1617: mol_type = other DNA

SEQ ID NO: 9739 - DNA, 1692 bp, synthetic construct
  misc_feature 1..1692: note = Description of Artificial Sequence: Synthetic coding sequence
  source 1..1692: mol_type = other DNA
atggacgacttcgagagaagaagagagctgagaagacagaagagagaggagatgagactggaggccgagagaatcgcctaccagagaaacgacgacgacgaggaggaggccgccagagagagaagaagaagagccagacaggagagactgagacagaagcaggaggaggagagcctgggccaggtgaccgaccaggtggaggtgaacgcccagaacagcgtgcccgacgaggaggccaagaccaccaccaccaacacccaggtggagggcgacgacgaggccgccttcctggagagactggccagaagagaggagagaagacagaagagactgcaggaggccctggagagacagaaggagttcgaccccaccatcaccgacgccagcctgagcctgcccagcagaagaatgcagaacgacaccgccgagaacgagaccaccgagaaggaggagaagagcgagagcagacaggagagatacgagatcgaggagaccgagaccgtgaccaagagctaccagaagaacgactggagagacgccgaggagaacaagaaggaggacaaggagaaggaggaggaggaggaggagaagcccaagagaggcagcatcggcgagaaccagggcgaggagaagggcaccaaggtgcaggccaagagagagaagctgcaggaggacaagcccaccttcaagaaggaggagatcaaggacgagaagatcaagaaggacaaggagcccaaggaggaggtgaagagcttcatggacagaaagaagggcttcaccgaggtgaagagccagaacggcgagttcatgacccacaagctgaagcacaccgagaacaccttcagcagacccggcggcagagccagcgtggacaccaaggaggccgagggcgccccccaggtggaggccggcaagagactggaggagctgagaagaagaagaggcgagaccgagagcgaggagttcgagaagctgaagcagaagcagcaggaggccgccctggagctggaggagctgaagaagaagagagaggagagaagaaaggtgctggaggaggaggagcagagaagaaagcaggaggaggccgacagaaagctgagagaggaggaggagaagagaagactgaaggaggagatcgagagaagaagagccgaggccgccgagaagagacagaagatgcccgaggacggcctgagcgacgacaagaagcccttcaagtgcttcacccccaagggcagcagcctgaagatcgaggagagagccgagttcctgaacaagagcgtgcagaagagcggcgtgaagagcacccaccaggccgccatcgtgagcaagatcgacagcagactggagcagtacaccagcgccatcgagggcaccaagagcgccaagcccaccaagcccgccgccagcgacctgcccgtgcccgccgagggcgtgagaaacatcaagagcatgtgggagaagggcaacgtgttcagcagccccaccgccgccggcacccccaacaaggagaccgccggcctgaaggtgggcgtgagcagcagaatcaacgagtggctgaccaagacccccgacggcaacaagagccccgcccccaagcccagcgacctgagacccggcgacgtgagcagcaagagaaacctgtgggagaagcagagcgtggacaaggtgaccagccccaccaaggtgtag

SEQ ID NO: 9740 - DNA, 1599 bp, synthetic construct
  misc_feature 1..1599: note = Description of Artificial Sequence: Synthetic coding sequence
  source 1..1599: mol_type = other DNA
atgctgggcggcagcggcagccacggcagaagaagcctggccgccctgagccagatcgcctaccagagaaacgacgacgacgaggaggaggccgccagagagagaagaagaagagccagacaggagagactgagacagaagcaggaggaggagagcctgggccaggtgaccgaccaggtggaggtgaacgcccagaacagcgtgcccgacgaggaggccaagaccaccaccaccaacacccaggtggagggcgacgacgaggccgccttcctggagagactggccagaagagaggagagaagacagaagagactgcaggaggccctggagagacagaaggagttcgaccccaccatcaccgacgccagcctgagcctgcccagcagaagaatgcagaacgacaccgccgagaacgagaccaccgagaaggaggagaagagcgagagcagacaggagagatacgagatcgaggagaccgagaccgtgaccaagagctaccagaagaacgactggagagacgccgaggagaacaagaaggaggacaaggagaaggaggaggaggaggaggagaagcccaagagaggcagcatcggcgagaaccagatcaaggacgagaagatcaagaaggacaaggagcccaaggaggaggtgaagagcttcatggacagaaagaagggcttcaccgaggtgaagagccagaacggcgagttcatgacccacaagctgaagcacaccgagaacaccttcagcagacccggcggcagagccagcgtggacaccaaggaggccgagggcgccccccaggtggaggccggcaagagactggaggagctgagaagaagaagaggcgagaccgagagcgaggagttcgagaagctgaagcagaagcagcaggaggccgccctggagctggaggagctgaagaagaagagagaggagagaagaaaggtgctggaggaggaggagcagagaagaaagcaggaggaggccgacagaaagctgagagaggaggaggagaagagaagactgaaggaggagatcgagagaagaagagccgaggccgccgagaagagacagaagatgcccgaggacggcctgagcgacgacaagaagcccttcaagtgcttcacccccaagggcagcagcctgaagatcgaggagagagccgagttcctgaacaagagcgtgcagaagagcagcggcgtgaagagcacccaccaggccgccatcgtgagcaagatcgacagcagactggagcagtacaccagcgccatcgagggcaccaagagcgccaagcccaccaagcccgccgccagcgacctgcccgtgcccgccgagggcgtgagaaacatcaagagcatgtgggagaagggcaacgtgttcagcagccccaccgccgccggcacccccaacaaggagaccgccggcctgaaggtgggcgtgagcagcagaatcaacgagtggctgaccaagacccccgacggcaacaagagccccgcccccaagcccagcgacctgagacccggcgacgtgagcagcaagagaaacctgtgggagaagcagagcgtggacaaggtgaccagccccaccaaggtgtag

SEQ ID NO: 9741 - DNA, 528 bp, synthetic construct
  misc_feature 1..528: note = Description of Artificial Sequence: Synthetic coding sequence
  source 1..528: mol_type = other DNA
atgcccgaggacggcctgagcgacgacaagaagcccttcaagtgcttcacccccaagggcagcagcctgaagatcgaggagagagccgagttcctgaacaagagcgtgcagaagagcggcgtgaagagcacccaccaggccgccatcgtgagcaagatcgacagcagactggagcagtacaccagcgccatcgagggcaccaagagcgccaagcccaccaagcccgccgccagcgacctgcccgtgcccgccgagggcgtgagaaacatcaagagcatgtgggagaagggcaacgtgttcagcagccccaccgccgccggcacccccaacaaggagaccgccggcctgaaggtgggcgtgagcagcagaatcaacgagtggctgaccaagacccccgacggcaacaagagccccgcccccaagcccagcctgaccttctgcagcagcctgttcggcctgtggctgatcggcaacctgctgctgctgcccagcttcctgcccctgctgcccgagtgggtgttcctgtag

SEQ ID NO: 9742 - DNA, 219 bp, synthetic construct
  misc_feature 1..219: note = Description of Artificial Sequence: Synthetic coding sequence
  source 1..219: mol_type = other DNA
atggacgacttcgagagaagaagagagctgagaagacagaagagagaggagatgagactggaggccgagagaatcgcctaccagagaaacgacgacgacgaggaggaggccgccagagagagaagaagaagagccagacaggagagactgagacagaagcaggaggaggagagcctgggccaggtgaccgaccaggtggaggtgaacgcccagaactag

SEQ ID NO: 9743 - DNA, 1380 bp, synthetic construct
  misc_feature 1..1380: note = Description of Artificial Sequence: Synthetic coding sequence
  source 1..1380: mol_type = other DNA
atggacgacttcgagagaagaagagagctgagaagacagaagagagaggagatgagactggaggccgagagaatcgcctaccagagaaacgacgacgacgaggaggaggccgccagagagagaagaagaagagccagacaggagagactgagacagaagcaggaggaggagagcctgggccaggtgaccgaccaggtggaggtgaacgcccagaacagcgtgcccgacgaggaggccaagaccaccaccaccaacacccaggtggagggcgacgacgaggccgccttcctggagagactggccagaagagaggagagaagacagaagagactgcaggaggccctggagagacagaaggagttcgaccccaccatcaccgacgccagcctgagcctgcccagcagaagaatgcagaacgacaccgccgagaacgagaccaccgagaaggaggagaagagcgagagcagacaggagagatacgagatcgaggagaccgagaccgtgaccaagagctaccagaagaacgactggagagacgccgaggagaacaagaaggaggacaaggagaaggaggaggaggaggaggagaagcccaagagaggcagcatcggcgagaaccagatcaaggacgagaagatcaagaaggacaaggagcccaaggaggaggtgaagagcttcatggacagaaagaagggcttcaccgaggtgaagagccagaacggcgagttcatgacccacaagctgaagcacaccgagaacaccttcagcagacccggcggcagagccagcgtggacaccaaggaggccgagggcgccccccaggtggaggccggcaagagactggaggagctgagaagaagaagaggcgagaccgagagcgaggagttcgagaagctgaagcagaagcagcaggaggccgccctggagctggaggagctgaagaagaagagagaggagagaagaaaggtgctggaggaggaggagcagagaagaaagcaggaggaggccgacagaaagctgagagaggaggaggagaagagaagactgaaggaggagatcgagagaagaagagccgaggccgccgagaagagacagaagatgcccgaggacggcctgagcgacgacaagaagcccttcaagtgcttcacccccaagggcagcagcctgaagatcgaggagagagccgagttcctgaacaagagcgtgcagaagagcagcggcgtgaagagcacccaccaggccgccatcgtgagcaagatcgacagcagactggagcagtacaccagcgccatcgagggcaccaagagcgccaagcccaccaagcccgccgccagcgacctgcccgtgcccgccgagggcgtgagaaacatcaagagctag

SEQ ID NO: 9744 - DNA, 219 bp, synthetic construct; identical to SEQ ID NO: 9742
  misc_feature 1..219: note = Description of Artificial Sequence: Synthetic coding sequence
  source 1..219: mol_type = other DNA

SEQ ID NO: 9745 - DNA, 1632 bp, synthetic construct
  misc_feature 1..1632: note = Description of Artificial Sequence: Synthetic coding sequence
  source 1..1632: mol_type = other DNA
atgaccagctacatgaaggtggacagacagtggaacgccgagatcctggagctgatcctgggcaccggccagctgagcaccggccagatcgcctaccagagaaacgacgacgacgaggaggaggccgccagagagagaagaagaagagccagacaggagagactgagacagaagcaggaggaggagagcctgggccaggtgaccgaccaggtggaggtgaacgcccagaacagcgtgcccgacgaggaggccaagaccaccaccaccaacacccaggtggagggcgacgacgaggccgccttcctggagagactggccagaagagaggagagaagacagaagagactgcaggaggccctggagagacagaaggagttcgaccccaccatcaccgacgccagcctgagcctgcccagcagaagaatgcagaacgacaccgccgagaacgagaccaccgagaaggaggagaagagcgagagcagacaggagagatacgagatcgaggagaccgagaccgtgaccaagagctaccagaagaacgactggagagacgccgaggagaacaagaaggaggacaaggagaaggaggaggaggaggaggagaagcccaagagaggcagcatcggcgagaaccagatcaaggacgagaagatcaagaaggacaaggagcccaaggaggaggtgaagagcttcatggacagaaagaagggcttcaccgaggtgaagagccagaacggcgagttcatgacccacaagctgaagcacaccgagaacaccttcagcagacccggcggcagagccagcgtggacaccaaggaggccgagggcgccccccaggtggaggccggcaagagactggaggagctgagaagaagaagaggcgagaccgagagcgaggagttcgagaagctgaagcagaagcagcaggaggccgccctggagctggaggagctgaagaagaagagagaggagagaagaaaggtgctggaggaggaggagcagagaagaaagcaggaggaggccgacagaaagctgagagaggaggaggagaagagaagactgaaggaggagatcgagagaagaagagccgaggccgccgagaagagacagaagatgcccgaggacggcctgagcgacgacaagaagcccttcaagtgcttcacccccaagggcagcagcctgaagatcgaggagagagccgagttcctgaacaagagcgtgcagaagagcagcggcgtgaagagcacccaccaggccgccatcgtgagcaagatcgacagcagactggagcagtacaccagcgccatcgagggcaccaagagcgccaagcccaccaagcccgccgccagcgacctgcccgtgcccgccgagggcgtgagaaacatcaagagcatgtgggagaagggcaacgtgttcagcagccccaccgccgccggcacccccaacaaggagaccgccggcctgaaggtgggcgtgagcagcagaatcaacgagtggctgaccaagacccccgacggcaacaagagccccgcccccaagcccagcgacctgagacccggcgacgtgagcagcaagagaaacctgtgggagaagcagagcgtggacaaggtgaccagccccaccaaggtgtag

SEQ ID NO: 9746 - DNA, 3975 bp, synthetic construct
  misc_feature 1..3975: note = Description of Artificial Sequence: Synthetic coding sequence
  source 1..3975: mol_type = other DNA
atggccgacagcctgtacaacatcagactgctgagagagttcagcaacgagtacctgaacaagtgcttctacctgaccctggaggacatgctgtacgcccccctggtgctgaagcccaacgtgatggtgttcatcgccgagctgttctggtggttcgagaacgtgaagcccgacttcgtgcagcccagagacgtgcaggagctgaaggacgccaagaccgtgctgcaccagaagagcagcagaccccccgtgcccatcagcaacgccaccaagagaagcttcctgggcagccccgccgccggcaccctggccgagctgcagccccccgtgcagctgcccgccgagggctgccacagacactacctgcaccccgaggagcccgagtacctgggcaagggcaccgccgccttcagccccagccaccccctgctgcccctgagacagaagcagcagaagagcatccagggcgaggacatccccgaccagagacacagaagcaacagcctgaccagagtggacggccagcccagaggcgccgccatcgcctggcccgagaagaagaccagacccgccagccagcccacccccttcgccctgcaccacgccgccagctgcgaggtggaccccagcagcggcgacagcatcagcctggccagaagcatcagcaaggacagcctggccagcaacatcgtgaacctgaccccccagaaccagccccaccccaccgccaccaagagccacggcaagagcctgctgagcaacgtgagcatcgaggacgaggaggaggagctggtggccatcgtgagagccgacgtggtgccccagcaggccgaccccgagttccccagagccagccccagagccctgggcctgaccgccaacgccagaagcccccagggccagctggacaccagcgagagcaagcccgacagcttcttcctggagcccctgatgcccgccgtgctgaagcccgccaaggagaagcaggtgatcaccaaggaggacgagagaggcgagggcagacccagaagcatcgtgagcagaagacccagcgagggcccccagcccctggtgagaagaaagatgaccggcagcagagacctgaacagaaccttcacccccatcccctgcagcgagttccccatgggcatcgaccccaccgagaccggccccctgagcgtggagaccgccggcgaggtgtgcggcggccccctggccctgggcggcttcgaccccttcccccagggccccagcaccgacggcttcttcctgcacgtgggcagagccgacgaggacaccgagggcagactgtacgtgagctgcagcaagagccccaacagccacgacagcgagccctggaccctgctgagacaggacagcgacagcgacgtggtggacatcgaggaggccgagcacgacttcatgggcgaggcccaccccgtggtgttcagcagatacatcggcgaggaggagagcgccaagctgcaggaggacatgaaggtgaaggagcacgaggacaaggacgacgccagcggcagaagcagcccctgcctgagcaccgccagccagatgagcagcgtgagcatggccagcggcagcgtgaagatgaccagcttcgccgagagaaagctgcagagactgaacagctgcgagaccaagagcagcaccagcagcagccagaagaccacccccgacgccagcgagagctgccccgcccccctgaccacctggagacagaagagagagcagagccccagccagcacggcaaggaccccgccagcctgctggccagcgagctggtgcagctgcacatgcagctggaggagaagagaagagccatcgaggcccagaagaagaagatggaggccctgagcgccagacagagactgaagctgggcaaggccgccttcctgcacgtggtgaagaagggcaaggccgaggccgccccccccctgagacccgagcacttcgccaaggagtacagccagcacaacggcgaggactgcggcgacgccgtgagcaagaccgaggacttcctggtgaaggaggagcagagagaggagctgctgcacgagccccaggacgtggacaaggagagcctggccttcgcccagcagcacaaggccaaggaccccgtggccctgcacgagctggagagaaacaaggtgatcagcgccgccctgctggaggacaccgtgggcgaggtggtggacgtgaacgagtgcgacctgagcatcgagaagctgaacgagaccatcagcaccctgcagcaggccatcctgaagatcagccagcagcaggagcagctgctgatgaagagccccaccgtgcccgtgcccggcagcaagaacaacagccaggaccacaaggtgaaggcccccgtgcacttcgtggagcccctgagccccaccggcgtggccggccacagaaaggcccccagactgggccagggcagaaacagcagaagcggcagacccgccgagctgaaggtgcccaaggacagaccccagggcagcagcagaagcaagacccccacccccagcgtggagaccctgccccacctgagacccttccccgccagcagccaccccagaacccccaccgaccccggcctggacagcgccctggagcccagcggcgacccccacggcaagtgcctgttcgacagctacagactgcacgacgagagcaaccagagaaccctgaccctgagcagcagcaaggacgccaacatcctgagcgagcagatgagcctgaaggaggtgctggacgccagcgtgaaggaggtgggcagcagcagcagcgacgtgagcggcaaggagagcgtgcccgtggaggagcccctgagaagcagagccagcctgatcgaggtggacctgagcgacctgaaggcccccgacgaggacggcgagctggtgagcctggacggcagcgccgacctggtgagcgagggcgaccagaagcccggcgtgggcttcttcttcaaggacgagcagaaggccgaggacgagctggccaagaagagagccgccttcctgctgaagcagcagagaaaggccgaggaggccagagtgagaaagcagcagctggaggccgaggtggagctgaagagagacgaggccagaagaaaggccgaggaggacagagtgagaaaggaggaggagaaggccagaagagagctgatcaagcaggagtacctgagaagaaagcagcagcagatcctggaggagcagggcctgggcaagcccaagagcaagcccaagaagcccagacccaagagcgtgcacagagaggagagctgcagcgacagcggcaccaagtgcagcagcacccccgacaacctgagcagaacccagagcggcagcagcctgagcctggccagcgccgccaccaccgagcccgagagcgtgcacagcggcggcacccccagccagagagtggagagcatggaggccctgcccatcctgagcagaaaccccagcagaagcaccgacagagactgggagaccgccagcgccgccagcagcctggccagcgtggccgagtacaccggccccaagctgttcaaggagcccagcagcaagagcaacaagcccatcatccacaacgccatcagccactgctgcctggccggcaaggtgaacgagccccacaagaacagcatcctggaggagctggagaagtgcgacgccaaccactacatcatcctgttcagagacgccggctgccagttcagagccctgtactgctactaccccgacaccgaggagatctacaagctgaccggcaccggccccaagaacatcaccaagaagatgatcgacaagctgtacaagtacagcagcgacagaaagcagttcaacctgatccccgccaagaccatgagcgtgagcgtggacgccctgaccatccacaaccacctgtggcagcccaagagacccgccgtgcccaagaaggcccagaccagaaagtag

SEQ ID NO: 9747 - DNA, 4809 bp, synthetic construct
  misc_feature 1..4809: note = Description of Artificial Sequence: Synthetic coding sequence
  source 1..4809: mol_type = other DNA
atggtggacgccagcggcagagccgccgccgagggctggagaaagatggaggccccccccgacggcgccgccgacctggtgcccctggacagatacgacgccgccagagccaagatcgccgccaacctgcagtggatctgcgccaaggcctacggcagagacaacatccccgaggacctgagagaccccttctacgtggaccagtacgagcaggagcacatcaagccccccgtgatcaagctgctgctgagcagcgagctgtactgcagagtgtgcagcctgatcctgaagggcgaccaggtggccgccctgcagggccaccagagcgtgatccaggccctgagcagaaagggcatctacgtgatggagagcgacgacacccccgtgaccgagagcgacctgagcagagcccccatcaagatgagcgcccacatggccatggtggacgccctgatgatggcctacaccgtggagatgatcagcatcgagaaggtggtggccagcgtgaagagattcagcaccttcagcgccagcaaggagctgccctacgacctggaggacgccatggtgttctggatcaacaaggtgaacctgaagatgagagagatcaccgagaaggaggtgaagctgaagcagcagctgctggagagccccgcccaccagaaggtgagatacagaagagagcacctgagcgccagacagagcccctacttccccctgctggaggacctgatgagagacggcagcgacggcgccgccctgctggccgtgatccactactactgccccgagcagatgaagctggacgacatctgcctgaaggaggtgaccagcatggccgacagcctgtacaacatcagactgctgagagagttcagcaacgagtacctgaacaagtgcttctacctgaccctggaggacatgctgtacgcccccctggtgctgaagcccaacgtgatggtgttcatcgccgagctgttctggtggttcgagaacgtgaagcccgacttcgtgcagcccagagacgtgcaggagctgaaggacgccaagaccgtgctgcaccagaagagcagcagaccccccgtgcccatcagcaacgccaccaagagaagcttcctgggcagccccgccgccggcaccctggccgagctgcagccccccgtgcagctgcccgccgagggctgccacagacactacctgcaccccgaggagcccgagtacctgggcaagggcaccgccgccttcagccccagccaccccctgctgcccctgagacagaagcagcagaagagcatccagggcgaggacatccccgaccagagacacagaagcaacagcctgaccagagtggacggccagcccagaggcgccgccatcgcctggcccgagaagaagaccagacccgccagccagcccacccccttcgccctgcaccacgccgccagctgcgaggtggaccccagcagcggcgacagcatcagcctggccagaagcatcagcaaggacagcctggccagcaacatcgtgaacctgaccccccagaaccagccccaccccaccgccaccaagagccacggcaagagcctgctgagcaacgtgagcatcgaggacgaggaggaggagctggtggccatcgtgagagccgacgtggtgccccagcaggccgaccccgagttccccagagccagccccagagccctgggcctgaccgccaacgccagaagcccccagggccagctggacaccagcgagagcaagcccgacagcttcttcctggagcccctgatgcccgccgtgctgaagcccgccaaggagaagcaggtgatcaccaaggaggacgagagaggcgagggcagacccagaagcatcgtgagcagaagacccagcgagggcccccagcccctggtgagaagaaagatgaccggcagcagagacctgaacagaaccttcacccccatcccctgcagcgagttccccatgggcatcgaccccaccgagaccggccccctgagcgtggagaccgccggcgaggtgtgcggcggccccctggccctgggcggcttcgaccccttcccccagggccccagcaccgacggcttcttcctgcacgtgggcagagccgacgaggacaccgagggcagactgtacgtgagctgcagcaagagccccaacagccacgacagcgagccctggaccctgctgagacaggacagcgacagcgacgtggtggacatcgaggaggccgagcacgacttcatgggcgaggcccaccccgtggtgttcagcagatacatcggcgaggaggagagcgccaagctgcaggaggacatgaaggtgaaggagcacgaggacaaggacgacgccagcggcagaagcagcccctgcctgagcaccgccagccagatgagcagcgtgagcatggccagcggcagcgtgaagatgaccagcttcgccgagagaaagctgcagagactgaacagctgcgagaccaagagcagcaccagcagcagccagaagaccacccccgacgccagcgagagctgccccgcccccctgaccacctggagacagaagagagagcagagccccagccagcacggcaaggaccccgccagcctgctggccagcgagctggtgcagctgcacatgcagctggaggagaagagaagagccatcgaggcccagaagaagaagatggaggccctgagcgccagacagagactgaagctgggcaaggccgccttcctgcacgtggtgaagaagggcaaggccgaggccgccccccccctgagacccgagcacttcgccaaggagtacagccagcacaacggcgaggactgcggcgacgccgtgagcaagaccgaggacttcctggtgaaggaggagcagagagaggagctgctgcacgagccccaggacgtggacaaggagagcctggccttcgcccagcagcacaaggccaaggaccccgtggccctgcacgagctggagagaaacaaggtgatcagcgccgccctgctggaggacaccgtgggcgaggtggtggacgtgaacgagtgcgacctgagcatcgagaagctgaacgagaccatcagcaccctgcagcaggccatcctgaagatcagccagcagcaggagcagctgctgatgaagagccccaccgtgcccgtgcccggcagcaagaacaacagccaggaccacaaggtgaaggcccccgtgcacttcgtggagcccctgagccccaccggcgtggccggccacagaaaggcccccagactgggccagggcagaaacagcagaagcggcagacccgccgagctgaaggtgcccaaggacagaccccagggcagcagcagaagcaagacccccacccccagcgtggagaccctgccccacctgagacccttccccgccagcagccaccccagaacccccaccgaccccggcctggacagcgccctggagcccagcggcgacccccacggcaagtgcctgttcgacagctacagactgcacgacgagagcaaccagagaaccctgaccctgagcagcagcaaggacgccaacatcctgagcgagcagatgagcctgaaggaggtgctggacgccagcgtgaaggaggtgggcagcagcagcagcgacgtgagcggcaaggagagcgtgcccgtggaggagcccctgagaagcagagccagcctgatcgaggtggacctgagcgacctgaaggcccccgacgaggacggcgagctggtgagcctggacggcagcgccgacctggtgagcgagggcgaccagaagcccggcgtgggcttcttcttcaaggacgagcagaaggccgaggacgagctggccaagaagagagccgccttcctgctgaagcagcagagaaaggccgaggaggccagagtgagaaagcagcagctggaggccgaggtggagctgaagagagacgaggccagaagaaaggccgaggaggacagagtgagaaaggaggaggagaaggccagaagagagctgatcaagcaggagtacctgagaagaaagcagcagcagatcctggaggagcagggcctgggcaagcccaagagcaagcccaagaagcccagacccaagagcgtgcacagagaggagagctgcagcgacagcggcaccaagtgcagcagcacccccgacaacctgagcagaacccagagcggcagcagcctgagcctggccagcgccgccaccaccgagcccgagagcgtgcacagcggcggcacccccagccagagagtggagagcatggaggccctgcccatcctgagcagaaaccccagcagaagcaccgacagagactgggagaccgccagcgccgccagcagcctggccagcgtggccgagtacaccggccccaagctgttcaaggagcccagcagcaagagcaacaagcccatcatccacaacgccatcagccactgctgcctggccggcaaggtgaacgagccccacaagaacagcatcctggaggagctggagaagtgcgacgccaaccactacatcatcctgttcagagacgccggctgccagttcagagccctgtactgctactaccccgacaccgaggagatctacaagctgaccggcaccggccccaagaacatcaccaagaagatgatcgacaagctgtacaagtacagcagcgacagaaagcagttcaacctgatccccgccaagaccatgagcgtgagcgtggacgccctgaccatccacaaccacctgtggcagcccaagagacccgccgtgcccaagaaggcccagaccagaaagtag

SEQ ID NO: 9748 - DNA, 4842 bp, synthetic construct
  misc_feature 1..4842: note = Description of Artificial Sequence: Synthetic coding sequence
  source 1..4842: mol_type = other DNA
atggtggacgccagcggcagagccgccgccgagggctggagaaagatggaggccccccccgacggcgccgccgacctggtgcccctggacagatacgacgccgccagagccaagatcgccgccaacctgcagtggatctgcgccaaggcctacggcagagacaacatccccgaggacctgagagaccccttctacgtggaccagtacgagcaggagcacatcaagccccccgtgatcaagctgctgctgagcagcgagctgtactgcagagtgtgcagcctgatcctgaagggcgaccaggtggccgccctgcagggccaccagagcgtgatccaggccctgagcagaaagggcatctacgtgatggagagcgacgacacccccgtgaccgagagcgacctgagcagagcccccatcaagatgagcgcccacatggccatggtggacgccctgatgatggcctacaccgtggagatgatcagcatcgagaaggtggtggccagcgtgaagagattcagcaccttcagcgccagcaaggagctgccctacgacctggaggacgccatggtgttctggatcaacaaggtgaacctgaagatgagagagatcaccgagaaggaggtgaagctgaagcagcagctgctggagagccccgcccaccagaagagccccagcaagtggtactggaagctggtgcccgtgagatacagaagagagcacctgagcgccagacagagcccctacttccccctgctggaggacctgatgagagacggcagcgacggcgccgccctgctggccgtgatccactactactgccccgagcagatgaagctggacgacatctgcctgaaggaggtgaccagcatggccgacagcctgtacaacatcagactgctgagagagttcagcaacgagtacctgaacaagtgcttctacctgaccctggaggacatgctgtacgcccccctggtgctgaagcccaacgtgatggtgttcatcgccgagctgttctggtggttcgagaacgtgaagcccgacttcgtgcagcccagagacgtgcaggagctgaaggacgccaagaccgtgctgcaccagaagagcagcagaccccccgtgcccatcagcaacgccaccaagagaagcttcctgggcagccccgccgccggcaccctggccgagctgcagccccccgtgcagctgcccgccgagggctgccacagacactacctgcaccccgaggagcccgagtacctgggcaagggcaccgccgccttcagccccagccaccccctgctgcccctgagacagaagcagcagaagagcatccagggcgaggacatccccgaccagagacacagaagcaacagcctgaccagagtggacggccagcccagaggcgccgccatcgcctggcccgagaagaagaccagacccgccagccagcccacccccttcgccctgcaccacgccgccagctgcgaggtggaccccagcagcggcgacagcatcagcctggccagaagcatcagcaaggacagcctggccagcaacatcgtgaacctgaccccccagaaccagccccaccccaccgccaccaagagccacggcaagagcctgctgagcaacgtgagcatcgaggacgaggaggaggagctggtggccatcgtgagagccgacgtggtgccccagcaggccgaccccgagttccccagagccagccccagagccctgggcctgaccgccaacgccagaagcccccagggccagctggacaccagcgagagcaagcccgacagcttcttcctggagcccctgatgcccgccgtgctgaagcccgccaaggagaagcaggtgatcaccaaggaggacgagagaggcgagggcagacccagaagcatcgtgagcagaagacccagcgagggcccccagcccctggtgagaagaaagatgaccggcagcagagacctgaacagaaccttcacccccatcccctgcagcgagttccccatgggcatcgaccccaccgagaccggccccctgagcgtggagaccgccggcgaggtgtgcggcggccccctggccctgggcggcttcgaccccttcccccagggccccagcaccgacggcttcttcctgcacgtgggcagagccgacgaggacaccgagggcagactgtacgtgagctgcagcaagagccccaacagccacgacagcgagccctggaccctgctgagacaggacagcgacagcgacgtggtggacatcgaggaggccgagcacgacttcatgggcgaggcccaccccgtggtgttcagcagatacatcggcgaggaggagagcgccaagctgcaggaggacatgaaggtgaaggagcacgaggacaaggacgacgccagcggcagaagcagcccctgcctgagcaccgccagccagatgagcagcgtgagcatggccagcggcagcgtgaagatgaccagcttcgccgagagaaagctgcagagactgaacagctgcgagaccaagagcagcaccagcagcagccagaagaccacccccgacgccagcgagagctgccccgcccccctgaccacctggagacagaagagagagcagagccccagccagcacggcaaggaccccgccagcctgctggccagcgagctggtgcagctgcacatgcagctggaggagaagagaagagccatcgaggcccagaagaagaagatggaggccctgagcgccagacagagactgaagctgggcaaggccgccttcctgcacgtggtgaagaagggcaaggccgaggccgccccccccctgagacccgagcacttcgccaaggagtacagccagcacaacggcgaggactgcggcgacgccgtgagcaagaccgaggacttcctggtgaaggaggagcagagagaggagctgctgcacgagccccaggacgtggacaaggagagcctggccttcgcccagcagcacaaggccaaggaccccgtggccctgcacgagctggagagaaacaaggtgatcagcgccgccctgctggaggacaccgtgggcgaggtggtggacgtgaacgagtgcgacctgagcatcgagaagctgaacgagaccatcagcaccctgcagcaggccatcctgaagatcagccagcagcaggagcagctgctgatgaagagccccaccgtgcccgtgcccggcagcaagaacaacagccaggaccacaaggtgaaggcccccgtgcacttcgtggagcccctgagccccaccggcgtggccggccacagaaaggcccccagactgggccagggcagaaacagcagaagcggcagacccgccgagctgaaggtgcccaaggacagaccccagggcagcagcagaagcaagacccccacccccagcgtggagaccctgccccacctgagacccttccccgccagcagccaccccagaacccccaccgaccccggcctggacagcgccctggagcccagcggcgacccccacggcaagtgcctgttcgacagctacagactgcacgacgagagcaaccagagaaccctgaccctgagcagcagcaaggacgccaacatcctgagcgagcagatgagcctgaaggaggtgctggacgccagcgtgaaggaggtgggcagcagcagcagcgacgtgagcggcaaggagagcgtgcccgtggaggagcccctgagaagcagagccagcctgatcgaggtggacctgagcgacctgaaggcccccgacgaggacggcgagctggtgagcctggacggcagcgccgacctggtgagcgagggcgaccagaagcccggcgtgggcttcttcttcaaggacgagcagaaggccgaggacgagctggccaagaagagagccgccttcctgctgaagcagcagagaaaggccgaggaggccagagtgagaaagcagcagctggaggccgaggtggagctgaagagagacgaggccagaagaaaggccgaggaggacagagtgagaaaggaggaggagaaggccagaagagagctgatcaagcaggagtacctgagaagaaagcagcagcagatcctggaggagcagggcctgggcaagcccaagagcaagcccaagaagcccagacccaagagcgtgcacagagaggagagctgcagcgacagcggcaccaagtgcagcagcacccccgacaacctgagcagaacccagagcggcagcagcctgagcctggccagcgccgccaccaccgagcccgagagcgtgcacagcggcggcacccccagccagagagtggagagcatggaggccctgcccatcctgagcagaaaccccagcagaagcaccgacagagactgggagaccgccagcgccgccagcagcctggccagcgtggccgagtacaccggccccaagctgttcaaggagcccagcagcaagagcaacaagcccatcatccacaacgccatcagccactgctgcctggccggcaaggtgaacgagccccacaagaacagcatcctggaggagctggagaagtgcgacgccaaccactacatcatcctgttcagagacgccggctgccagttcagagccctgtactgctactaccccgacaccgaggagatctacaagctgaccggcaccggccccaagaacatcaccaagaagatgatcgacaagctgtacaagtacagcagcgacagaaagcagttcaacctgatccccgccaagaccatgagcgtgagcgtggacgccctgaccatccacaaccacctgtggcagcccaagagacccgccgtgcccaagaaggcccagaccagaaagtag

SEQ ID NO: 9749 - DNA, 1983 bp, synthetic construct
  misc_feature 1..1983: note = Description of Artificial Sequence: Synthetic coding sequence
  source 1..1983: mol_type = other DNA
atgagaatgcccagcagcacctgggccagaatcatgagcagctgcggctgcgacgcctgcagagtgggccccagcagcgtgatgagacccagccccagataccccagagcctgggtgaccagaacctgggtgcccatcccccccagacccatggccagcagcggcagcgtgcccagagactgctggctgctggccgccatcgccagcctgaccctgaacgacaccctgctgcacagagtggtgccccacggccagagcttccagaacggctacgccggcatcttccacttccagctgtggcagttcggcgagtgggtggacgtggtggtggacgacctgctgcccatcaaggacggcaagctggtgttcgtgcacagcgccgagggcaacgagttctggagcgccctgctggagaaggcctacgccaaggtgaacggcagctacgaggccctgagcggcggcagcaccagcgagggcttcgaggacttcaccggcggcgtgaccgagtggtacgagctgagaaaggcccccagcgacctgtaccagatcatcctgaaggccctggagagaggcagcctgctgggctgcagcatcgacatcagcagcgtgctggacatggaggccatcaccttcaagaagctggtgaagggccacgcctacagcgtgaccggcgccaagcaggtgaactacagaggccaggtggtgagcctgatcagaatgagaaacccctggggcgaggtggagtggaccggcgcctggagcgacagcagcagcgagtggaacaacgtggacccctacgagagagaccagctgagagtgaagatggaggacggcgagttctggatgagcttcagagacttcatgagagagttcaccagactggagatctgcaacctgacccccgacgccctgaagagcagaaccatcagaaagtggaacaccaccctgtacgagggcacctggagaagaggcagcaccgccggcggctgcagaaactaccccgccaccttctgggtgaacccccagttcaagatcagactggacgagaccgacgaccccgacgactacggcgacagagagagcggctgcagcttcgtgctggccctgatgcagaagcacagaagaagagagagaagattcggcagagacatggagaccatcggcttcgccgtgtacgaggtgccccccgagctggtgggccagcccgccgtgcacctgaagagagacttcttcctggccaacgccagcagagccagaagcgagcagttcatcaacctgagagaggtgagcaccagattcagactgccccccggcgagtacgtggtggtgcccagcaccttcgagcccaacaaggagggcgacttcgtgctgagattcttcagcgagaagagcgccggcaccgtggagctggacgaccagatccaggccaacctgcccgacgagcaggtgctgagcgaggaggagatcgacgagaacttcaaggccctgttcagacagctggccggcgaggacatggagatcagcgtgaaggagctgagaaccatcctgaacagaatcatcagcaagcacaaggacctgagaaccaagggcttcagcctggagagctgcagaagcatggtgaacctgatggacagagacggcaacggcaagctgggcctggtggagttcaacatcctgtggaacagaatcagaaactacctgagcatcttcagaaagttcgacctggacaagagcggcagcatgagcgcctacgagatgagaatggccatcgagagcgccggcttcaagctgaacaagaagctgtacgagctgatcatcaccagatacagcgagcccgacctggccgtggacttcgacaacttcgtgtgctgcctggtgagactggagaccatgttcagattcttcaagaccctggacaccgacctggacggcgtggtgaccttcgacctgttcaagtggctgcagctgaccatgttcgcctag

SEQ ID NO: 9750 - DNA, 2145 bp, synthetic construct
  misc_feature 1..2145: note = Description of Artificial Sequence: Synthetic coding sequence
  source 1..2145: mol_type = other DNA
atgagcgaggagatcatcacccccgtgtactgcaccggcgtgagcgcccaggtgcagaagcagagagccagagagctgggcctgggcagacacgagaacgccatcaagtacctgggccaggactacgagcagctgagagtgagatgcctgcagagcggcaccctgttcagagacgaggccttcccccccgtgccccagagcctgggctacaaggacctgggccccaacagcagcaagacctacggcatcaagtggaagagacccaccgagctgctgagcaacccccagttcatcgtggacggcgccaccagaaccgacatctgccagggcgccctgggcgactgctggctgctggccgccatcgccagcctgaccctgaacgacaccctgctgcacagagtggtgccccacggccagagcttccagaacggctacgccggcatcttccacttccagctgtggcagttcggcgagtgggtggacgtggtggtggacgacctgctgcccatcaaggacggcaagctggtgttcgtgcacagcgccgagggcaacgagttctggagcgccctgctggagaaggcctacgccaaggtgaacggcagctacgaggccctgagcggcggcagcaccagcgagggcttcgaggacttcaccggcggcgtgaccgagtggtacgagctgagaaaggcccccagcgacctgtaccagatcatcctgaaggccctggagagaggcagcctgctgggctgcagcatcgacatcagcagcgtgctggacatggaggccatcaccttcaagaagctggtgaagggccacgcctacagcgtgaccggcgccaagcaggtgaactacagaggccaggtggtgagcctgatcagaatgagaaacccctggggcgaggtggagtggaccggcgcctggagcgacagcagcagcgagtggaacaacgtggacccctacgagagagaccagctgagagtgaagatggaggacggcgagttctggatgagcttcagagacttcatgagagagttcaccagactggagatctgcaacctgacccccgacgccctgaagagcagaaccatcagaaagtggaacaccaccctgtacgagggcacctggagaagaggcagcaccgccggcggctgcagaaactaccccgccaccttctgggtgaacccccagttcaagatcagactggacgagaccgacgaccccgacgactacggcgacagagagagcggctgcagcttcgtgctggccctgatgcagaagcacagaagaagagagagaagattcggcagagacatggagaccatcggcttcgccgtgtacgaggtgccccccgagctggtgggccagcccgccgtgcacctgaagagagacttcttcctggccaacgccagcagagccagaagcgagcagttcatcaacctgagagaggtgagcaccagattcagactgccccccggcgagtacgtggtggtgcccagcaccttcgagcccaacaaggagggcgacttcgtgctgagattcttcagcgagaagagcgccggcaccgtggagctggacgaccagatccaggccaacctgcccgacgagcaggtgctgagcgaggaggagatcgacgagaacttcaaggccctgttcagacagctggccggcgaggacatggagatcagcgtgaaggagctgagaaccatcctgaacagaatcatcagcaagcacaaggacctgagaaccaagggcttcagcctggagagctgcagaagcatggtgaacctgatggacagagacggcaacggcaagctgggcctggtggagttcaacatcctgtggaacagaatcagaaactacctgagcatcttcagaaagttcgacctggacaagagcggcagcatgagcgcctacgagatgagaatggccatcgagagcgccggcttcaagctgaacaagaagctgtacgagctgatcatcaccagatacagcgagcccgacctggccgtggacttcgacaacttcgtgtgctgcctggtgagactggagaccatgttcagattcttcaagaccctggacaccgacctggacggcgtggtgaccttcgacctgttcaagtggctgcagctgaccatgttcgcctag

SEQ ID NO: 9751 - DNA, 2145 bp, synthetic construct; identical to SEQ ID NO: 9750
  misc_feature 1..2145: note = Description of Artificial Sequence: Synthetic coding sequence
  source 1..2145: mol_type = other DNA

SEQ ID NO: 9752 - DNA, 489 bp, synthetic construct
  misc_feature 1..489: note = Description of Artificial Sequence: Synthetic coding sequence
  source 1..489: mol_type = other DNA
atgagcgaggagatcatcacccccgtgtactgcaccggcgtgagcgcccaggtgcagaagcagagagccagagagctgggcctgggcagacacgagaacgccatcaagtacctgggccaggactacgagcagctgagagtgagatgcctgcagagcggcaccctgttcagagacgaggccttcccccccgtgccccagagcctgggctacaaggacctgggccccaacagcagcaagacctacggcatcaagtggaagagacccaccgagctgctgagcaacccccagttcatcgtggacggcgccaccagaaccgacatctgccagggcgccctgggcgactgctggctgctggccgccatcgccagcctgaccctgaacgacaccctgctgcacagagtggtgccccacggccagagcttccagaacggctacgccggcatcttccacttccagctgtggcagttcggcgagtgggtggacgtgtag

SEQ ID NO: 9753 - DNA, 2145 bp, synthetic construct; identical to SEQ ID NO: 9750
  misc_feature 1..2145: note = Description of Artificial Sequence: Synthetic coding sequence
  source 1..2145: mol_type = other DNA

SEQ ID NO: 9754 - DNA, 459 bp, synthetic construct
  misc_feature 1..459: note = Description of Artificial Sequence: Synthetic coding sequence
  source 1..459: mol_type = other DNA
atgagcgaggagatcatcacccccgtgtactgcaccggcgtgagcgcccaggtgcagaagcagagagccagagagctgggcctgggcagacacgagaacgccatcaagtacctgggccaggactacgagcagctgagagtgagatgcctgcagagcggcaccctgttcagagacgaggccttcccccccgtgccccagagcctgggctacaaggacctgggccccaacagcagcaagacctacggcatcaagtggaagagacccaccgagctgctgagcaacccccagttcatcgtggacggcgccaccagaaccgacatctgccagggcgccctgggcgactgctggctgctggccgccatcgccagcctgaccctgaacgacaccctgctgcacagagtggtgccccacggccagagcttccagaacggctacgccggcatcttccacttccagtag

SEQ ID NO: 9755 - DNA, 489 bp, synthetic construct; identical to SEQ ID NO: 9752
  misc_feature 1..489: note = Description of Artificial Sequence: Synthetic coding sequence
  source 1..489: mol_type = other DNA

SEQ ID NO: 9756 - DNA, 492 bp, synthetic construct
  misc_feature 1..492: note = Description of Artificial Sequence: Synthetic coding sequence
  source 1..492: mol_type = other DNA
atgagcgaggagatcatcacccccgtgtactgcaccggcgtgagcgcccaggtgcagaagcagagagccagagagctgggcctgggcagacacgagaacgccatcaagtacctgggccaggactacgagcagctgagagtgagatgcctgcagagcggcaccctgttcagagacgaggccttcccccccgtgccccagagcctgggctacaaggacctgggccccaacagcagcaagacctacggcatcaagtggaagagacccaccgagctgctgagcaacccccagttcatcgtggacggcgccaccagaaccgacatctgccagggcgccctgggcgactgctggctgctggccgccatcgccagcctgaccctgaacgacaccctgctgcacagagtggtgccccacggccagagcttccagaacggctacgccggcatcttccacttccagctgtggcagttcggcgagtgggtggacgtggtgtag

SEQ ID NO: 9757 - DNA, 576 bp, synthetic construct
  misc_feature 1..576: note = Description of Artificial Sequence: Synthetic coding sequence
  source 1..576: mol_type = other DNA
atgagcgaggagatcatcacccccgtgtactgcaccggcgtgagcgcccaggtgcagaagcagagagccagagagctgggcctgggcagacacgagaacgccatcaagtacctgggccaggactacgagcagctgagagtgagatgcctgcagagcggcaccctgttcagagacgaggccttcccccccgtgccccagagcctgggctacaaggacctgggccccaacagcagcaagacctacggcatcaagtggaagagacccaccgagctgctgagcaacccccagttcatcgtggacggcgccaccagaaccgacatctgccagggcgccctgggcgactgctggctgctggccgccatcgccagcctgaccctgaacgacaccctgctgcacagagtggtgccccacggccagagcttccagaacggctacgccggcatcttccacttccagctgtggcagttcggcgagtgggtggacgtggtggtggacgacctgctgcccatcaaggacggcaagctggtgttcgtgcacagcgccgagggcaacgagttctggagcgccctgctgtag

SEQ ID NO: 9758 - DNA, 513 bp, synthetic construct
  misc_feature 1..513: note = Description of Artificial Sequence: Synthetic coding sequence
  source 1..513: mol_type = other DNA
atgagcgaggagatcatcacccccgtgtactgcaccggcgtgagcgcccaggtgcagaagcagagagccagagagctgggcctgggcagacacgagaacgccatcaagtacctgggccaggactacgagcagctgagagtgagatgcctgcagagcggcaccctgttcagagacgaggccttcccccccgtgccccagagcctgggctacaaggacctgggccccaacagcagcaagacctacggcatcaagtggaagagacccaccgagctgctgagcaacccccagttcatcgtggacggcgccaccagaaccgacatctgccagggcgccctgggcgactgctggctgctggccgccatcgccagcctgaccctgaacgacaccctgctgcacagagtggtgccccacggccagagcttccagaacggctacgccggcatcttccacttccagctgtggcagttcggcgagtgggtggacgtggtggtggacgacctgctgcccatctag

SEQ ID NO: 9759 - DNA, 369 bp, synthetic construct
  misc_feature 1..369: note = Description of Artificial Sequence: Synthetic coding sequence
  source 1..369: mol_type = other DNA
atgagcgaggagatcatcacccccgtgtactgcaccggcgtgagcgcccaggtgcagaagcagagagccagagagctgggcctgggcagacacgagaacgccatcaagtacctgggccaggactacgagcagctgagagtgagatgcctgcagagcggcaccctgttcagagacgaggccttcccccccgtgccccagagcctgggctacaaggacctgggccccaacagcagcaagacctacggcatcaagtggaagagacccaccgagctgctgagcaacccccagttcatcgtggacggcgccaccagaaccgacatctgccagggcgccctgggcgactgctggctgctggccgccatcgcctag

SEQ ID NO: 9760 - DNA, 192 bp, synthetic construct
  misc_feature 1..192: note = Description of Artificial Sequence: Synthetic coding sequence
  source 1..192: mol_type = other DNA
atgagcgaggagatcatcacccccgtgtactgcaccggcgtgagcgcccaggtgcagaagcagagagccagagagctgggcctgggcagacacgagaacgccatcaagtacctgggccaggactacgagcagctgagagtgagatgcctgcagagcggcaccctgttcagagacgaggccttccccccctag

SEQ ID NO: 9761 - DNA, 2145 bp, synthetic construct; identical to SEQ ID NO: 9750
  misc_feature 1..2145: note = Description of Artificial Sequence: Synthetic coding sequence
  source 1..2145: mol_type = other DNA

SEQ ID NO: 9762 - DNA, 2145 bp, synthetic construct; identical to SEQ ID NO: 9750
  misc_feature 1..2145: note = Description of Artificial Sequence: Synthetic coding sequence
  source 1..2145: mol_type = other DNA

SEQ ID NO: 9763 - DNA, 447 bp, synthetic construct
  misc_feature 1..447: note = Description of Artificial Sequence: Synthetic coding sequence
  source 1..447: mol_type = other DNA
atgagcgaggagatcatcacccccgtgtactgcaccggcgtgagcgcccaggtgcagaagcagagagccagagagctgggcctgggcagacacgagaacgccatcaagtacctgggccaggactacgagcagctgagagtgagatgcctgcagagcggcaccctgttcagagacgaggccttcccccccgtgccccagagcctgggctacaaggacctgggccccaacagcagcaagacctacggcatcaagtggaagagacccaccgagctgctgagcaacccccagttcatcgtggacggcgccaccagaaccgacatctgccagggcgccctgggcgactgctggctgctggccgccatcgccagcctgaccctgaacgacaccctgctgcacagagtggtgccccacggccagagcttccagaacggctacgccggcatctag

SEQ ID NO: 9764 - DNA, 411 bp, synthetic construct
  misc_feature 1..411: note = Description of Artificial Sequence: Synthetic coding sequence
  source 1..411: mol_type = other DNA
atgagcgaggagatcatcacccccgtgtactgcaccggcgtgagcgcccaggtgcagaagcagagagccagagagctgggcctgggcagacacgagaacgccatcaagtacctgggccaggactacgagcagctgagagtgagatgcctgcagagcggcaccctgttcagagacgaggccttcccccccgtgccccagagcctgggctacaaggacctgggccccaacagcagcaagacctacggcatcaagtggaagagacccaccgagctgctgagcaacccccagttcatcgtggacggcgccaccagaaccgacatctgccagggcgccctgggcgactgctggctgctggccgccatcgccagcctgaccctgaacgacaccctgctgcacagagtggtgccctag

SEQ ID NO: 9765 - DNA, 2103 bp, synthetic construct
  misc_feature 1..2103: note = Description of Artificial Sequence: Synthetic coding sequence
  source 1..2103: mol_type = other DNA
atggccggcatcgccgccaagctggccaaggacagagaggccgccgagggcctgggcagccacgacagagccatcaagtacctgaaccaggactacgaggccctgagaaacgagtgcctggaggccggcaccctgttccaggaccccagcttccccgccatccccagcgccctgggcttcaaggagctgggcccctacagcagcaagaccagaggcatcgagtggaagagacccaccgagatctgcgccgacccccagttcatcatcggcggcgccaccagaaccgacatctgccagggcgccctgggcgactgctggctgctggccgccatcgccagcctgaccctgaacgaggagatcctggccagagtggtgcccctgaaccagagcttccaggagaactacgccggcatcttccacttccagttctggcagtacggcgagtgggtggaggtggtggtggacgacagactgcccaccaaggacggcgagctgctgttcgtgcacagcgccgagggcagcgagttctggagcgccctgctggagaaggcctacgccaagatcaacggctgctacgaggccctgagcggcggcgccaccaccgagggcttcgaggacttcaccggcggcatcgccgagtggtacgagctgaagaagcccccccccaacctgttcaagatcatccagaaggccctgcagaagggcagcctgctgggctgcagcatcgacatcaccagcgccgccgacagcgaggccatcaccttccagaagctggtgaagggccacgcctacagcgtgaccggcgccgaggaggtggagagcaacggcagcctgcagaagctgatcagaatcagaaacccctggggcgaggtggagtggaccggcagatggaacgacaactgccccagctggaacaccatcgaccccgaggagagagagagactgaccagaagacacgaggacggcgagttctggatgagcttcagcgacttcctgagacactacagcagactggagatctgcaacctgacccccgacaccctgaccagcgacacctacaagaagtggaagctgaccaagatggacggcaactggagaagaggcagcaccgccggcggctgcagaaactaccccaacaccttctggatgaacccccagtacctgatcaagctggaggaggaggacgaggacgaggaggacggcgagagcggctgcaccttcctggtgggcctgatccagaagcacagaagaagacagagaaagatgggcgaggacatgcacaccatcggcttcggcatctacgaggtgcccgaggagctgagcggccagaccaacatccacctgagcaagaacttcttcctgaccaacagagccagagagagaagcgacaccttcatcaacctgagagaggtgctgaacagattcaagctgccccccggcgagtacatcctggtgcccagcaccttcgagcccaacaaggacggcgacttctgcatcagagtgttcagcgagaagaaggccgactaccaggccgtggacgacgagatcgaggccaacctggaggagttcgacatcagcgaggacgacatcgacgacggcttcagaagactgttcgcccagctggccggcgaggacgccgagatcagcgccttcgagctgcagaccatcctgagaagagtgctggccaagagacaggacatcaagagcgacggcttcagcatcgagacctgcaagatcatggtggacatgctggacagcgacggcagcggcaagctgggcctgaaggagttctacatcctgtggaccaagatccagaagtaccagaagatctacagagagatcgacgtggacagaagcggcaccatgaacagctacgagatgagaaaggccctggaggaggccggcttcaagatgccctgccagctgcaccaggtgatcgtggccagattcgccgacgaccagctgatcatcgacttcgacaacttcgtgagatgcctggtgagactggagaccctgttcaagatcttcaagcagctggaccccgagaacaccggcaccatcgagctggacctgatcagctggctgtgcttcagcgtgctgtag

SEQ ID NO: 9766 - DNA, 2190 bp, synthetic construct
  misc_feature 1..2190: note = Description of Artificial Sequence: Synthetic coding sequence
  source 1..2190: mol_type = other DNA
gcccccggccccggcagagcccccgccgagagaagcgccgagagccccagacccttcagcgcccagtacggcagaagagacagaagcatggccggcatcgccgccaagctggccaaggacagagaggccgccgagggcctgggcagccacgacagagccatcaagtacctgaaccaggactacgaggccctgagaaacgagtgcctggaggccggcaccctgttccaggaccccagcttccccgccatccccagcgccctgggcttcaaggagctgggcccctacagcagcaagaccagaggcatcgagtggaagagacccaccgagatctgcgccgacccccagttcatcatcggcggcgccaccagaaccgacatctgccagggcgccctgggcgactgctggctgctggccgccatcgccagcctgaccctgaacgaggagatcctggccagagtggtgcccctgaaccagagcttccaggagaactacgccggcatcttccacttccagttctggcagtacggcgagtgggtggaggtggtggtggacgacagactgcccaccaaggacggcgagctgctgttcgtgcacagcgccgagggcagcgagttctggagcgccctgctggagaaggcctacgccaagatcaacggctgctacgaggccctgagcggcggcgccaccaccgagggcttcgaggacttcaccggcggcatcgccgagtggtacgagctgaagaagcccccccccaacctgttcaagatcatccagaaggccctgcagaagggcagcctgctgggctgcagcatcgacatcaccagcgccgccgacagcgaggccatcaccttccagaagctggtgaagggccacgcctacagcgtgaccggcgccgaggaggtggagagcaacggcagcctgcagaagctgatcagaatcagaaacccctggggcgaggtggagtggaccggcagatggaacgacaactgccccagctggaacaccatcgaccccgaggagagagagagactgaccagaagacacgaggacggcgagttctggatgagcttcagcgacttcctgagacactacagcagactggagatctgcaacctgacccccgacaccctgaccagcgacacctacaagaagtggaagctgaccaagatggacggcaactggagaagaggcagcaccgccggcggctgcagaaactaccccaacaccttctggatgaacccccagtacctgatcaagctggaggaggaggacgaggacgaggaggacggcgagagcggctgcaccttcctggtgggcctgatccagaagcacagaagaagacagagaaagatgggcgaggacatgcacaccatcggcttcggcatctacgaggtgcacccccagctgagcggccagaccaacatccacctgagcaagaacttcttcctgaccaacagagccagagagagaagcgacaccttcatcaacctgagagaggtgctgaacagattcaagctgccccccggcgagtacatcctggtgcccagcaccttcgagcccaacaaggacggcgacttctgcatcagagtgttcagcgagaagaaggccgactaccaggccgtggacgacgagatcgaggccaacctggaggagttcgacatcagcgaggacgacatcgacgacggcttcagaagactgttcgcccagctggccggcgaggacgccgagatcagcgccttcgagctgcagaccatcctgagaagagtgctggccaagagacaggacatcaagagcgacggcttcagcatcgagacctgcaagatcatggtggacatgctggacagcgacggcagcggcaagctgggcctgaaggagttctacatcctgtggaccaagatccagaagtaccagaagatctacagagagatcgacgtggacagaagcggcaccatgaacagctacgagatgagaaaggccctggaggaggccggcttcaagatgccctgccagctgcaccaggtgatcgtggccagattcgccgacgaccagctgatcatcgacttcgacaacttcgtgagatgcctggtgagactggagaccctgttcaagatcttcaagcagctggaccccgagaacaccggcaccatcgagctggacctgatcagctggctgtgcttcagcgtgctgtag

SEQ ID NO: 9767 - DNA, 1869 bp, synthetic construct
  misc_feature 1..1869: note = Description of Artificial Sequence: Synthetic coding sequence
  source 1..1869: mol_type = other DNA
atggagatctgcgccgacccccagttcatcatcggcggcgccaccagaaccgacatctgccagggcgccctgggcgactgctggctgctggccgccatcgccagcctgaccctgaacgaggagatcctggccagagtggtgcccctgaaccagagcttccaggagaactacgccggcatcttccacttccagttctggcagtacggcgagtgggtggaggtggtggtggacgacagactgcccaccaaggacggcgagctgctgttcgtgcacagcgccgagggcagcgagttctggagcgccctgctggagaaggcctacgccaagatcaacggctgctacgaggccctgagcggcggcgccaccaccgagggcttcgaggacttcaccggcggcatcgccgagtggtacgagctgaagaagcccccccccaacctgttcaagatcatccagaaggccctgcagaagggcagcctgctgggctgcagcatcgacatcaccagcgccgccgacagcgaggccatcaccttccagaagctggtgaagggccacgcctacagcgtgaccggcgccgaggaggtggagagcaacggcagcctgcagaagctgatcagaatcagaaacccctggggcgaggtggagtggaccggcagatggaacgacaactgccccagctggaacaccatcgaccccgaggagagagagagactgaccagaagacacgaggacggcgagttctggatgagcttcagcgacttcctgagacactacagcagactggagatctgcaacctgacccccgacaccctgaccagcgacacctacaagaagtggaagctgaccaagatggacggcaactggagaagaggcagcaccgccggcggctgcagaaactaccccaacaccttctggatgaacccccagtacctgatcaagctggaggaggaggacgaggacgaggaggacggcgagagcggctgcaccttcctggtgggcctgatccagaagcacagaagaagacagagaaagatgggcgaggacatgcacaccatcggcttcggcatctacgaggtgcccgaggagctgagcggccagaccaacatccacctgagcaagaacttcttcctgaccaacagagccagagagagaagcgacaccttcatcaacctgagagaggtgctgaacagattcaagctgccccccggcgagtacatcctggtgcccagcaccttcgagcccaacaaggacggcgacttctgcatcagagtgttcagcgagaagaaggccgactaccaggccgtggacgacgagatcgaggccaacctggaggagttcgacatcagcgaggacgacatcgacgacggcttcagaagactgttcgcccagctggccggcgaggacgccgagatcagcgccttcgagctgcagaccatcctgagaagagtgctggccaagagacaggacatcaagagcgacggcttcagcatcgagacctgcaagatcatggtggacatgctggacagcgacggcagcggcaagctgggcctgaaggagttctacatcctgtggaccaagatccagaagtaccagaagatctacagagagatcgacgtggacagaagcggcaccatgaacagctacgagatgagaaaggccctggaggaggccggcttcaagatgccctgccagctgcaccaggtgatcgtggccagattcgccgacgaccagctgatcatcgacttcgacaacttcgtgagatgcctggtgagactggagaccctgttcaagatcttcaagcagctggaccccgagaacaccggcaccatcgagctggacctgatcagctggctgtgcttcagcgtgctgtag

SEQ ID NO: 9768 - DNA, 396 bp, synthetic construct
  misc_feature 1..396: note = Description of Artificial Sequence: Synthetic coding sequence
  source 1..396: mol_type = other DNA
atggagatctgcgccgacccccagttcatcatcggcggcgccaccagaaccgacatctgccagggcgccctgggcgactgctggctgctggccgccatcgccagcctgaccctgaacgaggagatcctggccagagtggtgcccctgaaccagagcttccaggagaactacgccggcatcttccacttccagttctggcagtacggcgagtgggtggaggtggtggtggacgacagactgcccaccaaggacggcgagctgctgttcgtgcacagcgccgagggcagcgagttctggagcgccctgctggagaaggcctacgccaagatcaacggctgctacgaggccctgagcggcggcgccaccaccgagggcttcgaggacttcaccggctag

SEQ ID NO: 9769 - DNA, 156 bp, synthetic construct
  misc_feature 1..156: note = Description of Artificial Sequence: Synthetic coding sequence
  source 1..156: mol_type = other DNA
atgaagaacagagaggccgccagagagtgcagaagaaagaagaaggagtacgtgaagtgcctggagaacagagtggccgtgctggagaaccagaacaagaccctgatcgaggagctgaaggccctgaaggacctgtactgccacaagagcgactag

SEQ ID NO: 9770 - DNA, 984 bp, synthetic construct
  misc_feature 1..984: note = Description of Artificial Sequence: Synthetic coding sequence
  source 1..984: mol_type = other DNA
atgaccatggagagcggcgccgagaaccagcagagcggcgacgccgccgtgaccgaggccgagaaccagcagatgaccgtgcaggcccagccccagatcgccaccctggcccaggtgagcatgcccgccgcccacgccaccagcagcgcccccaccgtgaccctggtgcagctgcccaacggccagaccgtgcaggtgcacggcgtgatccaggccgcccagcccagcgtgatccagagcccccaggtgcagaccgtgcagatcagcaccatcgccgagagcgaggacagccaggagagcgtggacagcgtgaccgacagccagaagagaagagagatcctgagcagaagacccagctacagaaagatcctgaacgacctgagcagcgacgcccccggcgtgcccagaatcgaggaggagaagagcgaggaggagaccagcgcccccgccatcaccaccgtgaccgtgcccacccccatctaccagaccagcagcggccagtacatcgccatcacccagggcggcgccatccagctggccaacaacggcaccgacggcgtgcagggcctgcagaccctgaccatgaccaacgccgccgccacccagcccggcaccaccatcctgcagtacgcccagaccaccgacggccagcagatcctggtgcccagcaaccaggtggtggtgcaggccgccagcggcgacgtgcagacctaccagatcagaaccgcccccaccagcaccatcgcccccggcgtggtgatggccagcagccccgccctgcccacccagcccgccgaggaggccgccagaaagagagaggtgagactgatgaagaacagagaggccgccagagagtgcagaagaaagaagaaggagtacgtgaagtgcctggagaacagagtggccgtgctggagaaccagaacaagaccctgatcgaggagctgaaggccctgaaggacctgtactgccacaagagcgactag

SEQ ID NO: 9771 - DNA, 693 bp, synthetic construct
  misc_feature 1..693: note = Description of Artificial Sequence: Synthetic coding sequence
  source 1..693: mol_type = other DNA
atgaccatggagagcggcgccgagaaccagcagagcggcgacgccgccgtgaccgaggccgagaaccagcagatgaccgtgcaggcccagccccagatcgccaccctggcccaggtgagcatgcccgccgcccacgccaccagcagcgcccccaccgtgaccctggtgcagctgcccaacggccagaccgtgcaggtgcacggcgtgatccaggccgcccagcccagcgtgatccagagcccccaggtgcagaccgtgcagagcagctgcaaggacctgaagagactgttcagcggcacccagatcagcaccatcgccgagagcgaggacagccaggagagcgtggacagcgtgaccgacagccagaagagaagagagatcctgagcagaagacccagctacagaaagatcctgaacgacctgagcagcgacgcccccggcgtgcccagaatcgaggaggagaagagcgaggaggagaccagcgccctgcccacccagcccgccgaggaggccgccagaaagagagaggtgagactgatgaagaacagagaggccgccagagagtgcagaagaaagaagaaggagtacgtgaagtgcctggagaacagagtggccgtgctggagaaccagaacaagaccctgatcgaggagctgaaggccctgaaggacctgtactgccacaagagcgactag

SEQ ID NO: 9772 - DNA, 240 bp, synthetic construct
  misc_feature 1..240: note = Description of Artificial Sequence: Synthetic coding sequence
  source 1..240: mol_type = other DNA
atgaccatggagagcggcgccgagaaccagcagagcggcgacgccgccgtgaccgaggccgagaaccagcagatgaccgtgcaggcccagccccagatcgccaccctggcccaggtgagcatgcccgccgcccacgccaccagcagcgcccccaccgtgaccctggtgcagctgcccaacggccagaccgtgcaggtgcacggcgtgatccaggccgcccagcccagcgtgatccagtag

SEQ ID NO: 9773 - DNA, 984 bp, synthetic construct; identical to SEQ ID NO: 9770
  misc_feature 1..984: note = Description of Artificial Sequence: Synthetic coding sequence
  source 1..984: mol_type = other DNA

SEQ ID NO: 9774 - DNA, 1026 bp, synthetic construct
  misc_feature 1..1026: note = Description of Artificial Sequence: Synthetic coding sequence
  source 1..1026: mol_type = other DNA
atgaccatggagagcggcgccgagaaccagcagagcggcgacgccgccgtgaccgaggccgagaaccagcagatgaccgtgcaggcccagccccagatcgccaccctggcccaggtgagcatgcccgccgcccacgccaccagcagcgcccccaccgtgaccctggtgcagctgcccaacggccagaccgtgcaggtgcacggcgtgatccaggccgcccagcccagcgtgatccagagcccccaggtgcagaccgtgcagagcagctgcaaggacctgaagagactgttcagcggcacccagatcagcaccatcgccgagagcgaggacagccaggagagcgtggacagcgtgaccgacagccagaagagaagagagatcctgagcagaagacccagctacagaaagatcctgaacgacctgagcagcgacgcccccggcgtgcccagaatcgaggaggagaagagcgaggaggagaccagcgcccccgccatcaccaccgtgaccgtgcccacccccatctaccagaccagcagcggccagtacatcgccatcacccagggcggcgccatccagctggccaacaacggcaccgacggcgtgcagggcctgcagaccctgaccatgaccaacgccgccgccacccagcccggcaccaccatcctgcagtacgcccagaccaccgacggccagcagatcctggtgcccagcaaccaggtggtggtgcaggccgccagcggcgacgtgcagacctaccagatcagaaccgcccccaccagcaccatcgcccccggcgtggtgatggccagcagccccgccctgcccacccagcccgccgaggaggccgccagaaagagagaggtgagactgatgaagaacagagaggccgccagagagtgcagaagaaagaagaaggagtacgtgaagtgcctggagaacagagtggccgtgctggagaaccagaacaagaccctgatcgaggagctgaaggccctgaaggacctgtactgccacaagagcgactag

SEQ ID NO: 9775 - DNA, 549 bp, synthetic construct
  misc_feature 1..549: note = Description of Artificial Sequence: Synthetic coding sequence
  source 1..549: mol_type = other DNA
atgaccatggagagcggcgccgagaaccagcagagcggcgacgccgccgtgaccgaggccgagaaccagcagatgaccgtgcaggcccagccccagatcgccaccctggcccaggtgagcatgcccgccgcccacgccaccagcagcgcccccaccgtgaccctggtgcagctgcccaacggccagaccgtgcaggtgcacggcgtgatccaggccgcccagcccagcgtgatccagagcccccaggtgcagaccgtgcagagcagctgcaaggacctgaagagactgttcagcggcacccagatcagcaccatcgccgagagcgaggacagccaggagagcgtggacagcgtgaccgacagccagaagagaagagagatcctgagcagaagacccagctacagaaagatcctgaacgacctgagcagcgacgcccccggcgtgcccagaatcgaggaggagaagagcgaggaggagaccagcgcccccgccatcaccaccgtgaccgtgcccacccccatctaccagaccagcagcggccagtactag

SEQ ID NO: 9776 - DNA, 399 bp, synthetic construct
  misc_feature 1..399: note = Description of Artificial Sequence: Synthetic coding sequence
  source 1..399: mol_type = other DNA
atgaccatggagagcggcgccgagaaccagcagagcggcgacgccgccgtgaccgaggccgagaaccagcagatgaccgtgcaggcccagccccagatcgccaccctggcccaggtgagcatgcccgccgcccacgccaccagcagcgcccccaccgtgaccctggtgcagctgcccaacggccagaccgtgcaggtgcacggcgtgatccaggccgcccagcccagcgtgatccagagcccccaggtgcagaccgtgcagagcagctgcaaggacctgaagagactgttcagcggcacccagatcagcaccatcgccgagagcgaggacagccaggagagcgtggacagcgtgaccgacagccagaagagaagagagatcctgagcagaagaccctag

SEQ ID NO: 9777 - DNA, 705 bp, synthetic construct
  misc_feature 1..705: note = Description of Artificial Sequence: Synthetic coding sequence
  source 1..705: mol_type = other DNA
atgaccatggagagcggcgccgagaaccagcagagcggcgacgccgccgtgaccgaggccgagaaccagcagatgaccgtgcaggcccagccccagatcgccaccctggcccaggtgagcatgcccgccgcccacgccaccagcagcgcccccaccgtgaccctggtgcagctgcccaacggccagaccgtgcaggtgcacggcgtgatccaggccgcccagcccagcgtgatccagagcccccaggtgcagaccgtgcagatcagcaccatcgccgagagcgaggacagccaggagagcgtggacagcgtgaccgacagccagaagagaagagagatcctgagcagaagacccagctacagaaagatcctgaacgacctgagcagcgacgcccccggcgtgcccagaatcgaggaggagaagagcgaggaggagaccagcgcccccgccatcaccaccgtgaccgtgcccacccccatctaccagaccagcagcggccagtacatcgccatcacccagggcggcgccatccagctggccaacaacggcaccgacggcgtgcagggcctgcagaccctgaccatgaccaacgccgccgccacccagcccggcaccaccatcctgcagtacgcccagaccaccgacggccagcagatcctggtgcccagcaaccaggtggtggtgcagggcacccagaagctgtag

SEQ ID NO: 9778 - DNA, 462 bp, synthetic construct
  misc_feature 1..462: note = Description of Artificial Sequence: Synthetic coding sequence
  source 1..462: mol_type = other DNA
atgcccgccgcccacgccaccagcagcgcccccaccgtgaccctggtgcagctgcccaacggccagaccgtgcaggtgcacggcgtgatccaggccgcccagcccagcgtgatccagagcccccaggtgcagaccgtgcagagcagctgcaaggacctgaagagactgttcagcggcacccagatcagcaccatcgccgagagcgaggacagccaggagagcgtggacagcgtgaccgacagccagaagagaagagagatcctgagcagaagacccagctacagaaagatcctgaacgacctgagcagcgacgcccccggcgtgcccagaatcgaggaggagaagagcgaggaggagaccagcgcccccgccatcaccaccgtgaccgtgcccacccccatctaccagaccagcagcggccagtacacctacctgagagacaccacctacagctgccagtag

SEQ ID NO: 9779 - DNA, 1998 bp, synthetic construct
  misc_feature 1..1998: note = Description of Artificial Sequence: Synthetic coding sequence
  source 1..1998: mol_type = other DNA
atggcccacgagatgatcggcacccagatcgtgaccgagagactggtggccctgctggagagcggcaccgagaaggtgctgctgatcgacagcagacccttcgtggagtacaacaccagccacatcctggaggccatcaacatcaactgcagcaagctgatgaagagaagactgcagcaggacaaggtgctgatcaccgagctgatccagcacagcgccaagcacaaggtggacatcgactgcagccagaaggtggtggtgtacgaccagagcagccaggacgtggccagcctgagcagcgactgcttcctgaccgtgctgctgggcaagctggagaagagcttcaacagcgtgcacctgctggccggcggcttcgccgagttcagcagatgcttccccggcctgtgcgagggcaagagcaccctggtgcccacctgcatcagccagccctgcctgcccgtggccaacatcggccccaccagaatcctgcccaacctgtacctgggctgccagagagacgtgctgaacaaggagctgatgcagcagaacggcatcggctacgtgctgaacgccagcaacacctgccccaagcccgacttcatccccgagagccacttcctgagagtgcccgtgaacgacagcttctgcgagaagatcctgccctggctggacaagagcgtggacttcatcgagaaggccaaggccagcaacggctgcgtgctggtgcactgcctggccggcatcagcagaagcgccaccatcgccatcgcctacatcatgaagagaatggacatgagcctggacgaggcctacagattcgtgaaggagaagagacccaccatcagccccaacttcaacttcctgggccagctgctggactacgagaagaagatcaagaaccagaccggcgccagcggccccaagagcaagctgaagctgctgcacctggagaagcccaacgagcccgtgcccgccgtgagcgagggcggccagaagagcgagacccccctgagccccccctgcgccgacagcgccaccagcgaggccgccggccagagacccgtgcaccccgccagcgtgcccagcgtgcccagcgtgcagcccagcctgctggaggacagccccctggtgcaggccctgagcggcctgcacctgagcgccgacagactggaggacagcaacaagctgaagagaagcttcagcctggacatcaagagcgtgagctacagcgccagcatggccgccagcctgcacggcttcagcagcagcgaggacgccctggagtactacaagcccagcaccaccctggacggcaccaacaagctgtgccagttcagccccgtgcaggagctgagcgagcagacccccgagaccagccccgacaaggaggaggccagcatccccaagaagctgcagaccgccagacccagcgacagccagagcaagagactgcacagcgtgagaaccagcagcagcggcaccgcccagagaagcctgctgagccccctgcacagaagcggcagcgtggaggacaactaccacaccagcttcctgttcggcctgagcaccagccagcagcacctgaccaagagcgccggcctgggcctgaagggctggcacagcgacatcctggccccccagaccagcacccccagcctgaccagcagctggtacttcgccaccgagagcagccacttctacagcgccagcgccatctacggcggcagcgccagctacagcgcctacagctgcagccagctgcccacctgcggcgaccaggtgtacagcgtgagaagaagacagaagcccagcgacagagccgacagcagaagaagctggcacgaggagagccccttcgagaagcagttcaagagaagaagctgccagatggagttcggcgagagcatcatgagcgagaacagaagcagagaggagctgggcaaggtgggcagccagagcagcttcagcggcagcatggagatcatcgaggtgagctag

SEQ ID NO: 9780 - DNA, 939 bp, synthetic construct
  misc_feature 1..939: note = Description of Artificial Sequence: Synthetic coding sequence
  source 1..939: mol_type = other DNA
atgagaatgctgctggccctgctggccctgagcgccgccagacccagcgccagcgccgagagccactggtgctacgaggtgcaggccgagagcagcaactacccctgcctggtgcccgtgaagtggggcggcaactgccagaaggacagacagagccccatcaacatcgtgaccaccaaggccaaggtggacaagaagctgggcagattcttcttcagcggctacgacaagaagcagacctggaccgtgcagaacaacggccacagcgtgatgatgctgctggagaacaaggccagcatcagcggcggcggcctgcccgccccctaccaggccaagcagctgcacctgcactggagcgacctgccctacaagggcagcgagcacagcctggacggcgagcacttcgccatggagatgcacatcgtgcacgagaaggagaagggcaccagcagaaacgtgaaggaggcccaggaccccgaggacgagatcgccgtgctggccttcctggtggaggccggcacccaggtgaacgagggcttccagcccctggtggaggccctgagcaacatccccaagcccgagatgagcaccaccatggccgagagcagcctgctggacctgctgcccaaggaggagaagctgagacactacttcagatacctgggcagcctgaccacccccacctgcgacgagaaggtggtgtggaccgtgttcagagagcccatccagctgcacagagagcagatcctggccttcagccagaagctgtactacgacaaggagcagaccgtgagcatgaaggacaacgtgagacccctgcagcagctgggccagagaaccgtgatcaagagcggcgcccccggcagacccctgccctgggccctgcccgccctgctgggccccatgctggcctgcctgctggccggcttcctgagatag

SEQ ID NO: 9781 - DNA, 1380 bp, synthetic construct
  misc_feature 1..1380: note = Description of Artificial Sequence: Synthetic coding sequence
  source 1..1380: mol_type = other DNA
atggcccccctgtgccccagcccctggctgcccctgctgatccccgcccccgcccccggcctgaccgtgcagctgctgctgagcctgctgctgctggtgcccgtgcacccccagagactgcccagaatgcaggaggacagccccctgggcggcggcagcagcggcgaggacgaccccctgggcgaggaggacctgcccagcgaggaggacagccccagagaggaggacccccccggcgaggaggacctgcccggcgaggaggacctgcccggcgaggaggacctgcccgaggtgaagcccaagagcgaggaggagggcagcctgaagctggaggacctgcccaccgtggaggcccccggcgacccccaggagccccagaacaacgcccacagagacaaggagggcgacgaccagagccactggagatacggcggcgaccccccctggcccagagtgagccccgcctgcgccggcagattccagagccccgtggacatcagaccccagctggccgccttctgccccgccctgagacccctggagctgctgggcttccagctgccccccctgcccgagctgagactgagaaacaacggccacagcgtgcagctgaccctgccccccggcctggagatggccctgggccccggcagagagtacagagccctgcagctgcacctgcactggggcgccgccggcagacccggcagcgagcacaccgtggagggccacagattccccgccgagatccacgtggtgcacctgagcaccgccttcgccagagtggacgaggccctgggcagacccggcggcctggccgtgctggccgccttcctggaggagggccccgaggagaacagcgcctacgagcagctgctgagcagactggaggagatcgccgaggagggcagcgagacccaggtgcccggcctggacatcagcgccctgctgcccagcgacttcagcagatacttccagtacgagggcagcctgaccacccccccctgcgcccagggcgtgatctggaccgtgttcaaccagaccgtgatgctgagcgccaagcagctgcacaccctgagcgacaccctgtggggccccggcgacagcagactgcagctgaacttcagagccacccagcccctgaacggcagagtgatcgaggccagcttccccgccggcgtggacagcagccccagagccgccgagcccgtgcagctgaacagctgcctggccgccggcgacatcctggccctggtgttcggcctgctgttcgccgtgaccagcgtggccttcctggtgcagatgagaagacagcacagaagaggcaccaagggcggcgtgagctacagacccgccgaggtggccgagaccggcgcctag

SEQ ID NO: 9782 - DNA, 1071 bp, synthetic construct
  misc_feature 1..1071: note = Description of Artificial Sequence: Synthetic coding sequence
  source 1..1071: mol_type = other DNA
atggcccccctgtgccccagcccctggctgcccctgctgatccccgcccccgcccccggcctgaccgtgcagctgctgctgagcctgctgctgctggtgcccgtgcacccccagagactgcccagaatgcaggaggacagccccctgggcggcggcagcagcggcgaggacgaccccctgggcgaggaggacctgcccagcgaggaggacagccccagagaggaggacccccccggcgaggaggacctgcccggcgaggaggacctgcccggcgaggaggacctgcccgaggtgaagcccaagagcgaggaggagggcagcctgaagctggaggacctgcccaccgtggaggcccccggcgacccccaggagccccagaacaacgcccacagagacaaggagggcgacgaccagagccactggagatacggcggcgaccccccctggcccagagtgagccccgcctgcgccggcagattccagagccccgtggacatcagaccccagctggccgccttctgccccgccctgagacccctggagctgctgggcttccagctgccccccctgcccgagctgagactgagaaacaacggccacagcgtgcagctgaccctgccccccggcctggagatggccctgggccccggcagagagtacagagccctgcagctgcacctgcactggggcgccgccggcagacccggcagcgagcacaccgtggagggccacagattccccgccgagatccacgtggtgcacctgagcaccgccttcgccagagtggacgaggccctgggcagacccggcggcctggccgtgctggccgccttcctggaggagggccccgaggagaacagcgcctacgagcagctgctgagcagactggaggagatcgccgaggagggcagcgagacccaggtgcccggcctggacatcagcgccctgctgcccagcgacttcagcagatacttccagtacgagggcagcctgaccacccccccctgcgcccagggcgtgatctggaccgtgttcaaccagaccgtgatgctgagcgccaagcagagctag

SEQ ID NO: 9783 - DNA, 2775 bp, synthetic construct
  misc_feature 1..2775: note = Description of Artificial Sequence: Synthetic coding sequence
  source 1..2775: mol_type = other DNA
atgcccggccccagccccggcctgagaagagccctgctgggcctgtgggccgccctgggcctgggcctgttcggcctgagcgccgtgagccaggagcccttctgggccgacctgcagcccagagtggccttcgtggagagaggcggcagcctgtggctgaactgcagcaccaactgccccagacccgagagaggcggcctggagaccagcctgagaagaaacggcacccagagaggcctgagatggctggccagacagctggtggacatcagagagcccgagacccagcccgtgtgcttcttcagatgcgccagaagaaccctgcaggccagaggcctgatcagaaccttccagagacccgacagagtggagctgatgcccctgcccccctggcagcccgtgggcgagaacttcaccctgagctgcagagtgcccggcgccggccccagagccagcctgaccctgaccctgctgagaggcgcccaggagctgatcagaagaagcttcgccggcgagccccccagagccagaggcgccgtgctgaccgccaccgtgctggccagaagagaggaccacggcgccaacttcagctgcagagccgagctggacctgagaccccacggcctgggcctgttcgagaacagcagcgcccccagagagctgagaaccttcagcctgagccccgacgcccccagactggccgcccccagactgctggaggtgggcagcgagagacccgtgagctgcaccctggacggcctgttccccgccagcgaggccagagtgtacctggccctgggcgaccagaacctgagccccgacgtgaccctggagggcgacgccttcgtggccaccgccaccgccaccgccagcgccgagcaggagggcgccagacagctggtgtgcaacgtgaccctgggcggcgagaacagagagaccagagagaacgtgaccatctacagcttccccgcccccctgctgaccctgagcgagcccagcgtgagcgagggccagatggtgaccgtgacctgcgccgccggcgcccaggccctggtgaccctggagggcgtgcccgccgccgtgcccggccagcccgcccagctgcagctgaacgccaccgagaacgacgacagaagaagcttcttctgcgacgccaccctggacgtggacggcgagaccctgatcaagaacagaagcgccgagctgagagtgctgtacgcccccagactggacgacagcgactgccccagaagctggacctggcccgagggccccgagcagaccctgagatgcgaggccagaggcaaccccgagcccagcgtgcactgcgccagaagcgacggcggcgccgtgctggccctgggcctgctgggccccgtgaccagagccctgagcggcacctacagatgcaaggccgccaacgaccagggcgaggccgtgaaggacgtgaccctgaccgtggagtacgcccccgccctggacagcgtgggctgccccgagagaatcacctggctggagggcaccgaggccagcctgagctgcgtggcccacggcgtgcccccccccgacgtgatctgcgtgagaagcggcgagctgggcgccgtgatcgagggcctgctgagagtggccagagagcacgccggcacctacagatgcgaggccaccaaccccagaggcagcgccgccaagaacgtggccgtgaccgtggagtacggccccagattcgaggagcccagctgccccagcaactggacctgggtggagggcagcggcagactgttcagctgcgaggtggacggcaagccccagcccagcgtgaagtgcgtgggcagcggcggcgccaccgagggcgtgctgctgcccctggccccccccgaccccagccccagagcccccagaatccccagagtgctggcccccggcatctacgtgtgcaacgccaccaacagacacggcagcgtggccaagaccgtggtggtgagcgccgagagcccccccgagatggacgagagcacctgccccagccaccagacctggctggagggcgccgaggccagcgccctggcctgcgccgccagaggcagacccagccccggcgtgagatgcagcagagagggcatcccctggcccgagcagcagagagtgagcagagaggacgccggcacctaccactgcgtggccaccaacgcccacggcaccgacagcagaaccgtgaccgtgggcgtggagtacagacccgtggtggccgagctggccgccagcccccccggcggcgtgagacccggcggcaacttcaccctgacctgcagagccgaggcctggccccccgcccagatcagctggagagccccccccggcgccctgaacatcggcctgagcagcaacaacagcaccctgagcgtggccggcgccatgggcagccacggcggcgagtacgagtgcgccgccaccaacgcccacggcagacacgccagaagaatcaccgtgagagtggccggcccctggctgtgggtggccgtgggcggcgccgccggcggcgccgccctgctggccgccggcgccggcctggccttctacgtgcagagcaccgcctgcaagaagggcgagtacaacgtgcaggaggccgagagcagcggcgaggccgtgtgcctgaacggcgccggcggcggcgccggcggcgccgccggcgccgagggcggccccgaggccgccggcggcgccgccgagagccccgccgagggcgaggtgttcgccatccagctgaccagcgcctag

SEQ ID NO: 9784 - DNA, 1263 bp, synthetic construct
  misc_feature 1..1263: note = Description of Artificial Sequence: Synthetic coding sequence
  source 1..1263: mol_type = other DNA
atggagagccccagcgcccccccccacagatggtgcatcccctggcagagactgctgctgaccgccagcctgctgaccttctggaacccccccaccaccgccaagctgaccatcgagagcacccccttcaacgtggccgagggcaaggaggtgctgctgctggtgcacaacctgccccagcacctgttcggctacagctggtacaagggcgagagagtggacggcaacagacagatcatcggctacgtgatcggcacccagcaggccacccccggccccgcctacagcggcagagagatcatctaccccaacgccagcctgctgatccagaacatcatccagaacaagctgagcgtggaccacagcgaccccgtgatcctgaacgtgctgtacggccccgacgaccccaccatcagccccagctacacctactacagacccggcgtgaacctgagcctgagctgccacgccgccagcaacccccccgcccagtacagctggctgatcgacggcaacatccagcagcacacccaggagctgttcatcagcaacatcaccgagaagaacagcggcctgtacacctgccaggccaacaacagcgccagcggccacagcagaaccaccgtgaagaccatcaccgtgagcgccgagctgcccaagcccagcatcagcagcaacaacagcaagcccgtggaggacaaggacgccgtggccttcacctgcgagcccgaggcccagaacaccacctacctgtggtgggtgaacggccagagcctgcccgtgagccccagactgcagctgagcaacggcaacagaaccctgaccctgttcaacgtgaccagaaacgacgccagagcctacgtgtgcggcatccagaacagcgtgagcgccaacagaagcgaccccgtgaccctggacgtgctgtacggccccgacacccccatcatcagcccccccgacagcagctacctgagcggcgccaacctgaacctgagctgccacagcgccagcaaccccagcccccagtacagctggagaatcaacggcatcccccagcagcacacccaggtgctgttcatcgccaagatcacccccaacaacaacggcacctacgcctgcttcgtgagcaacctggccaccggcagaaacaacagcatcgtgaagagcatcaccgtgagcgccagcggcaccagccccggcctgagcgccggcgccaccgtgggcatcatgatcggcgtgctggtgggcgtggccctgatctag

SEQ ID NO: 9785 - DNA, 2109 bp, synthetic construct
  misc_feature 1..2109: note = Description of Artificial Sequence: Synthetic coding sequence
  source 1..2109: mol_type = other DNA
atggagagccccagcgcccccccccacagatggtgcatcccctggcagagactgctgctgaccgccagcctgctgaccttctggaacccccccaccaccgccaagctgaccatcgagagcacccccttcaacgtggccgagggcaaggaggtgctgctgctggtgcacaacctgccccagcacctgttcggctacagctggtacaagggcgagagagtggacggcaacagacagatcatcggctacgtgatcggcacccagcaggccacccccggccccgcctacagcggcagagagatcatctaccccaacgccagcctgctgatccagaacatcatccagaacgacaccggcttctacaccctgcacgtgatcaagagcgacctggtgaacgaggaggccaccggccagttcagagtgtaccccgagctgcccaagcccagcatcagcagcaacaacagcaagcccgtggaggacaaggacgccgtggccttcacctgcgagcccgagacccaggacgccacctacctgtggtgggtgaacaaccagagcctgcccgtgagccccagactgcagctgagcaacggcaacagaaccctgaccctgttcaacgtgaccagaaacgacaccgccagctacaagtgcgagacccagaaccccgtgagcgccagaagaagcgacagcgtgatcctgaacgtgctgtacggccccgacgcccccaccatcagccccctgaacaccagctacagaagcggcgagaacctgaacctgagctgccacgccgccagcaacccccccgcccagtacagctggttcgtgaacggcaccttccagcagagcacccaggagctgttcatccccaacatcaccgtgaacaacagcggcagctacacctgccaggcccacaacagcgacaccggcctgaacagaaccaccgtgaccaccatcaccgtgtacgccgagccccccaagcccttcatcaccagcaacaacagcaaccccgtggaggacgaggacgccgtggccctgacctgcgagcccgagatccagaacaccacctacctgtggtgggtgaacaaccagagcctgcccgtgagccccagactgcagctgagcaacgacaacagaaccctgaccctgctgagcgtgaccagaaacgacgtgggcccctacgagtgcggcatccagaacaagctgagcgtggaccacagcgaccccgtgatcctgaacgtgctgtacggccccgacgaccccaccatcagccccagctacacctactacagacccggcgtgaacctgagcctgagctgccacgccgccagcaacccccccgcccagtacagctggctgatcgacggcaacatccagcagcacacccaggagctgttcatcagcaacatcaccgagaagaacagcggcctgtacacctgccaggccaacaacagcgccagcggccacagcagaaccaccgtgaagaccatcaccgtgagcgccgagctgcccaagcccagcatcagcagcaacaacagcaagcccgtggaggacaaggacgccgtggccttcacctgcgagcccgaggcccagaacaccacctacctgtggtgggtgaacggccagagcctgcccgtgagccccagactgcagctgagcaacggcaacagaaccctgaccctgttcaacgtgaccagaaacgacgccagagcctacgtgtgcggcatccagaacagcgtgagcgccaacagaagcgaccccgtgaccctggacgtgctgtacggccccgacacccccatcatcagcccccccgacagcagctacctgagcggcgccaacctgaacctgagctgccacagcgccagcaaccccagcccccagtacagctggagaatcaacggcatcccccagcagcacacccaggtgctgttcatcgccaagatcacccccaacaacaacggcacctacgcctgcttcgtgagcaacctggccaccggcagaaacaacagcatcgtgaagagcatcaccgtgagcgccagcggcaccagccccggcctgagcgccggcgccaccgtgggcatcatgatcggcgtgctggtgggcgtggccctgatctag

SEQ ID NO: 9786 - DNA, 1035 bp, synthetic construct
  misc_feature 1..1035: note = Description of Artificial Sequence: Synthetic coding sequence
  source 1..1035: mol_type = other DNA
atgggcccccccagcgcccccccctgcagactgcacgtgccctggaaggaggtgctgctgaccgccagcctgctgaccttctggaacccccccaccaccgccaagctgaccatcgagagcacccccttcaacgtggccgagggcaaggaggtgctgctgctggcccacaacctgccccagaacagaatcggctacagctggtacaagggcgagagagtggacggcaacagcctgatcgtgggctacgtgatcggcacccagcaggccacccccggccccgcctacagcggcagagagaccatctaccccaacgccagcctgctgatccagaacgtgacccagaacgacaccggcttctacaccctgcaggtgatcaagagcgacctggtgaacgaggaggccaccggccagttccacgtgtaccccgagctgcccaagcccagcatcagcagcaacaacagcaaccccgtggaggacaaggacgccgtggccttcacctgcgagcccgaggtgcagaacaccacctacctgtggtgggtgaacggccagagcctgcccgtgagccccagactgcagctgagcaacggcaacatgaccctgaccctgctgagcgtgaagagaaacgacgccggcagctacgagtgcgagatccagaaccccgccagcgccaacagaagcgaccccgtgaccctgaacgtgctgtacggccccgacggccccaccatcagccccagcaaggccaactacagacccggcgagaacctgaacctgagctgccacgccgccagcaacccccccgcccagtacagctggttcatcaacggcaccttccagcagagcacccaggagctgttcatccccaacatcaccgtgaacaacagcggcagctacatgtgccaggcccacaacagcgccaccggcctgaacagaaccaccgtgaccatgatcaccgtgagcggcagcgcccccgtgctgagcgccgtggccaccgtgggcatcaccatcggcgtgctggccagagtggccctgatctag

SEQ ID NO: 9787 - DNA, 1977 bp, synthetic construct
  misc_feature 1..1977: note = Description of Artificial Sequence: Synthetic coding sequence
  source 1..1977: mol_type = other DNA
atggtgcccagactgctgctgagagcctggcccagaggccccgccgtgggccccggcgcccccagcagacccctgagcgccggcagcggccccggccagtacctgcagagaagcatcgtgcccaccatgcactaccaggacagcctgcccagactgcccatccccaagctggaggacaccatcagaagatacctgagcgcccagaagcccctgctgaacgacggccagttcagaaagaccgagcagttctgcaagagcttcgagaacggcatcggcaaggagctgcacgagcagctggtggccctggacaagcagaacaagcacaccagctacatcagcggcccctggttcgacatgtacctgagcgccagagacagcgtggtgctgaacttcaaccccttcatggccttcaaccccgaccccaagagcgagtacaacgaccagctgaccagagccaccaacatgaccgtgagcgccatcagattcctgaagaccctgagagccggcctgctggagcccgaggtgttccacctgaaccccgccaagagcgacaccatcaccttcaagagactgatcagattcgtgcccagcagcctgagctggtacggcgcctacctggtgaacgcctaccccctggacatgagccagtacttcagactgttcaacagcaccagactgcccaagcccagcagagacgagctgttcaccgacgacaaggccagacacctgctggtgctgagaaagggcaacttctacatcttcgacgtgctggaccaggacggcaacatcgtgagccccagcgagatccaggcccacctgaagtacatcctgagcgacagcagccccgcccccgagttccccctggcctacctgaccagcgagaacagagacatctgggccgagctgagacagaagctgatgagcagcggcaacgaggagagcctgagaaaggtggacagcgccgtgttctgcctgtgcctggacgacttccccatcaaggacctggtgcacctgagccacaacatgctgcacggcgacggcaccaacagatggttcgacaagagcttcaacctgatcatcgccaaggacggcagcaccgccgtgcacttcgagcacagctggggcgacggcgtggccgtgctgagattcttcaacgaggtgttcaaggacagcacccagacccccgccgtgaccccccagagccagcccgccaccaccgacagcaccgtgaccgtgcagaagctgaacttcgagctgaccgacgccctgaagaccggcatcaccgccgccaaggagaagttcgacgccaccatgaagaccctgaccatcgactgcgtgcagttccagagaggcggcaaggagttcctgaagaagcagaagctgagccccgacgccgtggcccagctggccttccagatggccttcctgagacagtacggccagaccgtggccacctacgagagctgcagcaccgccgccttcaagcacggcagaaccgagaccatcagacccgccagcgtgtacaccaagagatgcagcgaggccttcgtgagagagcccagcagacacagcgccggcgagctgcagcagatgatggtggagtgcagcaagtaccacggccagctgaccaaggaggccgccatgggccagggcttcgacagacacctgttcgccctgagacacctggccgccgccaagggcatcatcctgcccgagctgtacctggaccccgcctacggccagatcaaccacaacgtgctgagcaccagcaccctgagcagccccgccgtgaacctgggcggcttcgcccccgtggtgagcgacggcttcggcgtgggctacgccgtgcacgacaactggatcggctgcaacgtgagcagctaccccggcagaaacgccagagagttcctgcagtgcgtggagaaggccctggaggacatgttcgacgccctggagggcaagagcatcaagagctag

SEQ ID NO: 9788 - DNA, 1077 bp, synthetic construct
  misc_feature 1..1077: note = Description of Artificial Sequence: Synthetic coding sequence
  source 1..1077: mol_type = other DNA
atgagagccacccccctggccgcccccgccggcagcctgagcagaaagaagagactggagctggacgacaacctggacaccgagagacccgtgcagaagagagccagaagcggcccccagcccagactgcccccctgcctgctgcccctgagcccccccaccgcccccgacagagccaccgccgtggccaccgccagcagactgggcccctacgtgctgctggagcccgaggagggcggcagagcctaccaggccctgcactgccccaccggcaccgagtacacctgcaaggtgtaccccgtgcaggaggccctggccgtgctggagccctacgccagactgcccccccacaagcacgtggccagacccaccgaggtgctggccggcacccagctgctgtacgccttcttcaccagaacccacggcgacatgcacagcctggtgagaagcagacacagaatccccgagcccgaggccgccgtgctgttcagacagatggccaccgccctggcccactgccaccagcacggcctggtgctgagagacctgaagctgtgcagattcgtgttcgccgacagagagagaaagaagctggtgctggagaacctggaggacagctgcgtgctgaccggccccgacgacagcctgtgggacaagcacgcctgccccgcctacgtgggccccgagatcctgagcagcagagccagctacagcggcaaggccgccgacgtgtggagcctgggcgtggccctgttcaccatgctggccggccactaccccttccaggacagcgagcccgtgctgctgttcggcaagatcagaagaggcgcctacgccctgcccgccggcctgagcgcccccgccagatgcctggtgagatgcctgctgagaagagagcccgccgagagactgaccgccaccggcatcctgctgcacccctggctgagacaggaccccatgcccctggcccccaccagaagccacctgtgggaggccgcccaggtggtgcccgacggcctgggcctggacgaggccagagaggaggagggcgacagagaggtggtgctgtacggctag

SEQ ID NO: 9789 - DNA, 1176 bp, synthetic construct
  misc_feature 1..1176: note = Description of Artificial Sequence: Synthetic coding sequence
  source 1..1176: mol_type = other DNA
atgagcggccccgtgcccagcagagccagagtgtacaccgacgtgaacacccacagacccagagagtactgggactacgagagccacgtggtggagtggggcaaccaggacgactaccagctggtgagaaagctgggcagaggcaagtacagcgaggtgttcgaggccatcaacatcaccaacaacgagaaggtggtggtgaagatcctgaagcccgtgaagaagaagaagatcaagagagagatcaagatcctggagaacctgagaggcggccccaacatcatcaccctggccgacatcgtgaaggaccccgtgagcagaacccccgccctggtgttcgagcacgtgaacaacaccgacttcaagcagctgtaccagaccctgaccgactacgacatcagattctacatgtacgagatcctgaaggccctggactactgccacagcatgggcatcatgcacagagacgtgaagccccacaacgtgatgatcgaccacgagcacagaaagctgagactgatcgactggggcctggccgagttctaccaccccggccaggagtacaacgtgagagtggccagcagatacttcaagggccccgagctgctggtggactaccagatgtacgactacagcctggacatgtggagcctgggctgcatgctggccagcatgatcttcagaaaggagcccttcttccacggccacgacaactacgaccagctggtgagaatcgccaaggtgctgggcaccgaggacctgtacgactacatcgacaagtacaacatcgagctggaccccagattcaacgacatcctgggcagacacagcagaaagagatgggagagattcgtgcacagcgagaaccagcacctggtgagccccgaggccctggacttcctggacaagctgctgagatacgaccaccagagcagactgaccgccagagaggccatggagcacccctacttctacaccgtggtgaaggaccaggccagaatgggcagcagcagcatgcccggcggcagcacccccgtgagcagcgccaacatgatgagcggcatcagcagcgtgcccacccccagccccctgggccccctggccggcagccccgtgatcgccgccgccaaccccctgggcatgcccgtgcccgccgccgccggcgcccagcagtag

SEQ ID NO: 9790 - DNA, 1194 bp, synthetic construct
  misc_feature 1..1194: note = Description of Artificial Sequence: Synthetic coding sequence
  source 1..1194: mol_type = other DNA
atgagcggccccgtgcccagcagagccagagtgtacaccgacgtgaacacccacagacccagagagtactgggactacgagagccacgtggtggagtggggcaaccaggacgactaccagctggtgagaaagctgggcagaggcaagtacagcgaggtgttcgaggccatcaacatcaccaacaacgagaaggtggtggtgaagatcctgaagcccgtgaagaagaagaagatcaagagagagatcaagatcctggagaacctgagaggcggccccaacatcatcaccctggccgacatcgtgaaggaccccgtgagcagaacccccgccctggtgttcgagcacgtgaacaacaccgacttcaagcagctgtaccagaccctgaccgactacgacatcagattctacatgtacgagatcctgaaggccctggactactgccacagcatgggcatcatgcacagagacgtgaagccccacaacgtgatgatcgaccacgagcacagaaagctgagactgatcgactggggcctggccgagttctaccaccccggccaggagtacaacgtgagagtggccagcagatacttcaagggccccgagctgctggtggactaccagatgtacgactacagcctggacatgtggagcctgggctgcatgctggccagcatgatcttcagaaaggagcccttcttccacggccacgacaactacgaccagctggtgagaatcgccaaggtgctgggcaccgaggacctgtacgactacatcgacaagtacaacatcgagctggaccccagattcaacgacatcctgggcagacacagcagaaagagatgggagagattcgtgcacagcgagaaccagcacctggtgagccccgaggccctggacttcctggacaagctgctgagatacgaccaccagagcagactgaccgccagagaggccatggagcacccctacttctacaccgtggtgaaggaccaggccagaatgggcagcagcagcatgcccggcggcagcacccccgtgagcagcgccaacatgatgagcggcatcagcagcgtgcccacccccagccccctgggccccctggccggcagccccgtgatcgccgccgccaaccccctgggctgcctgttccagctgcccctgagaagcgccgtgaccgccctgagcgtgagctag

SEQ ID NO: 9791 - DNA, 768 bp, synthetic construct
  misc_feature 1..768: note = Description of Artificial Sequence: Synthetic coding sequence
  source 1..768: mol_type = other DNA
atgtacgagatcctgaaggccctggactactgccacagcatgggcatcatgcacagagacgtgaagccccacaacgtgatgatcgaccacgagcacagaaagctgagactgatcgactggggcctggccgagttctaccaccccggccaggagtacaacgtgagagtggccagcagatacttcaagggccccgagctgctggtggactaccagatgtacgactacagcctggacatgtggagcctgggctgcatgctggccagcatgatcttcagaaaggagcccttcttccacggccacgacaactacgaccagctggtgagaatcgccaaggtgctgggcaccgaggacctgtacgactacatcgacaagtacaacatcgagctggaccccagattcaacgacatcctgggcagacacagcagaaagagatgggagagattcgtgcacagcgagaaccagcacctggtgagccccgaggccctggacttcctggacaagctgctgagatacgaccaccagagcagactgaccgccagagaggccatggagcacccctacttctacaccgtggtgaaggaccaggccagaatgggcagcagcagcatgcccggcggcagcacccccgtgagcagcgccaacatgatgagcggcatcagcagcgtgcccacccccagccccctgggccccctggccggcagccccgtgatcgccgccgccaaccccctgggcatgcccgtgcccgccgccgccggcgcccagcagtag

SEQ ID NO: 9792 - DNA, 1158 bp, synthetic construct
  misc_feature 1..1158: note = Description of Artificial Sequence: Synthetic coding sequence
  source 1..1158: mol_type = other DNA
atgagcggccccgtgcccagcagagccagagtgtacaccgacgtgaacacccacagacccagagagtactgggactacgagagccacgtggtggagtggggcaaccaggacgactaccagctggtgagaaagctgggcagaggcaagtacagcgaggtgttcgaggccatcaacatcaccaacaacgagaaggtggtggtgaagatcctgaagcccgtgaagaagaagaagatcaagagagagatcaagatcctggagaacctgagaggcggccccaacatcatcaccctggccgacatcgtgaaggaccccgtgagcagaacccccgccctggtgttcgagcacgtgaacaacaccgacttcaagcagctgtaccagaccctgaccgactacgacatcagattctacatgtacgagatcctgaaggccctggactactgccacagcatgggcatcatgcacagagacgtgaagccccacaacgtgatgatcgaccacgagcacagaaagctgagactgatcgactggggcctggccgagttctaccaccccggccaggagtacaacgtgagagtggccagcagatacttcaagggccccgagctgctggtggactaccagatgtacgactacagcctggacatgtggagcctgggctgcatgctggccagcatgatcttcagaaaggagcccttcttccacggccacgacaactacgaccagctggtgagaatcgccaaggtgctgggcaccgaggacctgtacgactacatcgacaagtacaacatcgagctggaccccagattcaacgacatcctgggcagacacagcagaaagagatgggagagattcgtgcacagcgagaaccagcacctggtgagccccgaggccctggacttcctggacaagctgctgagatacgaccaccagagcagactgaccgccagagaggccatggagcacccctacttctacaccgtggtgaaggaccaggccagaatgggcagcagcagcatgcccggcggcagcacccccgtgagcagcgccaacatgatgagcgagatgaagttctgcagagtggcccaggccggcctggagctgctgagcagcaccgtgtaccccccctggccccccaaggtgctgagactggaggcctag

SEQ ID NO: 9793 - DNA, 1053 bp, synthetic construct
  misc_feature 1..1053: note = Description of Artificial Sequence: Synthetic coding sequence
  source 1..1053: mol_type = other DNA
atgcccggccccgccgccggcagcagagccagagtgtacgccgaggtgaacagcctgagaagcagagagtactgggactacgaggcccacgtgcccagctggggcaaccaggacgactaccagctggtgagaaagctgggcagaggcaagtacagcgaggtgttcgaggccatcaacatcaccaacaacgagagagtggtggtgaagatcctgaagcccgtgaagaagaagaagatcaagagagaggtgaagatcctggagaacctgagaggcggcaccaacatcatcaagctgatcgacaccgtgaaggaccccgtgagcaagacccccgccctggtgttcgagtacatcaacaacaccgacttcaagcagctgtaccagatcctgaccgacttcgacatcagattctacatgtacgagctgctgaaggccctggactactgccacagcaagggcatcatgcacagagacgtgaagccccacaacgtgatgatcgaccaccagcagaagaagctgagactgatcgactggggcctggccgagttctaccaccccgcccaggagtacaacgtgagagtggccagcagatacttcaagggccccgagctgctggtggactaccagatgtacgactacagcctggacatgtggagcctgggctgcatgctggccagcatgatcttcagaagagagcccttcttccacggccaggacaactacgaccagctggtgagaatcgccaaggtgctgggcaccgaggagctgtacggctacctgaagaagtaccacatcgacctggacccccacttcaacgacatcctgggccagcacagcagaaagagatgggagaacttcatccacagcgagaacagacacctggtgagccccgaggccctggacctgctggacaagctgctgagatacgaccaccagcagagactgaccgccaaggaggccatggagcacccctacttctaccccgtggtgaaggagcagagccagccctgcgccgacaacgccgtgctgagcagcggcctgaccgccgccagatag

SEQ ID NO: 9794 - DNA, 600 bp, synthetic construct
  misc_feature 1..600: note = Description of Artificial Sequence: Synthetic coding sequence
  source 1..600: mol_type = other DNA
atggaggccagagacaagcaggtgctgagaagcctgagactggagctgggcgccgaggtgctggtggagggcctggtgctgcagtacctgtaccaggagggcatcctgaccgagaaccacatccaggagatcaacgcccagaccaccggcctgagaaagaccatgctgctgctggacatcctgcccagcagaggccccaaggccttcgacaccttcctggacagcctgcaggagttcccctgggtgagagagaagctgaagaaggccagagaggaggccatgaccgacctgcccgccggcgacagactgaccggcatccccagccacatcctgaacagcagccccagcgacagacagatcaaccagctggcccagagactgggccccgagtgggagcccatggtgctgagcctgggcctgagccagaccgacatctacagatgcaaggccaaccacccccacaacgtgcagagccaggtggtggaggccttcatcagatggagacagagattcggcaagcaggccaccttccagagcctgcacaacggcctgagagccgtggaggtggaccccagcctgctgctgcacatgctggagtag

SEQ ID NO: 9795 - DNA, 366 bp, synthetic construct
  misc_feature 1..366: note = Description of Artificial Sequence: Synthetic coding sequence
  source 1..366: mol_type = other DNA
atggaggccagagacaagcaggtgctgagaagcctgagactggagctgggcgccgaggtgctggtggagggcctggtgctgcagtacctgtaccaggagggcatcctgaccgagaaccacatccaggagatcaacgcccagaccaccggcctgagaaagaccatgctgctgctggacatcctgcccagcagaggccccaaggccttcgacaccttcctggacagcctgcaggagttcccctgggtgagagagaagctgaagaaggccagagaggaggccatgaccgacctgcccgccgagatgagaaagctgagacccaaggacagcgtgacctgcctggccagccagctgacctggagattctag

SEQ ID NO: 9796 - DNA, 600 bp, synthetic construct; identical to SEQ ID NO: 9794
  misc_feature 1..600: note = Description of Artificial Sequence: Synthetic coding sequence
  source 1..600: mol_type = other DNA

SEQ ID NO: 9797 - DNA, 312 bp, synthetic construct
  misc_feature 1..312: note = Description of Artificial Sequence: Synthetic coding sequence
  source 1..312: mol_type = other DNA
atggaggccagagacaagcaggtgctgagaagcctgagactggagctgggcgccgaggtgctggtggagggcctggtgctgcagtacctgtaccaggagggcatcctgaccgagaaccacatccaggagatcaacgcccagaccaccggcctgagaaagaccatgctgctgctggacatcctgcccagcagaggccccaaggccttcgacaccttcctggacagcctgcaggagttcccctgggtgagagagaagctgaagaaggccagagaggaggccatgaccgacctgcccgccggctgctggccctag

SEQ ID NO: 9798 - DNA, 1443 bp, synthetic construct
  misc_feature 1..1443: note = Description of Artificial Sequence: Synthetic coding sequence
  source 1..1443: mol_type = other DNA
atgagcgccgaggtgatccaccaggtggaggaggccctggacaccgacgagaaggagatgctgctgttcctgtgcagagacgtggccatcgacgtggtgccccccaacgtgagagacctgctggacatcctgagagagagaggcaagctgagcgtgggcgacctggccgagctgctgtacagagtgagaagattcgacctgctgaagagaatcctgaagatggacagaaaggccgtggagacccacctgctgagaaacccccacctggtgagcgactacagagtgctgatggccgagatcggcgaggacctggacaagagcgacgtgagcagcctgatcttcctgatgaaggactacatgggcagaggcaagatcagcaaggagaagagcttcctggacctggtggtggagctggagaagctgaacctggtggcccccgaccagctggacctgctggagaagtgcctgaagaacatccacagaatcgacctgaagaccaagatccagaagtacaagcagagcgtgcagggcgccggcaccagctacagaaacgtgctgcaggccgccatccagaagagcctgaaggaccccagcaacaacttcagactgcacaacggcagaagcaaggagcagagactgaaggagcagctgggcgcccagcaggagcccgtgaagaagagcatccaggagagcgaggccttcctgccccagagcatccccgaggagagatacaagatgaagagcaagcccctgggcatctgcctgatcatcgactgcatcggcaacgagaccgagctgctgagagacaccttcaccagcctgggctacgaggtgcagaagttcctgcacctgagcatgcacggcatcagccagatcctgggccagttcgcctgcatgcccgagcacagagactacgacagcttcgtgtgcgtgctggtgagcagaggcggcagccagagcgtgtacggcgtggaccagacccacagcggcctgcccctgcaccacatcagaagaatgttcatgggcgacagctgcccctacctggccggcaagcccaagatgttcttcatccagaactacgtggtgagcgagggccagctggaggacagcagcctgctggaggtggacggccccgccatgaagaacgtggagttcaaggcccagaagagaggcctgtgcaccgtgcacagagaggccgacttcttctggagcctgtgcaccgccgacatgagcctgctggagcagagccacagcagccccagcctgtacctgcagtgcctgagccagaagctgagacaggagagaaagagacccctgctggacctgcacatcgagctgaacggctacatgtacgactggaacagcagagtgagcgccaaggagaagtactacgtgtggctgcagcacaccctgagaaagaagctgatcctgagctacacctag

SEQ ID NO: 9799 - DNA, 1389 bp, synthetic construct
  misc_feature 1..1389: note = Description of Artificial Sequence: Synthetic coding sequence
  source 1..1389: mol_type = other DNA
atgagcgccgaggtgatccaccaggtggaggaggccctggacaccgacgagaaggagatgctgctgttcctgtgcagagacgtggccatcgacgtggtgccccccaacgtgagagacctgctggacatcctgagagagagaggcaagctgagcgtgggcgacctggccgagctgctgtacagagtgagaagattcgacctgctgaagagaatcctgaagatggacagaaaggccgtggagacccacctgctgagaaacccccacctggtgagcgactacagagtgctgatggccgagatcggcgaggacctggacaagagcgacgtgagcagcctgatcttcctgatgaaggactacatgggcagaggcaagatcagcaaggagaagagcttcctggacctggtggtggagctggagaagctgaacctggtggcccccgaccagctggacctgctggagaagtgcctgaagaacatccacagaatcgacctgaagaccaagatccagaagtacaagcagagcgtgcagggcgccggcaccagctacagaaacgtgctgcaggccgccatccagaagagcctgaaggaccccagcaacaacttcagactgcacaacggcagaagcaaggagcagagactgaaggagcagctgggcgcccagcaggagcccgtgaagaagagcatccaggagagcgaggccttcctgccccagagcatccccgaggagagatacaagatgaagagcaagcccctgggcatctgcctgatcatcgactgcatcggcaacgagaccgagctgctgagagacaccttcaccagcctgggctacgaggtgcagaagttcctgcacctgagcatgcacggcatcagccagatcctgggccagttcgcctgcatgcccgagcacagagactacgacagcttcgtgtgcgtgctggtgagcagaggcggcagccagagcgtgtacggcgtggaccagacccacagcggcctgcccctgcaccacatcagaagaatgttcatgggcgacagctgcccctacctggccggcaagcccaagatgttcttcatccagaactacgtggtgagcgagggccagctggaggacagcagcctgctggaggtggacggccccgccatgaagaacgtggagttcaaggcccagaagagaggcctgtgcaccgtgcacagagaggccgacttcttctggagcctgtgcaccgccgacatgagcctgctggagcagagccacagcagccccagcctgtacctgcagtgcctgagccagaagctgagacaggagagaggcaccatccccggcagcggcatcaccgagagcaaggacatgcacttcagcagcctgggctgcatcctgctggacgtgctgtag

SEQ ID NO: 9800 - DNA, 1047 bp, synthetic construct
  misc_feature 1..1047: note = Description of Artificial Sequence: Synthetic coding sequence
  source 1..1047: mol_type = other DNA
atggccgagatcggcgaggacctggacaagagcgacgtgagcagcctgatcttcctgatgaaggactacatgggcagaggcaagatcagcaaggagaagagcttcctggacctggtggtggagctggagaagctgaacctggtggcccccgaccagctggacctgctggagaagtgcctgaagaacatccacagaatcgacctgaagaccaagatccagaagtacaagcagagcgtgcagggcgccggcaccagctacagaaacgtgctgcaggccgccatccagaagagcctgaaggaccccagcaacaacttcagagaggagcccgtgaagaagagcatccaggagagcgaggccttcctgccccagagcatccccgaggagagatacaagatgaagagcaagcccctgggcatctgcctgatcatcgactgcatcggcaacgagaccgagctgctgagagacaccttcaccagcctgggctacgaggtgcagaagttcctgcacctgagcatgcacggcatcagccagatcctgggccagttcgcctgcatgcccgagcacagagactacgacagcttcgtgtgcgtgctggtgagcagaggcggcagccagagcgtgtacggcgtggaccagacccacagcggcctgcccctgcaccacatcagaagaatgttcatgggcgacagctgcccctacctggccggcaagcccaagatgttcttcatccagaactacgtggtgagcgagggccagctggaggacagcagcctgctggaggtggacggccccgccatgaagaacgtggagttcaaggcccagaagagaggcctgtgcaccgtgcacagagaggccgacttcttctggagcctgtgcaccgccgacatgagcctgctggagcagagccacagcagccccagcctgtacctgcagtgcctgagccagaagctgagacaggagagaggcaccatccccggcagcggcatcaccgagagcaaggacatgcacttcagcagcctgggctgcatcctgctggacgtgctgtag

SEQ ID NO: 9801 - DNA, 903 bp, synthetic construct
  misc_feature 1..903: note = Description of Artificial Sequence: Synthetic coding sequence
  source 1..903: mol_type = other DNA
atgagcgccgaggtgatccaccaggtggaggaggccctggacaccgacgagaaggagatgctgctgttcctgtgcagagacgtggccatcgacgtggtgccccccaacgtgagagacctgctggacatcctgagagagagaggcaagctgagcgtgggcgacctggccgagctgctgtacagagtgagaagattcgacctgctgaagagaatcctgaagatggacagaaaggccgtggagacccacctgctgagaaacccccacctggtgagcgactacagagtgctgatggccgagatcggcgaggacctggacaagagcgacgtgagcagcctgatcttcctgatgaaggactacatgggcagaggcaagatcagcaaggagaagagcttcctggacctggtggtggagctggagaagctgaacctggtggcccccgaccagctggacctgctggagaagtgcctgaagaacatccacagaatcgacctgaagaccaagatccagaagtacaagcagagcgtgcagggcgccggcaccagctacagaaacgtgctgcaggccgccatccagaagagcctgaaggaccccagcaacaacttcagactgcacaacggcagaagcaaggagcagagactgaaggagcagctgggcgcccagcaggagcccgtgaagaagagcatccaggagagcgaggccttcctgccccagagcatccccgaggagagatacaagatgaagagcaagcccctgggcatctgcctgatcatcgactgcatcggcaacgagaccgagaacgcccacagctggatcttcaccctgaacagcatggccacctgcatgatcggcaccgccgagttcctgcccagaagaaacatcatgagcggctgcagcaccctgtag

SEQ ID NO: 9802 - DNA, 753 bp, synthetic construct
  misc_feature 1..753: note = Description of Artificial Sequence: Synthetic coding sequence
  source 1..753: mol_type = other DNA
atgagcgccgaggtgatccaccaggtggaggaggccctggacaccgacgagaaggagatgctgctgttcctgtgcagagacgtggccatcgacgtggtgccccccaacgtgagagacctgctggacatcctgagagagagaggcaagctgagcgtgggcgacctggccgagctgctgtacagagtgagaagattcgacctgctgaagagaatcctgaagatggacagaaaggccgtggagacccacctgctgagaaacccccacctggtgagcgactacagagtgctgatggccgagatcggcgaggacctggacaagagcgacgtgagcagcctgatcttcctgatgaaggactacatgggcagaggcaagatcagcaaggagaagagcttcctggacctggtggtggagctggagaagctgaacctggtggcccccgaccagctggacctgctggagaagtgcctgaagaacatccacagaatcgacctgaagaccaagatccagaagtacaagcagagcggcggctggaacggcacctggatgaccaaggccagcttcagcctgtggctggagatcgccagcctgtacatcctgcacatccccgacctgcccacccccctgccctgcatcttcatgatcagcgccaagtgctgccaggccgtgctgaacatcagcgtgttcaagaaggagagcggcatctgcaccggctggcagagctacggccacagcggcgtgctgcacgtgtgctag

SEQ ID NO: 9803 - DNA, 357 bp, synthetic construct
  misc_feature 1..357: note = Description of Artificial Sequence: Synthetic coding sequence
  source 1..357: mol_type = other DNA
atgagcgccgaggtgatccaccaggtggaggaggccctggacaccgacgagaaggagatgctgctgttcctgtgcagagacgtggccatcgacgtggtgccccccaacgtgagagacctgctggacatcctgagagagagaggcaagctgagcgtgggcgacctggccgagctgctgtacagagtgagaagattcgacctgctgaagagaatcctgaagatggacagaaaggccgtggagacccacctgctgagaaacccccacctggtgagcgactacagagtgctgatggccgagatcggcgaggacctggacaagagcgacgtgagcagcctgatcttcctgatgaaggactag

SEQ ID NO: 9804 - DNA, 1443 bp, synthetic construct; identical to SEQ ID NO: 9798
  misc_feature 1..1443: note = Description of Artificial Sequence: Synthetic coding sequence
  source 1..1443: mol_type = other DNA

SEQ ID NO: 9805 - DNA, 189 bp, synthetic construct
  misc_feature 1..189: note = Description of Artificial Sequence: Synthetic coding sequence
  source 1..189: mol_type = other DNA
atgagcgccgaggtgatccaccaggtggaggaggccctggacaccgacgagaaggagatgctgctgttcctgtgcagagacgtggccatcgacgtggtgccccccaacgtgagagacctgctggacatcctgagagagagaggcaagctgagcgtgggcgacctggccgagctgctgtacagagtgtag

SEQ ID NO: 9806 - DNA, 195 bp, synthetic construct
  misc_feature 1..195: note = Description of Artificial Sequence: Synthetic coding sequence
  source 1..195: mol_type = other DNA
atgagcgccgaggtgatccaccaggtggaggaggccctggacaccgacgagaaggagatgctgctgttcctgtgcagagacgtggccatcgacgtggtgccccccaacgtgagagacctgctggacatcctgagagagagaggcaagctgagcgtgggcgacctggccgagctgctgtacagagtgagaagatag

SEQ ID NO: 9807 - DNA, 390 bp, synthetic construct
  misc_feature 1..390: note = Description of Artificial Sequence: Synthetic coding sequence
  source 1..390: mol_type = other DNA
atgagcgccgaggtgatccaccaggtggaggaggccctggacaccgacgagaaggagatgctgctgttcctgtgcagagacgtggccatcgacgtggtgccccccaacgtgagagacctgctggacatcctgagagagagaggcaagctgagcgtgggcgacctggccgagctgctgtacagagtgagaagattcgacctgctgaagagaatcctgaagatggacagaaaggccgtggagacccacctgctgagaaacccccacctggtgagcgactacagagtgctgatggccgagatcggcgaggacctggacaagagcgacgtgagcagcctgatcttcctgatgaaggactacatgggcagaggcaagatcagcaaggagaagtag

SEQ ID NO: 9808 - DNA, 1155 bp, synthetic construct
  misc_feature 1..1155: note = Description of Artificial Sequence: Synthetic coding sequence
  source 1..1155: mol_type = other DNA
atggccgagatcggcgaggacctggacaagagcgacgtgagcagcctgatcttcctgatgaaggactacatgggcagaggcaagatcagcaaggagaagagcttcctggacctggtggtggagctggagaagctgaacctggtggcccccgaccagctggacctgctggagaagtgcctgaagaacatccacagaatcgacctgaagaccaagatccagaagtacaagcagagcgtgcagggcgccggcaccagctacagaaacgtgctgcaggccgccatccagaagagcctgaaggaccccagcaacaacttcagactgcacaacggcagaagcaaggagcagagactgaaggagcagctgggcgcccagcaggagcccgtgaagaagagcatccaggagagcgaggccttcctgccccagagcatccccgaggagagatacaagatgaagagcaagcccctgggcatctgcctgatcatcgactgcatcggcaacgagaccgagctgctgagagacaccttcaccagcctgggctacgaggtgcagaagttcctgcacctgagcatgcacggcatcagccagatcctgggccagttcgcctgcatgcccgagcacagagactacgacagcttcgtgtgcgtgctggtgagcagaggcggcagccagagcgtgtacggcgtggaccagacccacagcggcctgcccctgcaccacatcagaagaatgttcatgggcgacagctgcccctacctggccggcaagcccaagatgttcttcatccagaactacgtggtgagcgagggccagctggaggacagcagcctgctggaggtggacggccccgccatgaagaacgtggagttcaaggcccagaagagaggcctgtgcaccgtgcacagagaggccgacttcttctggagcctgtgcaccgccgacatgagcctgctggagcagagccacagcagccccagcctgtacctgcagtgcctgagccagaagctgagacaggagagaaagagacccctgctggacctgcacatcgagctgaacggctacatgtacgactggaacagcagagtgagcgccaaggagaagtactacgtgtggctgcagcacaccctgagaaagaagctgatcctgagctacacctag

SEQ ID NO: 9809 - DNA, 666 bp, synthetic construct
  misc_feature 1..666: note = Description of Artificial Sequence: Synthetic coding sequence
  source 1..666: mol_type = other DNA
atgagcgccgaggtgatccaccaggtggaggaggccctggacaccgacgagaaggagatgctgctgttcctgtgcagagacgtggccatcgacgtggtgccccccaacgtgagagacctgctggacatcctgagagagagaggcaagctgagcgtgggcgacctggccgagctgctgtacagagtgagaagattcgacctgctgaagagaatcctgaagatggacagaaaggccgtggagacccacctgctgagaaacccccacctggtgagcgactacagagtgctgatggccgagatcggcgaggacctggacaagagcgacgtgagcagcctgatcttcctgatgaaggactacatgggcagaggcaagatcagcaaggagaagagcttcctggacctggtggtggagctggagaagctgaacctggtggcccccgaccagctggacctgctggagaagtgcctgaagaacatccacagaatcgacctgaagaccaagatccagaagtacaagcagagcgtgcagggcgccggcaccagctacagaaacgtgctgcaggccgccatccagaagagcctgaaggaccccagcaacaacttcagaatgatcaccccctacgcccactgccccgacctgaagatcctgggcaactgcagcatgtag

SEQ ID NO: 9810 - DNA, 1338 bp, synthetic construct
  misc_feature 1..1338: note = Description of Artificial Sequence: Synthetic coding sequence
  source 1..1338: mol_type = other DNA
atgagcgccgaggtgatccaccaggtggaggaggccctggacaccgacgagaaggagatgctgctgttcctgtgcagagacgtggccatcgacgtggtgccccccaacgtgagagacctgctggacatcctgagagagagaggcaagctgagcgtgggcgacctggccgagctgctgtacagagtgagaagattcgacctgctgaagagaatcctgaagatggacagaaaggccgtggagacccacctgctgagaaacccccacctggtgagcgactacagagtgctgatggccgagatcggcgaggacctggacaagagcgacgtgagcagcctgatcttcctgatgaaggactacatgggcagaggcaagatcagcaaggagaagagcttcctggacctggtggtggagctggagaagctgaacctggtggcccccgaccagctggacctgctggagaagtgcctgaagaacatccacagaatcgacctgaagaccaagatccagaagtacaagcagagcgtgcagggcgccggcaccagctacagaaacgtgctgcaggccgccatccagaagagcctgaaggaccccagcaacaacttcagaagcatccccgaggagagatacaagatgaagagcaagcccctgggcatctgcctgatcatcgactgcatcggcaacgagaccgagctgctgagagacaccttcaccagcctgggctacgaggtgcagaagttcctgcacctgagcatgcacggcatcagccagatcctgggccagttcgcctgcatgcccgagcacagagactacgacagcttcgtgtgcgtgctggtgagcagaggcggcagccagagcgtgtacggcgtggaccagacccacagcggcctgcccctgcaccacatcagaagaatgttcatgggcgacagctgcccctacctggccggcaagcccaagatgttcttcatccagaactacgtggtgagcgagggccagctggaggacagcagcctgctggaggtggacggccccgccatgaagaacgtggagttcaaggcccagaagagaggcctgtgcaccgtgcacagagaggccgacttcttctggagcctgtgcaccgccgacatgagcctgctggagcagagccacagcagccccagcctgtacctgcagtgcctgagccagaagctgagacaggagagaaagagacccctgctggacctgcacatcgagctgaacggctacatgtacgactggaacagcagagtgagcgccaaggagaagtactacgtgtggctgcagcacaccctgagaaagaagctgatcctgagctacacctag

SEQ ID NO: 9811 - DNA, 1152 bp, synthetic construct
  misc_feature 1..1152: note = Description of Artificial Sequence: Synthetic coding sequence
  source 1..1152: mol_type = other DNA
atggccgacaaggtgctgaaggagaagagaaagctgttcatcagaagcatgggcgagggcaccatcaacggcctgctggacgagctgctgcagaccagagtgctgaacaaggaggagatggagaaggtgaagagagagaacgccaccgtgatggacaagaccagagccctgatcgacagcgtgatccccaagggcgcccaggcctgccagatctgcatcacctacatctgcgaggaggacagctacctggccggcaccctgggcctgagcgccgccccccaggccgtgcaggacaaccccgccatgcccaccagcagcggcagcgagggcaacgtgaagctgtgcagcctggaggaggcccagagaatctggaagcagaagagcgccgagatctaccccatcatggacaagagcagcagaaccagactggccctgatcatctgcaacgaggagttcgacagcatccccagaagaaccggcgccgaggtggacatcaccggcatgaccatgctgctgcagaacctgggctacagcgtggacgtgaagaagaacctgaccgccagcgacatgaccaccgagctggaggccttcgcccacagacccgagcacaagaccagcgacagcaccttcctggtgttcatgagccacggcatcagagagggcatctgcggcaagaagcacagcgagcaggtgcccgacatcctgcagctgaacgccatcttcaacatgctgaacaccaagaactgccccagcctgaaggacaagcccaaggtgatcatcatccaggcctgcagaggcgacagccccggcgtggtgtggttcaaggacagcgtgggcgtgagcggcaacctgagcctgcccaccaccgaggagttcgaggacgacgccatcaagaaggcccacatcgagaaggacttcatcgccttctgcagcagcacccccgacaacgtgagctggagacaccccaccatgggcagcgtgttcatcggcagactgatcgagcacatgcaggagtacgcctgcagctgcgacgtggaggagatcttcagaaaggtgagattcagcttcgagcagcccgacggcagagcccagatgcccaccaccgagagagtgaccctgaccagatgcttctacctgttccccggccactag

SEQ ID NO: 9812 - DNA, 792 bp, synthetic construct
  misc_feature 1..792: note = Description of Artificial Sequence: Synthetic coding sequence
  source 1..792: mol_type = other DNA
atggccgacaaggtgctgaaggagaagagaaagctgttcatcagaagcatgggcgaggccccccaggccgtgcaggacaaccccgccatgcccaccagcagcggcagcgagggcaacgtgaagctgtgcagcctggaggaggcccagagaatctggaagcagaagagcgccgagatctaccccatcatggacaagagcagcagaaccagactggccctgatcatctgcaacgaggagttcgacagcatccccagaagaaccggcgccgaggtggacatcaccggcatgaccatgctgctgcagaacctgggctacagcgtggacgtgaagaagaacctgaccgccagcgacatgaccaccgagctggaggccttcgcccacagacccgagcacaagaccagcgacagcaccttcctggtgttcatgagccacggcatcagagagggcatctgcggcaagaagcacagcgagcaggtgcccgacatcctgcagctgaacgccatcttcaacatgctgaacaccaagaactgccccagcctgaaggacaagcccaaggtgatcatcatccaggcctgcagaggcgacaacgtgagctggagacaccccaccatgggcagcgtgttcatcggcagactgatcgagcacatgcaggagtacgcctgcagctgcgacgtggaggagatcttcagaaaggtgagattcagcttcgagcagcccgacggcagagcccagatgcccaccaccgagagagtgaccctgaccagatgcttctacctgttccccggccactag

SEQ ID NO: 9813 - DNA, 267 bp, synthetic construct
  misc_feature 1..267: note = Description of Artificial Sequence: Synthetic coding sequence
  source 1..267: mol_type = other DNA
atggccgacaaggtgctgaaggagaagagaaagctgttcatcagaagcatgggcgaggacaacgtgagctggagacaccccaccatgggcagcgtgttcatcggcagactgatcgagcacatgcaggagtacgcctgcagctgcgacgtggaggagatcttcagaaaggtgagattcagcttcgagcagcccgacggcagagcccagatgcccaccaccgagagagtgaccctgaccagatgcttctacctgttccccggccactag

SEQ ID NO: 9814 - DNA, 1152 bp, synthetic construct; identical to SEQ ID NO: 9811
  misc_feature 1..1152: note = Description of Artificial Sequence: Synthetic coding sequence
  source 1..1152: mol_type = other DNA

SEQ ID NO: 9815 - DNA, 267 bp, synthetic construct; identical to SEQ ID NO: 9813
  misc_feature 1..267: note = Description of Artificial Sequence: Synthetic coding sequence
  source 1..267: mol_type = other DNA

SEQ ID NO: 9816 - DNA, 1215 bp, synthetic construct
  misc_feature 1..1215: note = Description of Artificial Sequence: Synthetic coding sequence
  source 1..1215: mol_type = other DNA
atggccgacaaggtgctgaaggagaagagaaagctgttcatcagaagcatgggcgagggcaccatcaacggcctgctggacgagctgctgcagaccagagtgctgaacaaggaggagatggagaaggtgaagagagagaacgccaccgtgatggacaagaccagagccctgatcgacagcgtgatccccaagggcgcccaggcctgccagatctgcatcacctacatctgcgaggaggacagctacctggccggcaccctgggcctgagcgccgaccagaccagcggcaactacctgaacatgcaggacagccagggcgtgctgagcagcttccccgccccccaggccgtgcaggacaaccccgccatgcccaccagcagcggcagcgagggcaacgtgaagctgtgcagcctggaggaggcccagagaatctggaagcagaagagcgccgagatctaccccatcatggacaagagcagcagaaccagactggccctgatcatctgcaacgaggagttcgacagcatccccagaagaaccggcgccgaggtggacatcaccggcatgaccatgctgctgcagaacctgggctacagcgtggacgtgaagaagaacctgaccgccagcgacatgaccaccgagctggaggccttcgcccacagacccgagcacaagaccagcgacagcaccttcctggtgttcatgagccacggcatcagagagggcatctgcggcaagaagcacagcgagcaggtgcccgacatcctgcagctgaacgccatcttcaacatgctgaacaccaagaactgccccagcctgaaggacaagcccaaggtgatcatcatccaggcctgcagaggcgacagccccggcgtggtgtggttcaaggacagcgtgggcgtgagcggcaacctgagcctgcccaccaccgaggagttcgaggacgacgccatcaagaaggcccacatcgagaaggacttcatcgccttctgcagcagcacccccgacaacgtgagctggagacaccccaccatgggcagcgtgttcatcggcagactgatcgagcacatgcaggagtacgcctgcagctgcgacgtggaggagatcttcagaaaggtgagattcagcttcgagcagcccgacggcagagcccagatgcccaccaccgagagagtgaccctgaccagatgcttctacctgttccccggccactag

SEQ ID NO: 9817 - DNA, 792 bp, synthetic construct; identical to SEQ ID NO: 9812
  misc_feature 1..792: note = Description of Artificial Sequence: Synthetic coding sequence
  source 1..792: mol_type = other DNA

SEQ ID NO: 9818 - DNA, 1152 bp, synthetic construct; identical to SEQ ID NO: 9811
  misc_feature 1..1152: note = Description of Artificial Sequence: Synthetic coding sequence
  source 1..1152: mol_type = other DNA

SEQ ID NO: 9819 - DNA, 936 bp, synthetic construct
  misc_feature 1..936: note = Description of Artificial Sequence: Synthetic coding sequence
  source 1..936: mol_type = other DNA
atggccgacaaggtgctgaaggagaagagaaagctgttcatcagaagcatgggcgaggccccccaggccgtgcaggacaaccccgccatgcccaccagcagcggcagcgagggcaacgtgaagctgtgcagcctggaggaggcccagagaatctggaagcagaagagcgccgagatctaccccatcatggacaagagcagcagaaccagactggccctgatcatctgcaacgaggagttcgacagcatccccagaagaaccggcgccgaggtggacatcaccggcatgaccatgctgctgcagaacctgggctacagcgtggacgtgaagaagaacctgaccgccagcgacatgaccaccgagctggaggccttcgcccacagacccgagcacaagaccagcgacagcaccttcctggtgttcatgagccacggcatcagagagggcatctgcggcaagaagcacagcgagcaggtgcccgacatcctgcagctgaacgccatcttcaacatgctgaacaccaagaactgccccagcctgaaggacaagcccaaggtgatcatcatccaggcctgcagaggcgacagccccggcgtggtgtggttcaaggacagcgtgggcgtgagcggcaacctgagcctgcccaccaccgaggagttcgaggacgacgccatcaagaaggcccacatcgagaaggacttcatcgccttctgcagcagcacccccgacaacgtgagctggagacaccccaccatgggcagcgtgttcatcggcagactgatcgagcacatgcaggagtacgcctgcagctgcgacgtggaggagatcttcagaaaggtgagattcagcttcgagcagcccgacggcagagcccagatgcccaccaccgagagagtgaccctgaccagatgcttctacctgttccccggccactag

SEQ ID NO: 9820 - DNA, 906 bp, synthetic construct
  misc_feature 1..906: note = Description of Artificial Sequence: Synthetic coding sequence
  source 1..906: mol_type = other DNA
atggagaaggtgaagagagagaacgccaccgtgatggacaagaccagagccctgatcgacagcgtgatccccaagggcgcccaggcctgccagatctgcatcacctacatctgcgaggaggacagctacctggccggcaccctgggcctgagcgccgaccagaccagcggcaactacctgaacatgcaggacagccagggcgtgctgagcagcttccccgccccccaggccgtgcaggacaaccccgccatgcccaccagcagcggcagcgagggcaacgtgaagctgtgcagcctggaggaggcccagagaatctggaagcagaagagcgccgagatctaccccatcatggacaagagcagcagaaccagactggccctgatcatctgcaacgaggagttcgacagcatccccagaagaaccggcgccgaggtggacatcaccggcatgaccatgctgctgcagaacctgggctacagcgtggacgtgaagaagaacctgaccgccagcgacatgaccaccgagctggaggccttcgcccacagacccgagcacaagaccagcgacagcaccttcctggtgttcatgagccacggcatcagagagggcatctgcggcaagaagcacagcgagcaggtgcccgacatcctgcagctgaacgccatcttcaacatgctgaacaccaagaactgccccagcctgaaggacaagcccaaggtgatcatcatccaggcctgcagaggcgacagccccggcgtggtgtggttcaaggacagcgtgggcgtgagcggcaacctgagcctgcccaccaccgaggagttcgaggacgacgccatcaagaaggcccacatcgagaaggacttcatcgccttctgcagcagcacccccggcaagagccagagctag

SEQ ID NO: 9821 - DNA, 333 bp, synthetic construct
  misc_feature 1..333: note = Description of Artificial Sequence: Synthetic coding sequence
  source 1..333: mol_type = other DNA
atggccgacaaggtgctgaaggagaagagaaagctgttcatcagaagcatgggcgagggcaccatcaacggcctgctggacgagctgctgcagaccagagtgctgaacaaggaggagatggagaaggtgaagagagagaacgccaccgtgatggacaagaccagagccctgatcgacagcgtgatccccaagggcgcccaggcctgccagatctgcatcacctacatctgcgaggaggacagctacctggccggcaccctgggcctgagcgccgacctgagcaacaacggccaggtgaagccccacaccagctgcagccactacctgcagtag

SEQ ID NO: 9822 - DNA, 267 bp, synthetic construct; identical to SEQ ID NO: 9813
  misc_feature 1..267: note = Description of Artificial Sequence: Synthetic coding sequence
  source 1..267: mol_type = other DNA

SEQ ID NO: 9823 - DNA, 1215 bp, synthetic construct; identical to SEQ ID NO: 9816
  misc_feature 1..1215: note = Description of Artificial Sequence: Synthetic coding sequence
  source 1..1215: mol_type = other DNA

SEQ ID NO: 9824 - DNA, 792 bp, synthetic construct; identical to SEQ ID NO: 9812
  misc_feature 1..792: note = Description of Artificial Sequence: Synthetic coding sequence
  source 1..792: mol_type = other DNA

SEQ ID NO: 9825 - DNA, 1368 bp, synthetic construct
  misc_feature 1..1368: note = Description of Artificial Sequence: Synthetic coding sequence
  source 1..1368: mol_type = other DNA
atgaagagccagggccagcactggtacagcagcagcgacaagaactgcaaggtgagcttcagagagaagctgctgatcatcgacagcaacctgggcgtgcaggacgtggagaacctgaagttcctgtgcatcggcctggtgcccaacaagaagctggagaagagcagcagcgccagcgacgtgttcgagcacctgctggccgaggacctgctgagcgaggaggaccccttcttcctggccgagctgctgtacatcatcagacagaagaagctgctgcagcacctgaactgcaccaaggaggaggtggagagactgctgcccaccagacagagagtgagcctgttcagaaacctgctgtacgagctgagcgagggcatcgacagcgagaacctgaaggacatgatcttcctgctgaaggacagcctgcccaagaccgagatgaccagcctgagcttcctggccttcctggagaagcagggcaagatcgacgaggacaacctgacctgcctggaggacctgtgcaagaccgtggtgcccaagctgctgagaaacatcgagaagtacaagagagagaaggccatccagatcgtgaccccccccgtggacaaggaggccgagagctaccagggcgaggaggagctggtgagccagaccgacgtgaagaccttcctggaggccctgccccaggagagctggcagaacaagcacgccggcagcaacgagatcctgagccacgtgttccagtggctgggcttcaccgtgcacatccacaacaacgtgaccaaggtggagatggagatggtgctgcagaagcagaagtgcaaccccgcccacgccgacggcgactgcttcgtgttctgcatcctgacccacggcagattcggcgccgtgtacagcagcgacgaggccctgatccccatcagagagatcatgagccacttcaccgccctgcagtgccccagactggccgagaagcccaagctgttcttcatccaggcctgccagggcgaggagatccagcccagcgtgagcatcgaggccgacgccctgaaccccgagcaggcccccaccagcctgcaggacagcatccccgccgaggccgacttcctgctgggcctggccaccgtgcccggctacgtgagcttcagacacgtggaggagggcagctggtacatccagagcctgtgcaaccacctgaagaagctggtgcccagacacgaggacatcctgagcatcctgaccgccgtgaacgacgacgtgagcagaagagtggacaagcagggcaccaagaagcagatgccccagcccgccttcaccctgagaaagaagctggtgttccccgtgcccctggacgccctgagcctgtag

SEQ ID NO: 9826 - DNA, 1437 bp, synthetic construct
  misc_feature 1..1437: note = Description of Artificial Sequence: Synthetic coding sequence
  source 1..1437: mol_type = other DNA
atgaagagccagggccagcactggtacagcagcagcgacaagaactgcaaggtgagcttcagagagaagctgctgatcatcgacagcaacctgggcgtgcaggacgtggagaacctgaagttcctgtgcatcggcctggtgcccaacaagaagctggagaagagcagcagcgccagcgacgtgttcgagcacctgctggccgaggacctgctgagcgaggaggaccccttcttcctggccgagctgctgtacatcatcagacagaagaagctgctgcagcacctgaactgcaccaaggaggaggtggagagactgctgcccaccagacagagagtgagcctgttcagaaacctgctgtacgagctgagcgagggcatcgacagcgagaacctgaaggacatgatcttcctgctgaaggacagcctgcccaagaccgagatgaccagcctgagcttcctggccttcctggagaagcagggcaagatcgacgaggacaacctgacctgcctggaggacctgtgcaagaccgtggtgcccaagctgctgagaaacatcgagaagtacaagagagagaaggccatccagatcgtgaccccccccgtggacaaggaggccgagagctaccagggcgaggaggagctggtgagccagaccgacgtgaagaccttcctggaggccctgcccagagccgccgtgtacagaatgaacagaaaccacagaggcctgtgcgtgatcgtgaacaaccacagcttcaccagcctgaaggacagacagggcacccacaaggacgccgagatcctgagccacgtgttccagtggctgggcttcaccgtgcacatccacaacaacgtgaccaaggtggagatggagatggtgctgcagaagcagaagtgcaaccccgcccacgccgacggcgactgcttcgtgttctgcatcctgacccacggcagattcggcgccgtgtacagcagcgacgaggccctgatccccatcagagagatcatgagccacttcaccgccctgcagtgccccagactggccgagaagcccaagctgttcttcatccaggcctgccagggcgaggagatccagcccagcgtgagcatcgaggccgacgccctgaaccccgagcaggcccccaccagcctgcaggacagcatccccgccgaggccgacttcctgctgggcctggccaccgtgcccggctacgtgagcttcagacacgtggaggagggcagctggtacatccagagcctgtgcaaccacctgaagaagctggtgcccagaatgctgaagttcctggagaagaccatggagatcagaggcagaaagagaaccgtgtggggcgccaagcagatcagcgccaccagcctgcccaccgccatcagcgcccagacccccagaccccccatgagaagatggagcagcgtgagctag

SEQ ID NO: 9827 - DNA, 1566 bp, synthetic construct
  misc_feature 1..1566: note = Description of Artificial Sequence: Synthetic coding sequence
  source 1..1566: mol_type = other DNA
atgaagagccagggccagcactggtacagcagcagcgacaagaactgcaaggtgagcttcagagagaagctgctgatcatcgacagcaacctgggcgtgcaggacgtggagaacctgaagttcctgtgcatcggcctggtgcccaacaagaagctggagaagagcagcagcgccagcgacgtgttcgagcacctgctggccgaggacctgctgagcgaggaggaccccttcttcctggccgagctgctgtacatcatcagacagaagaagctgctgcagcacctgaactgcaccaaggaggaggtggagagactgctgcccaccagacagagagtgagcctgttcagaaacctgctgtacgagctgagcgagggcatcgacagcgagaacctgaaggacatgatcttcctgctgaaggacagcctgcccaagaccgagatgaccagcctgagcttcctggccttcctggagaagcagggcaagatcgacgaggacaacctgacctgcctggaggacctgtgcaagaccgtggtgcccaagctgctgagaaacatcgagaagtacaagagagagaaggccatccagatcgtgaccccccccgtggacaaggaggccgagagctaccagggcgaggaggagctggtgagccagaccgacgtgaagaccttcctggaggccctgccccaggagagctggcagaacaagcacgccggcagcaacggcaacagagccaccaacggcgcccccagcctggtgagcagaggcatgcagggcgccagcgccaacaccctgaacagcgagaccagcaccaagagagccgccgtgtacagaatgaacagaaaccacagaggcctgtgcgtgatcgtgaacaaccacagcttcaccagcctgaaggacagacagggcacccacaaggacgccgagatcctgagccacgtgttccagtggctgggcttcaccgtgcacatccacaacaacgtgaccaaggtggagatggagatggtgctgcagaagcagaagtgcaaccccgcccacgccgacggcgactgcttcgtgttctgcatcctgacccacggcagattcggcgccgtgtacagcagcgacgaggccctgatccccatcagagagatcatgagccacttcaccgccctgcagtgccccagactggccgagaagcccaagctgttcttcatccaggcctgccagggcgaggagatccagcccagcgtgagcatcgaggccgacgccctgaaccccgagcaggcccccaccagcctgcaggacagcatccccgccgaggccgacttcctgctgggcctggccaccgtgcccggctacgtgagcttcagacacgtggaggagggcagctggtacatccagagcctgtgcaaccacctgaagaagctggtgcccagaatgctgaagttcctggagaagaccatggagatcagaggcagaaagagaaccgtgtggggcgccaagcagatcagcgccaccagcctgcccaccgccatcagcgcccagacccccagaccccccatgagaagatggagcagcgtgagctag

SEQ ID NO: 9828 - DNA, 1569 bp, synthetic construct
  misc_feature 1..1569: note = Description of Artificial Sequence: Synthetic coding sequence
  source 1..1569: mol_type = other DNA
atgaagagccagggccagcactggtacagcagcagcgacaagaactgcaaggtgagcttcagagagaagctgctgatcatcgacagcaacctgggcgtgcaggacgtggagaacctgaagttcctgtgcatcggcctggtgcccaacaagaagctggagaagagcagcagcgccagcgacgtgttcgagcacctgctggccgaggacctgctgagcgaggaggaccccttcttcctggccgagctgctgtacatcatcagacagaagaagctgctgcagcacctgaactgcaccaaggaggaggtggagagactgctgcccaccagacagagagtgagcctgttcagaaacctgctgtacgagctgagcgagggcatcgacagcgagaacctgaaggacatgatcttcctgctgaaggacagcctgcccaagaccgagatgaccagcctgagcttcctggccttcctggagaagcagggcaagatcgacgaggacaacctgacctgcctggaggacctgtgcaagaccgtggtgcccaagctgctgagaaacatcgagaagtacaagagagagaaggccatccagatcgtgaccccccccgtggacaaggaggccgagagctaccagggcgaggaggagctggtgagccagaccgacgtgaagaccttcctggaggccctgccccaggagagctggcagaacaagcacgccggcagcaacggcaacagagccaccaacggcgcccccagcctggtgagcagaggcatgcagggcgccagcgccaacaccctgaacagcgagaccagcaccaagagagccgccgtgtacagaatgaacagaaaccacagaggcctgtgcgtgatcgtgaacaaccacagcttcaccagcctgaaggacagacagggcacccacaaggacgccgagatcctgagccacgtgttccagtggctgggcttcaccgtgcacatccacaacaacgtgaccaaggtggagatggagatggtgctgcagaagcagaagtgcaaccccgcccacgccgacggcgactgcttcgtgttctgcatcctgacccacggcagattcggcgccgtgtacagcagcgacgaggccctgatccccatcagagagatcatgagccacttcaccgccctgcagtgccccagactggccgagaagcccaagctgttcttcatccaggcctgccagggcgaggagatccagcccagcgtgagcatcgaggccgacgccctgaaccccgagcaggcccccaccagcctgcaggacagcatccccgccgaggccgacttcctgctgggcctggccaccgtgcccggctacgtgagcttcagacacgtggaggagggcagctggtacatccagagcctgtgcaaccacctgaagaagctggtgcccagacacgaggacatcctgagcatcctgaccgccgtgaacgacgacgtgagcagaagagtggacaagcagggcaccaagaagcagatgccccagcccgccttcaccctgagaaagaagctggtgttccccgtgcccctggacgccctgagcctgtag

SEQ ID NO: 9829 - DNA, 1440 bp, synthetic construct
  misc_feature 1..1440: note = Description of Artificial Sequence: Synthetic coding sequence
  source 1..1440: mol_type = other DNA
atgaagagccagggccagcactggtacagcagcagcgacaagaactgcaaggtgagcttcagagagaagctgctgatcatcgacagcaacctgggcgtgcaggacgtggagaacctgaagttcctgtgcatcggcctggtgcccaacaagaagctggagaagagcagcagcgccagcgacgtgttcgagcacctgctggccgaggacctgctgagcgaggaggaccccttcttcctggccgagctgctgtacatcatcagacagaagaagctgctgcagcacctgaactgcaccaaggaggaggtggagagactgctgcccaccagacagagagtgagcctgttcagaaacctgctgtacgagctgagcgagggcatcgacagcgagaacctgaaggacatgatcttcctgctgaaggacagcctgcccaagaccgagatgaccagcctgagcttcctggccttcctggagaagcagggcaagatcgacgaggacaacctgacctgcctggaggacctgtgcaagaccgtggtgcccaagctgctgagaaacatcgagaagtacaagagagagaaggccatccagatcgtgaccccccccgtggacaaggaggccgagagctaccagggcgaggaggagctggtgagccagaccgacgtgaagaccttcctggaggccctgcccagagccgccgtgtacagaatgaacagaaaccacagaggcctgtgcgtgatcgtgaacaaccacagcttcaccagcctgaaggacagacagggcacccacaaggacgccgagatcctgagccacgtgttccagtggctgggcttcaccgtgcacatccacaacaacgtgaccaaggtggagatggagatggtgctgcagaagcagaagtgcaaccccgcccacgccgacggcgactgcttcgtgttctgcatcctgacccacggcagattcggcgccgtgtacagcagcgacgaggccctgatccccatcagagagatcatgagccacttcaccgccctgcagtgccccagactggccgagaagcccaagctgttcttcatccaggcctgccagggcgaggagatccagcccagcgtgagcatcgaggccgacgccctgaaccccgagcaggcccccaccagcctgcaggacagcatccccgccgaggccgacttcctgctgggcctggccaccgtgcccggctacgtgagcttcagacacgtggaggagggcagctggtacatccagagcctgtgcaaccacctgaagaagctggtgcccagacacgaggacatcctgagcatcctgaccgccgtgaacgacgacgtgagcagaagagtggacaagcagggcaccaagaagcagatgccccagcccgccttcaccctgagaaagaagctggtgttccccgtgcccctggacgccctgagcctgtag

SEQ ID NO: 9830 - DNA, 822 bp, synthetic construct
  misc_feature 1..822: note = Description of Artificial Sequence: Synthetic coding sequence
  source 1..822: mol_type = other DNA
atgaagagccagggccagcactggtacagcagcagcgacaagaactgcaaggtgagcttcagagagaagctgctgatcatcgacagcaacctgggcgtgcaggacgtggagaacctgaagttcctgtgcatcggcctggtgcccaacaagaagctggagaagagcagcagcgccagcgacgtgttcgagcacctgctggccgaggacctgctgagcgaggaggaccccttcttcctggccgagctgctgtacatcatcagacagaagaagctgctgcagcacctgaactgcaccaaggaggaggtggagagactgctgcccaccagacagagagtgagcctgttcagaaacctgctgtacgagctgagcgagggcatcgacagcgagaacctgaaggacatgatcttcctgctgaaggacagcctgcccaagaccgagatgaccagcctgagcttcctggccttcctggagaagcagggcaagatcgacgaggacaacctgacctgcctggaggacctgtgcaagaccgtggtgcccaagctgctgagaaacatcgagaagtacaagagagagaaggccatccagatcgtgaccccccccgtggacaaggaggccgagagctaccagggcgaggaggagctggtgagccagaccgacgtgaagaccttcctggaggccctgccccaggagagctggcagaacaagcacgccggcagcaacgagggcagctgcgtgcaggacgagagcgagccccagagacccctgtgccactgccagcagccccagctgtacctgcccgagggccagaccagaaacccctag

SEQ ID NO: 9831 - DNA, 1533 bp, synthetic construct
  misc_feature 1..1533: note = Description of Artificial Sequence: Synthetic coding sequence
  source 1..1533: mol_type = other DNA
atggccgccgccgccctgagagaccccgcccaggtgcccgtggccgccgacctgctgaccgaccacgaggagggctacgtgaccttcgaggacgtggccgtgtacttcagccaggaggagtggagactgctggacgacgcccagagactgctgtacagaaacgtgatgctggagaacttcaccctgctggccagcctgggcctggccagcagcaagacccacgagatcacccagctggagagctgggaggagcccttcatgcccgcctgggaggtggtgaccagcgccatccccagaggctgctggcacggcgccgaggccgaggaggcccccgagcagatcgccagcgtgggcctgctgagcagcaacatccagcagcaccagaagcagcactgcggcgagaagcccctgaagagacaggagggcagagtgcccgtgctgagaagctgcaaggtgcacctgagcgagaagagcctgcagagcagagaggtgggcaaggccctgctgatcagcagcggcgtgctgaagcaccaggtgacccacaccggcgagaagagccacagaagcagcaagagcagagaggccttccacgccggcaagagacactacaagtgcagcgagtgcggcaaggccttcggccagaagtacctgctggtgcagcaccagagactgcacgccggcaagaagacctacgagtgcagcgagtgcggcaagctgttcagagacatgagcaacctgttcatccaccagatcgtgcacaccggcgagagaccctacggctgcagcaactgcggcaagagcttcagcagaaacgcccacctgatcgagcaccagagagtgcacaccggcgagaagcccttcacctgcagcgagtgcggcaaggccttcagacacaacagcaccctggtgcagcaccacaagatccacaccggcgtgagaccctacgagtgcagcgagtgcggcaagctgttcagcttcaacagcagcctgatgaagcaccagagaatccacaccggcgagagaccctacaagtgcagcgagtgcggcaagttctacagccacaagagcaacctgatcaagcactggagagtgcacaccggcgagagaccctacaagtgcagcgactgcggcaagttcttcacccagtgcagcagcctgatgcagcaccagaaggtgcacaccggcgagaagcccttcaagtgcaacgagtgcggcagattcttcagagagaacagcaccctggtgagacaccagagagtgcacaccggcgccaagccctacgagtgcagagagtgcggcaagttcttcagccagagcagcaccctgatgcagcacagaaaggtgcacatcggcgagaagcccttcaagtgcaacgagtgcggcagactgttcagagagaacagcagcctggtgaagcaccagagagtgcacaccggcgccaagccctacgagtgcagagagtgcggcaagttcttcagacacaacagcagcctgttcaagcacagaagaatccacaccggcgagatgcagtag

SEQ ID NO: 9832 - DNA, 729 bp, synthetic construct
  misc_feature 1..729: note = Description of Artificial Sequence: Synthetic coding sequence
  source 1..729: mol_type = other DNA
atgagcaaccccagaagcctggaggaggagaagtacgacatgagcggcgccagactggccctgatcctgtgcgtgaccaaggccagagagggcagcgaggaggacctggacgccctggagcacatgttcagacagctgagattcgagagcaccatgaagagagaccccaccgccgagcagttccaggaggagctggagaagttccagcaggccatcgacagcagagaggaccccgtgagctgcgccttcgtggtgctgatggcccacggcagagagggcttcctgaagggcgaggacggcgagatggtgaagctggagaacctgttcgaggccctgaacaacaagaactgccaggccctgagagccaagcccaaggtgtacatcatccaggcctgcagaggcgagcagagagaccccggcgagaccgtgggcggcgacgagatcgtgatggtgatcaaggacagcccccagaccatccccacctacaccgacgccctgcacgtgtacagcaccgtggagggctacatcgcctacagacacgaccagaagggcagctgcttcatccagaccctggtggacgtgttcaccaagagaaagggccacatcctggagctgctgaccgaggtgaccagaagaatggccgaggccgagctggtgcaggagggcaaggccagaaagaccaaccccgagatccagagcaccctgagaaagagactgtacctgcagtag

SEQ ID NO: 9833 - DNA, 1359 bp, synthetic construct
  misc_feature 1..1359: note = Description of Artificial Sequence: Synthetic coding sequence
  source 1..1359: mol_type = other DNA
atggccgcccccagcgccggcagctggagcaccttccagcacaaggagctgatggccgccgacagaggcagaagaatcctgggcgtgtgcggcatgcacccccaccaccaggagaccctgaagaagaacagagtggtgctggccaagcagctgctgctgagcgagctgctggagcacctgctggagaaggacatcatcaccctggagatgagagagctgatccaggccaaggtgggcagcttcagccagaacgtggagctgctgaacctgctgcccaagagaggcccccaggccttcgacgccttctgcgaggccctgagagagaccaagcagggccacctggaggacatgctgctgaccaccctgagcggcctgcagcacgtgctgccccccctgagctgcgactacgacctgagcctgcccttccccgtgtgcgagagctgccccctgtacaagaagctgagactgagcaccgacaccgtggagcacagcctggacaacaaggacggccccgtgtgcctgcaggtgaagccctgcacccccgagttctaccagacccacttccagctggcctacagactgcagagcagacccagaggcctggccctggtgctgagcaacgtgcacttcaccggcgagaaggagctggagttcagaagcggcggcgacgtggaccacagcaccctggtgaccctgttcaagctgctgggctacgacgtgcacgtgctgtgcgaccagaccgcccaggagatgcaggagaagctgcagaacttcgcccagctgcccgcccacagagtgaccgacagctgcatcgtggccctgctgagccacggcgtggagggcgccatctacggcgtggacggcaagctgctgcagctgcaggaggtgttccagctgttcgacaacgccaactgccccagcctgcagaacaagcccaagatgttcttcatccaggcctgcagaggcgacgagaccgacagaggcgtggaccagcaggacggcaagaaccacgccggcagccccggctgcgaggagagcgacgccggcaaggagaagctgcccaagatgagactgcccaccagaagcgacatgatctgcggctacgcctgcctgaagggcaccgccgccatgagaaacaccaagagaggcagctggtacatcgaggccctggcccaggtgttcagcgagagagcctgcgacatgcacgtggccgacatgctggtgaaggtgaacgccctgatcaaggacagagagggctacgcccccggcaccgagttccacagatgcaaggagatgagcgagtactgcagcaccctgtgcagacacctgtacctgttccccggccacccccccacctag

SEQ ID NO: 9834 - DNA, 327 bp, synthetic construct
  misc_feature 1..327: note = Description of Artificial Sequence: Synthetic coding sequence
  source 1..327: mol_type = other DNA
atggccgcccccagcgccggcagctggagcaccttccagcacaaggagctgatggccgccgacagaggcagaagaatcctgggcgtgtgcggcatgcacccccaccaccaggagaccctgaagaagaacagagtggtgctggccaagcagctgctgctgagcgagctgctggagcacctgctggagaaggacatcatcaccctggagatgagagagctgatccaggccaaggtgggcagcttcagccagaacgtggagctgctgaacctgctgcccaagagaggcccccaggccttcgacgccttctgcgaggccctgcacagctag

SEQ ID NO: 9835 - DNA, 942 bp, synthetic construct
  misc_feature 1..942: note = Description of Artificial Sequence: Synthetic coding sequence
  source 1..942: mol_type = other DNA
atgcacccccaccaccaggagaccctgaagaagaacagagtggtgctggccaagcagctgctgctgagcgagctgctggagcacctgctggagaaggacatcatcaccctggagatgagagagctgatccaggccaaggtgggcagcttcagccagaacgtggagctgctgaacctgctgcccaagagaggcccccaggccttcgacgccttctgcgaggccctgagagagaccaagcagggccacctggaggacatgctgctgaccaccctgagcggcctgcagcacgtgctgccccccctgagctgcgactacgacctgagcctgcccttccccgtgtgcgagagctgccccctgtacaagaagctgagactgagcaccgacaccgtggagcacagcctggacaacaaggacggccccgtgtgcctgcaggtgaagccctgcacccccgagttctaccagacccacttccagctggcctacagactgcagagcagacccagaggcctggccctggtgctgagcaacgtgcacttcaccggcgagaaggagctggagttcagaagcggcggcgacgtggaccacagcaccctggtgaccctgttcaagctgctgggctacgacgtgcacgtgctgtgcgaccagaccgcccaggagatgcaggagaagctgcagaacttcgcccagctgcccgcccacagagtgaccgacagctgcatcgtggccctgctgagccacggcgtggagggcgccatctacggcgtggacggcaagctgctgcagctgcaggaggtgttccagctgttcgacaacgccaactgccccagcctgcagaacaagcccaagatgttcttcatccaggcctgcagaggcgccggcgccatcggcagcctgggccacctgctgctgttcaccgccgccaccgccagcctggccctgtag

SEQ ID NO: 9836 - DNA, 993 bp, synthetic construct
  misc_feature 1..993: note = Description of Artificial Sequence: Synthetic coding sequence
  source 1..993: mol_type = other DNA
atgctgaagctgaagaccaagttcggcagctggcagaccctgtgcaagagaagcaacgtgtggcaggacaagtgcttcttcaagcccttcaacatcgaccagatcagccccaacaagaaggcccaccccaacatggaggccggcccccccgagagcggcgagagcaccgacgccctgaagctgtgcccccacgaggagttcctgagactgtgcaaggagagagccgaggagatctaccccatcaaggagagaaacaacagaaccagactggccctgatcatctgcaacaccgagttcgaccacctgccccccagaaacggcgccgacttcgacatcaccggcatgaaggagctgctggagggcctggactacagcgtggacgtggaggagaacctgaccgccagagacatggagagcgccctgagagccttcgccaccagacccgagcacaagagcagcgacagcaccttcctggtgctgatgagccacggcatcctggagggcatctgcggcaccgtgcacgacgagaagaagcccgacgtgctgctgtacgacaccatcttccagatcttcaacaacagaaactgcctgagcctgaaggacaagcccaaggtgatcatcgtgcaggcctgcagaggcgccaacagaggcgagctgtgggtgagagacagccccgccagcctggaggtggccagcagccagagcagcgagaacctggaggaggacgccgtgtacaagacccacgtggagaaggacttcatcgccttctgcagcagcaccccccacaacgtgagctggagagacagcaccatgggcagcatcttcatcacccagctgatcacctgcttccagaagtacagctggtgctgccacctggaggaggtgttcagaaaggtgcagcagagcttcgagacccccagagccaaggcccagatgcccaccatcgagagactgagcatgaccagatacttctacctgttccccggcaactag

SEQ ID NO: 9837 - DNA, 444 bp, synthetic construct
  misc_feature 1..444: note = Description of Artificial Sequence: Synthetic coding sequence
  source 1..444: mol_type = other DNA
atggccgagggcaaccacagaaagaagcccctgaaggtgctggagagcctgggcaaggacttcctgaccggcgtgctggacaacctggtggagcagaacgtgctgaactggaaggaggaggagaagaagaagtactacgacgccaagaccgaggacaaggtgagagtgatggccgacagcatgcaggagaagcagagaatggccggccagatgctgctgcagaccttcttcaacatcgaccagatcagccccaacaagaaggcccaccccaacatggaggccggcccccccgagagcggcgagagcaccgacgccctgaagctgtgcccccacgaggagttcctgagactgtgcaaggagagagccgaggagatctaccccatcaaggagagaaacaacagaaccagactggccctgatcatctgcaacaccgagttcgactag

SEQ ID NO: 9838 - DNA, 1134 bp, synthetic construct
  misc_feature 1..1134: note = Description of Artificial Sequence: Synthetic coding sequence
  source 1..1134: mol_type = other DNA
atggccgagggcaaccacagaaagaagcccctgaaggtgctggagagcctgggcaaggacttcctgaccggcgtgctggacaacctggtggagcagaacgtgctgaactggaaggaggaggagaagaagaagtactacgacgccaagaccgaggacaaggtgagagtgatggccgacagcatgcaggagaagcagagaatggccggccagatgctgctgcagaccttcttcaacatcgaccagatcagccccaacaagaaggcccaccccaacatggaggccggcccccccgagagcggcgagagcaccgacgccctgaagctgtgcccccacgaggagttcctgagactgtgcaaggagagagccgaggagatctaccccatcaaggagagaaacaacagaaccagactggccctgatcatctgcaacaccgagttcgaccacctgccccccagaaacggcgccgacttcgacatcaccggcatgaaggagctgctggagggcctggactacagcgtggacgtggaggagaacctgaccgccagagacatggagagcgccctgagagccttcgccaccagacccgagcacaagagcagcgacagcaccttcctggtgctgatgagccacggcatcctggagggcatctgcggcaccgtgcacgacgagaagaagcccgacgtgctgctgtacgacaccatcttccagatcttcaacaacagaaactgcctgagcctgaaggacaagcccaaggtgatcatcgtgcaggcctgcagaggcgccaacagaggcgagctgtgggtgagagacagccccgccagcctggaggtggccagcagccagagcagcgagaacctggaggaggacgccgtgtacaagacccacgtggagaaggacttcatcgccttctgcagcagcaccccccacaacgtgagctggagagacagcaccatgggcagcatcttcatcacccagctgatcacctgcttccagaagtacagctggtgctgccacctggaggaggtgttcagaaaggtgcagcagagcttcgagacccccagagccaaggcccagatgcccaccatcgagagactgagcatgaccagatacttctacctgttccccggcaactag

SEQ ID NO: 9839 - DNA, 1305 bp, synthetic construct
  misc_feature 1..1305: note = Description of Artificial Sequence: Synthetic coding sequence
  source 1..1305: mol_type = other DNA
atggccgaggacagcggcaagaagaagagaagaaagaacttcgaggccatgttcaagggcatcctgcagagcggcctggacaacttcgtgatcaaccacatgctgaagaacaacgtggccggccagaccagcatccagaccctggtgcccaacaccgaccagaagagcaccagcgtgaagaaggacaaccacaagaagaagaccgtgaagatgctggagtacctgggcaaggacgtgctgcacggcgtgttcaactacctggccaagcacgacgtgctgaccctgaaggaggaggagaagaagaagtactacgacaccaagatcgaggacaaggccctgatcctggtggacagcctgagaaagaacagagtggcccaccagatgttcacccagaccctgctgaacatggaccagaagatcaccagcgtgaagcccctgctgcagatcgaggccggcccccccgagagcgccgagagcaccaacatcctgaagctgtgccccagagaggagttcctgagactgtgcaagaagaaccacgacgagatctaccccatcaagaagagagaggacagaagaagactggccctgatcatctgcaacaccaagttcgaccacctgcccgccagaaacggcgcccactacgacatcgtgggcatgaagagactgctgcagggcctgggctacaccgtggtggacgagaagaacctgaccgccagagacatggagagcgtgctgagagccttcgccgccagacccgagcacaagagcagcgacagcaccttcctggtgctgatgagccacggcatcctggagggcatctgcggcaccgcccacaagaagaagaagcccgacgtgctgctgtacgacaccatcttccagatcttcaacaacagaaactgcctgagcctgaaggacaagcccaaggtgatcatcgtgcaggcctgcagaggcgagaagcacggcgagctgtgggtgagagacagccccgccagcctggccctgatcagcagccagagcagcgagaacctggaggccgacagcgtgtgcaagatccacgaggagaaggacttcatcgccttctgcagcagcaccccccacaacgtgagctggagagacagaaccagaggcagcatcttcatcaccgagctgatcacctgcttccagaagtacagctgctgctgccacctgatggagatcttcagaaaggtgcagaagagcttcgaggtgccccaggccaaggcccagatgcccaccatcgagagagccaccctgaccagagacttctacctgttccccggcaactag

SEQ ID NO: 9840 - DNA, 402 bp, synthetic construct
  misc_feature 1..402: note = Description of Artificial Sequence: Synthetic coding sequence
  source 1..402: mol_type = other DNA
atgctgaagaacaacgtggccggccagaccagcatccagaccctggtgcccaacaccgaccagaagagcaccagcgtgaagaaggacaaccacaagaagaagaccgtgaagatgctggagtacctgggcaaggacgtgctgcacggcgtgttcaactacctggccaagcacgacgtgctgaccctgaaggaggaggagaagaagaagtactacgacaccaagatcgaggacaaggccctgatcctggtggacagcctgagaaagaacagagtggcccaccagatgttcacccagaccctgctgaacatggaccagaagatcaccagcgtgaagcacctgagcaacaagaaggagagaggcccccagacccccggcagccaccacatgcagtacaaggtgtag

SEQ ID NO: 9841 - DNA, 1344 bp, synthetic construct
  misc_feature 1..1344: note = Description of Artificial Sequence: Synthetic coding sequence
  source 1..1344: mol_type = other DNA
atggccgccgtgcccagagtggagggcgtgttcatcttcctgatcgaggacagcggcaagaagaagagaagaaagaacttcgaggccatgttcaagggcatcctgcagagcggcctggacaacttcgtgatcaaccacatgctgaagaacaacgtggccggccagaccagcatccagaccctggtgcccaacaccgaccagaagagcaccagcgtgaagaaggacaaccacaagaagaagaccgtgaagatgctggagtacctgggcaaggacgtgctgcacggcgtgttcaactacctggccaagcacgacgtgctgaccctgaaggaggaggagaagaagaagtactacgacaccaagatcgaggacaaggccctgatcctggtggacagcctgagaaagaacagagtggcccaccagatgttcacccagaccctgctgaacatggaccagaagatcaccagcgtgaagcccctgctgcagatcgaggccggcccccccgagagcgccgagagcaccaacatcctgaagctgtgccccagagaggagttcctgagactgtgcaagaagaaccacgacgagatctaccccatcaagaagagagaggacagaagaagactggccctgatcatctgcaacaccaagttcgaccacctgcccgccagaaacggcgcccactacgacatcgtgggcatgaagagactgctgcagggcctgggctacaccgtggtggacgagaagaacctgaccgccagagacatggagagcgtgctgagagccttcgccgccagacccgagcacaagagcagcgacagcaccttcctggtgctgatgagccacggcatcctggagggcatctgcggcaccgcccacaagaagaagaagcccgacgtgctgctgtacgacaccatcttccagatcttcaacaacagaaactgcctgagcctgaaggacaagcccaaggtgatcatcgtgcaggcctgcagaggcgagaagcacggcgagctgtgggtgagagacagccccgccagcctggccctgatcagcagccagagcagcgagaacctggaggccgacagcgtgtgcaagatccacgaggagaaggacttcatcgccttctgcagcagcaccccccacaacgtgagctggagagacagaaccagaggcagcatcttcatcaccgagctgatcacctgcttccagaagtacagctgctgctgccacctgatggagatcttcagaaaggtgcagaagagcttcgaggtgccccaggccaaggcccagatgcccaccatcgagagagccaccctgaccagagacttctacctgttccccggcaactag

SEQ ID NO: 9842 - DNA, 879 bp, synthetic construct
  misc_feature 1..879: note = Description of Artificial Sequence: Synthetic coding sequence
  source 1..879: mol_type = other DNA
atggccgccctgctgcagatcgaggccggcccccccgagagcgccgagagcaccaacatcctgaagctgtgccccagagaggagttcctgagactgtgcaagaagaaccacgacgagatctaccccatcaagaagagagaggacagaagaagactggccctgatcatctgcaacaccaagttcgaccacctgcccgccagaaacggcgcccactacgacatcgtgggcatgaagagactgctgcagggcctgggctacaccgtggtggacgagaagaacctgaccgccagagacatggagagcgtgctgagagccttcgccgccagacccgagcacaagagcagcgacagcaccttcctggtgctgatgagccacggcatcctggagggcatctgcggcaccgcccacaagaagaagaagcccgacgtgctgctgtacgacaccatcttccagatcttcaacaacagaaactgcctgagcctgaaggacaagcccaaggtgatcatcgtgcaggcctgcagaggcgagaagcacggcgagctgtgggtgagagacagccccgccagcctggccctgatcagcagccagagcagcgagaacctggaggccgacagcgtgtgcaagatccacgaggagaaggacttcatcgccttctgcagcagcaccccccacaacgtgagctggagagacagaaccagaggcagcatcttcatcaccgagctgatcacctgcttccagaagtacagctgctgctgccacctgatggagatcttcagaaaggtgcagaagagcttcgaggtgccccaggccaaggcccagatgcccaccatcgagagagccaccctgaccagagacttctacctgttccccggcaactag

SEQ ID NO: 9843 - DNA, 1131 bp, synthetic construct
  misc_feature 1..1131: note = Description of Artificial Sequence: Synthetic coding sequence
  source 1..1131: mol_type = other DNA
atggccgaggacaaccacaagaagaagaccgtgaagatgctggagtacctgggcaaggacgtgctgcacggcgtgttcaactacctggccaagcacgacgtgctgaccctgaaggaggaggagaagaagaagtactacgacaccaagatcgaggacaaggccctgatcctggtggacagcctgagaaagaacagagtggcccaccagatgttcacccagaccctgctgaacatggaccagaagatcaccagcgtgaagcccctgctgcagatcgaggccggcccccccgagagcgccgagagcaccaacatcctgaagctgtgccccagagaggagttcctgagactgtgcaagaagaaccacgacgagatctaccccatcaagaagagagaggacagaagaagactggccctgatcatctgcaacaccaagttcgaccacctgcccgccagaaacggcgcccactacgacatcgtgggcatgaagagactgctgcagggcctgggctacaccgtggtggacgagaagaacctgaccgccagagacatggagagcgtgctgagagccttcgccgccagacccgagcacaagagcagcgacagcaccttcctggtgctgatgagccacggcatcctggagggcatctgcggcaccgcccacaagaagaagaagcccgacgtgctgctgtacgacaccatcttccagatcttcaacaacagaaactgcctgagcctgaaggacaagcccaaggtgatcatcgtgcaggcctgcagaggcgagaagcacggcgagctgtgggtgagagacagccccgccagcctggccctgatcagcagccagagcagcgagaacctggaggccgacagcgtgtgcaagatccacgaggagaaggacttcatcgccttctgcagcagcaccccccacaacgtgagctggagagacagaaccagaggcagcatcttcatcaccgagctgatcacctgcttccagaagtacagctgctgctgccacctgatggagatcttcagaaaggtgcagaagagcttcgaggtgccccaggccaaggcccagatgcccaccatcgagagagccaccctgaccagagacttctacctgttccccggcaactag

SEQ ID NO: 9844 - DNA, 1344 bp, synthetic construct; identical to SEQ ID NO: 9841
  misc_feature 1..1344: note = Description of Artificial Sequence: Synthetic coding sequence
  source 1..1344: mol_type = other DNA

SEQ ID NO: 9845 - DNA, 879 bp, synthetic construct; identical to SEQ ID NO: 9842
  misc_feature 1..879: note = Description of Artificial Sequence: Synthetic coding sequence
  source 1..879: mol_type = other DNA

SEQ ID NO: 9846 - DNA, 882 bp, synthetic construct
  misc_feature 1..882: note = Description of Artificial Sequence: Synthetic coding sequence
  source 1..882: mol_type = other DNA
atgagcagcgccagcggcctgagaagaggccaccccgccggcggcgaggagaacatgaccgagaccgacgccttctacaagagagagatgttcgaccccgccgagaagtacaagatggaccacagaagaagaggcatcgccctgatcttcaaccacgagagattcttctggcacctgaccctgcccgagagaagaggcacctgcgccgacagagacaacctgaccagaagattcagcgacctgggcttcgaggtgaagtgcttcaacgacctgaaggccgaggagctgctgctgaagatccacgaggtgagcaccgtgagccacgccgacgccgactgcttcgtgtgcgtgttcctgagccacggcgagggcaaccacatctacgcctacgacgccaagatcgagatccagaccctgaccggcctgttcaagggcgacaagtgccacagcctggtgggcaagcccaagatcttcatcatccaggcctgcagaggcaaccagcacgacgtgcccgtgatccccctggacgtggtggacaaccagaccgagaagctggacaccaacatcaccgaggtggacgccgccagcgtgtacaccctgcccgccggcgccgacttcctgatgtgctacagcgtggccgagggctactacagccacagagagaccgtgaacggcagctggtacatccaggacctgtgcgagatgctgggcaagtacggcagcagcctggagttcaccgagctgctgaccctggtgaacagaaaggtgagccagagaagagtggacttctgcaaggaccccagcgccatcggcaagaagcaggtgccctgcttcgccagcatgctgaccaagaagctgcacttcttccccaagagcaactag

SEQ ID NO: 9847 - DNA, 615 bp, synthetic construct
  misc_feature 1..615: note = Description of Artificial Sequence: Synthetic coding sequence
  source 1..615: mol_type = other DNA
atgagcagcgccagcggcctgagaagaggccaccccgccgtgagcaccgtgagccacgccgacgccgactgcttcgtgtgcgtgttcctgagccacggcgagggcaaccacatctacgcctacgacgccaagatcgagatccagaccctgaccggcctgttcaagggcgacaagtgccacagcctggtgggcaagcccaagatcttcatcatccaggcctgcagaggcaaccagcacgacgtgcccgtgatccccctggacgtggtggacaaccagaccgagaagctggacaccaacatcaccgaggtggacgccgccagcgtgtacaccctgcccgccggcgccgacttcctgatgtgctacagcgtggccgagggctactacagccacagagagaccgtgaacggcagctggtacatccaggacctgtgcgagatgctgggcaagtacggcagcagcctggagttcaccgagctgctgaccctggtgaacagaaaggtgagccagagaagagtggacttctgcaaggaccccagcgccatcggcaagaagcaggtgccctgcttcgccagcatgctgaccaagaagctgcacttcttccccaagagcaactag

SEQ ID NO: 9848 - DNA, 912 bp, synthetic construct
  misc_feature 1..912: note = Description of Artificial Sequence: Synthetic coding sequence
  source 1..912: mol_type = other DNA
atggccgacgaccagggctgcatcgaggagcagggcgtggaggacagcgccaacgaggacagcgtggacgccaagcccgacagaagcagcttcgtgcccagcctgttcagcaagaagaagaagaacgtgaccatgagaagcatcaagaccaccagagacagagtgcccacctaccagtacaacatgaacttcgagaagctgggcaagtgcatcatcatcaacaacaagaacttcgacaaggtgaccggcatgggcgtgagaaacggcaccgacaaggacgccgaggccctgttcaagtgcttcagaagcctgggcttcgacgtgatcgtgtacaacgactgcagctgcgccaagatgcaggacctgctgaagaaggccagcgaggaggaccacaccaacgccgcctgcttcgcctgcatcctgctgagccacggcgaggagaacgtgatctacggcaaggacggcgtgacccccatcaaggacctgaccgcccacttcagaggcgacagatgcaagaccctgctggagaagcccaagctgttcttcatccaggcctgcagaggcaccgagctggacgacggcatccaggccgacagcggccccatcaacgacaccgacgccaaccccagatacaagatccccgtggaggccgacttcctgttcgcctacagcaccgtgcccggctactacagctggagaagccccggcagaggcagctggttcgtgcaggccctgtgcagcatcctggaggagcacggcaaggacctggagatcatgcagatcctgaccagagtgaacgacagagtggccagacacttcgagagccagagcgacgacccccacttccacgagaagaagcagatcccctgcgtggtgagcatgctgaccaaggagctgtacttcagccagtag

SEQ ID NO: 9849 - DNA, 912 bp, synthetic construct; identical to SEQ ID NO: 9848
  misc_feature 1..912: note = Description of Artificial Sequence: Synthetic coding sequence
  source 1..912: mol_type = other DNA

SEQ ID NO: 9850 - DNA, 663 bp, synthetic construct
  misc_feature 1..663: note = Description of Artificial Sequence: Synthetic coding sequence
  source 1..663: mol_type = other DNA
atggccgacgaccagggctgcatcgaggagcagggcgtggaggacagcgccaacgaggacagcgtggacgccaagcccgacagaagcagcttcgtgcccagcctgttcagcaagaagaagaagaacgtgaccatgagaagcatcaagaccaccagagacagagtgcccacctaccagtacaacatgaacttcgagaagctgggcaagtgcatcatcatcaacaacaagaacttcgacaaggtgaccggcatgggcgtgagaaacggcaccgacaaggacgccgaggccctgttcaagtgcttcagaagcctgggcttcgacgtgatcgtgtacaacgactgcagcgtgacccaggccggcgtgcagagaagagacctgggcagactgcagccccccccccccagattcaagcagtacagctgcctgagcctgctgagcagctgggactacagacacgccccccccagactggccaacttctgcatcttcagaagagagggcttcagacacgtgggccaggccggcctgaagctgctggccagcagcgacccccccaccagcggcagccagagcgccggcatcaccggcgtgagcctgcacacccagccccagatcatgaaggtgagcctgagacactgcaacaccttcatctgcttcgcctag

SEQ ID NO: 9851 - DNA, 912 bp, synthetic construct; identical to SEQ ID NO: 9848
  misc_feature 1..912: note = Description of Artificial Sequence: Synthetic coding sequence
  source 1..912: mol_type = other DNA

SEQ ID NO: 9852 - DNA, 663 bp, synthetic construct
  misc_feature 1..663: note = Description of Artificial Sequence: Synthetic coding sequence
  source 1..663: mol_type = other DNA
atggccgacgaccagggctgcatcgaggagcagggcgtggaggacagcgccaacgaggacagcgtggacgccaagcccgacagaagcagcttcgtgcccagcctgttcagcaagaagaagaagaacgtgaccatgagaagcatcaagaccaccagagacagagtgcccacctaccagtacaacatgaacttcgagaagctgggcaagtgcatcatcatcaacaacaagaacttcgacaaggtgaccggcatgggcgtgagaaacggcaccgacaaggacgccgaggccctgttcaagtgcttcagaagcctgggcttcgacgtgatcgtgtacaacgactgcagcttcacccaggccggcgtgcagagaagagacctgggcagactgcagccccccccccccagattcaagcagtacagctgcctgagcctgctgagcagctgggactacagacacgccccccccagactggccaacttctgcatcttcagaagagagggcttcagacacgtgggccaggccggcctgaagctgctggccagcagcgacccccccaccagcggcagccagagcgccggcatcaccggcgtgagcctgcacacccagccccagatcatgaaggtgagcctgagacactgcaacaccttcatctgcttcgcctag

SEQ ID NO: 9853 - DNA, 1011 bp, synthetic construct
  misc_feature 1..1011: note = Description of Artificial Sequence: Synthetic coding sequence
  source 1..1011: mol_type = other DNA
atggactgcgtgggctggccccccggcagaaagtggcacctggagaagaacaccagctgcggcggcagcagcggcatctgcgccagctacgtgacccagatggccgacgaccagggctgcatcgaggagcagggcgtggaggacagcgccaacgaggacagcgtggacgccaagcccgacagaagcagcttcgtgcccagcctgttcagcaagaagaagaagaacgtgaccatgagaagcatcaagaccaccagagacagagtgcccacctaccagtacaacatgaacttcgagaagctgggcaagtgcatcatcatcaacaacaagaacttcgacaaggtgaccggcatgggcgtgagaaacggcaccgacaaggacgccgaggccctgttcaagtgcttcagaagcctgggcttcgacgtgatcgtgtacaacgactgcagctgcgccaagatgcaggacctgctgaagaaggccagcgaggaggaccacaccaacgccgcctgcttcgcctgcatcctgctgagccacggcgaggagaacgtgatctacggcaaggacggcgtgacccccatcaaggacctgaccgcccacttcagaggcgacagatgcaagaccctgctggagaagcccaagctgttcttcatccaggcctgcagaggcaccgagctggacgacggcatccaggccgacagcggccccatcaacgacaccgacgccaaccccagatacaagatccccgtggaggccgacttcctgttcgcctacagcaccgtgcccggctactacagctggagaagccccggcagaggcagctggttcgtgcaggccctgtgcagcatcctggaggagcacggcaaggacctggagatcatgcagatcctgaccagagtgaacgacagagtggccagacacttcgagagccagagcgacgacccccacttccacgagaagaagcagatcccctgcgtggtgagcatgctgaccaaggagctgtacttcagccagtag

SEQ ID NO: 9854 - DNA, 762 bp, synthetic construct
  misc_feature 1..762: note = Description of Artificial Sequence: Synthetic coding sequence
  source 1..762: mol_type = other DNA
atggccgacgaccagggctgcatcgaggagcagggcgtggaggacagcgccaacgaggacagcgtggacgccaagcccgacagaagcagcttcgtgcccagcctgttcagcaagaagaagaagaacgtgaccatgagaagcatcaagaccaccagagacagagtgcccacctaccagtacaacatgaacttcgagaagctgggcaagtgcatcatcatcaacaacaagaacttcgacaaggtgaccggcatgggcgtgagaaacggcaccgacaaggacgccgaggccctgttcaagtgcttcagaagcctgggcttcgacgtgatcgtgtacaacgactgcagctgcgccaagatgcaggacctgctgaagaaggccagcgaggaggaccacaccaacgccgcctgcttcgcctgcatcctgctgagccacggcgaggagaacatggagagctgcagcgtgacccaggccggcgtgcagagaagagacctgggcagactgcagccccccccccccagactggccgagggccccagcctgatgatggccagcagacccaccagaggccccagcatgacccagatgctgatcctggacaccagaagccagtggaagctgaccagcagcagccccatccccagattccaggccatcaccagaggcggcgcccaggaggaggcccccggcctgtgcaagcccagcgcccccagctggagaagcaccgagaagacctggaagagctgcagaagcagccccggctag

SEQ ID NO: 9855 - DNA, 669 bp, synthetic construct
  misc_feature 1..669: note = Description of Artificial Sequence: Synthetic coding sequence
  source 1..669: mol_type = other DNA
atggccgacgaccagggctgcatcgaggagcagggcgtggaggacagcgccaacgaggacagcgtggacgccaagcccgacagaagcagcttcgtgcccagcctgttcagcaagaagaagaagaacgtgaccatgagaagcatcaagaccaccagagacagagtgcccacctaccagtacaacatgaacttcgagaagctgggcaagtgcatcatcatcaacaacaagaacttcgacaaggtgaccggcatgggcgtgagaaacggcaccgacaaggacgccgaggccctgttcaagtgcttcagaagcctgggcttcgacgtgatcgtgtacaacgactgcagctgcgccaagatgcaggacctgctgaagaaggccagcgaggaggaccacaccaacgccgcctgcttcgcctgcatcctgctgagccacggcgaggagaacgtgatctacggcaaggacggcgtgacccccatcaaggacctgaccgcccacttcagaggcgacagatgcaagaccctgctggagaagcccaagctgttcttcatccaggcctgcagaggcaccgagctggacgacggcatccaggccgacagcggccccatcaacgacaccgacgccaaccccagatacaagatccccgtggaggccgacttcctgttcgcctag

SEQ ID NO: 9856 - DNA, 795 bp, synthetic construct
  misc_feature 1..795: note = Description of Artificial Sequence: Synthetic coding sequence
  source 1..795: mol_type = other DNA
atggccgacgaccagggctgcatcgaggagcagggcgtggaggacagcgccaacgaggacagcgtggacgccaagcccgacagaagcagcttcgtgcccagcctgttcagcaagaagaagaagaacgtgaccatgagaagcatcaagaccaccagagacagagtgcccacctaccagtacaacatgaacttcgagaagctgggcaagtgcatcatcatcaacaacaagaacttcgacaaggtgaccggcatgggcgtgagaaacggcaccgacaaggacgccgaggccctgttcaagtgcttcagaagcctgggcttcgacgtgatcgtgtacaacgactgcagctgcgccaagatgcaggacctgctgaagaaggccagcgaggaggaccacaccaacgccgcctgcttcgcctgcatcctgttcttcatccaggcctgcagaggcaccgagctggacgacggcatccaggccgacagcggccccatcaacgacaccgacgccaaccccagatacaagatccccgtggaggccgacttcctgttcgcctacagcaccgtgcccggctactacagctggagaagccccggcagaggcagctggttcgtgcaggccctgtgcagcatcctggaggagcacggcaaggacctggagatcatgcagatcctgaccagagtgaacgacagagtggccagacacttcgagagccagagcgacgacccccacttccacgagaagaagcagatcccctgcgtggtgagcatgctgaccaaggagctgtacttcagccagtag

SEQ ID NO: 9857 - DNA, 837 bp, synthetic construct
  misc_feature 1..837: note = Description of Artificial Sequence: Synthetic coding sequence
  source 1..837: mol_type = other DNA
atgcagagaggcctgttcagcgacggcgacaccagcaagaagaagaagaacgtgaccatgagaagcatcaagaccaccagagacagagtgcccacctaccagtacaacatgaacttcgagaagctgggcaagtgcatcatcatcaacaacaagaacttcgacaaggtgaccggcatgggcgtgagaaacggcaccgacaaggacgccgaggccctgttcaagtgcttcagaagcctgggcttcgacgtgatcgtgtacaacgactgcagctgcgccaagatgcaggacctgctgaagaaggccagcgaggaggaccacaccaacgccgcctgcttcgcctgcatcctgctgagccacggcgaggagaacgtgatctacggcaaggacggcgtgacccccatcaaggacctgaccgcccacttcagaggcgacagatgcaagaccctgctggagaagcccaagctgttcttcatccaggcctgcagaggcaccgagctggacgacggcatccaggccgacagcggccccatcaacgacaccgacgccaaccccagatacaagatccccgtggaggccgacttcctgttcgcctacagcaccgtgcccggctactacagctggagaagccccggcagaggcagctggttcgtgcaggccctgtgcagcatcctggaggagcacggcaaggacctggagatcatgcagatcctgaccagagtgaacgacagagtggccagacacttcgagagccagagcgacgacccccacttccacgagaagaagcagatcccctgcgtggtgagcatgctgaccaaggagctgtacttcagccagtag

SEQ ID NO: 9858 - DNA, 1188 bp, synthetic construct
  misc_feature 1..1188: note = Description of Artificial Sequence: Synthetic coding sequence
  source 1..1188: mol_type = other DNA
atggacttcagcagaaacctgtacgacatcggcgagcagctggacagcgaggacctggccagcctgaagttcctgagcctggactacatcccccagagaaagcaggagcccatcaaggacgccctgatgctgttccagagactgcaggagaagagaatgctggaggagagcaacctgagcttcctgaaggagctgctgttcagaatcaacagactggacctgctgatcacctacctgaacaccagaaaggaggagatggagagagagctgcagacccccggcagagcccagatcagcgcctacagagtgatgctgtaccagatcagcgaggaggtgagcagaagcgagctgagaagcttcaagttcctgctgcaggaggagatcagcaagtgcaagctggacgacgacatgaacctgctggacatcttcatcgagatggagaagagagtgatcctgggcgagggcaagctggacatcctgaagagagtgtgcgcccagatcaacaagagcctgctgaagatcatcaacgactacgaggagttcagcaagggcgccctgaccaccaccttcgaggagctgcacttcgagatcaagccccacgacgactgcaccgtggagcagatctacgagatcctgaagatctaccagctgatggaccacagcaacatggactgcttcatctgctgcatcctgagccacggcgacaagggcatcatctacggcaccgacggccaggaggcccccatctacgagctgaccagccagttcaccggcctgaagtgccccagcctggccggcaagcccaaggtgttcttcatccaggcctgccagggcgacaactaccagaagggcatccccgtggagaccgacagcgaggagcagccctacctggagatggacctgagcagcccccagaccagatacatccccgacgaggccgacttcctgctgggcatggccaccgtgaacaactgcgtgagctacagaaaccccgccgagggcacctggtacatccagagcctgtgccagagcctgagagagagatgccccagaggcgacgacatcctgaccatcctgaccgaggtgaactacgaggtgagcaacaaggacgacaagaagaacatgggcaagcagatgccccagcccaccttcaccctgagaaagaagctggtgttccccagcgactag

SEQ ID NO: 9859 - DNA, 1491 bp, synthetic construct
  misc_feature 1..1491: note = Description of Artificial Sequence: Synthetic coding sequence
  source 1..1491: mol_type = other DNA
atggacttcagcagaaacctgtacgacatcggcgagcagctggacagcgaggacctggccagcctgaagttcctgagcctggactacatcccccagagaaagcaggagcccatcaaggacgccctgatgctgttccagagactgcaggagaagagaatgctggaggagagcaacctgagcttcctgaaggagctgctgttcagaatcaacagactggacctgctgatcacctacctgaacaccagaaaggaggagatggagagagagctgcagacccccggcagagcccagatcagcgcctacagattccacttctgcagaatgagctgggccgaggccaacagccagtgccagacccagagcgtgcccttctggagaagagtggaccacctgctgatcagagtgatgctgtaccagatcagcgaggaggtgagcagaagcgagctgagaagcttcaagttcctgctgcaggaggagatcagcaagtgcaagctggacgacgacatgaacctgctggacatcttcatcgagatggagaagagagtgatcctgggcgagggcaagctggacatcctgaagagagtgtgcgcccagatcaacaagagcctgctgaagatcatcaacgactacgaggagttcagcaagggcgaggagctgtgcggcgtgatgaccatcagcgacagccccagagagcaggacagcgagagccagaccctggacaaggtgtaccagatgaagagcaagcccagaggctactgcctgatcatcaacaaccacaacttcgccaaggccagagagaaggtgcccaagctgcacagcatcagagacagaaacggcacccacctggacgccggcgccctgaccaccaccttcgaggagctgcacttcgagatcaagccccacgacgactgcaccgtggagcagatctacgagatcctgaagatctaccagctgatggaccacagcaacatggactgcttcatctgctgcatcctgagccacggcgacaagggcatcatctacggcaccgacggccaggaggcccccatctacgagctgaccagccagttcaccggcctgaagtgccccagcctggccggcaagcccaaggtgttcttcatccaggcctgccagggcgacaactaccagaagggcatccccgtggagaccgacagcgaggagcagccctacctggagatggacctgagcagcccccagaccagatacatccccgacgaggccgacttcctgctgggcatggccaccgtgaacaactgcgtgagctacagaaaccccgccgagggcacctggtacatccagagcctgtgccagagcctgagagagagatgccccagaggcgacgacatcctgaccatcctgaccgaggtgaactacgaggtgagcaacaaggacgacaagaagaacatgggcaagcagatgccccagcccaccttcaccctgagaaagaagctggtgttccccagcgactag

SEQ ID NO: 9860 - DNA, 1395 bp, synthetic construct
  misc_feature 1..1395: note = Description of Artificial Sequence: Synthetic coding sequence
  source 1..1395: mol_type = other DNA
atggacttcagcagaaacctgtacgacatcggcgagcagctggacagcgaggacctggccagcctgaagttcctgagcctggactacatcccccagagaaagcaggagcccatcaaggacgccctgatgctgttccagagactgcaggagaagagaatgctggaggagagcaacctgagcttcctgaaggagctgctgttcagaatcaacagactggacctgctgatcacctacctgaacaccagaaaggaggagatggagagagagctgcagacccccggcagagcccagatcagcgcctacagagtgatgctgtaccagatcagcgaggaggtgagcagaagcgagctgagaagcttcaagttcctgctgcaggaggagatcagcaagtgcaagctggacgacgacatgaacctgctggacatcttcatcgagatggagaagagagtgatcctgggcgagggcaagctggacatcctgaagagagtgtgcgcccagatcaacaagagcctgctgaagatcatcaacgactacgaggagttcagcaagggcgaggagctgtgcggcgtgatgaccatcagcgacagccccagagagcaggacagcgagagccagaccctggacaaggtgtaccagatgaagagcaagcccagaggctactgcctgatcatcaacaaccacaacttcgccaaggccagagagaaggtgcccaagctgcacagcatcagagacagaaacggcacccacctggacgccggcgccctgaccaccaccttcgaggagctgcacttcgagatcaagccccacgacgactgcaccgtggagcagatctacgagatcctgaagatctaccagctgatggaccacagcaacatggactgcttcatctgctgcatcctgagccacggcgacaagggcatcatctacggcaccgacggccaggaggcccccatctacgagctgaccagccagttcaccggcctgaagtgccccagcctggccggcaagcccaaggtgttcttcatccaggcctgccagggcgacaactaccagaagggcatccccgtggagaccgacagcgaggagcagccctacctggagatggacctgagcagcccccagaccagatacatccccgacgaggccgacttcctgctgggcatggccaccgtgaacaactgcgtgagctacagaaaccccgccgagggcacctggtacatccagagcctgtgccagagcctgagagagagatgccccagaggcgacgacatcctgaccatcctgaccgaggtgaactacgaggtgagcaacaaggacgacaagaagaacatgggcaagcagatgccccagcccaccttcaccctgagaaagaagctggtgttccccagcgactag

SEQ ID NO: 9861 - DNA, 1617 bp, synthetic construct
  misc_feature 1..1617: note = Description of Artificial Sequence: Synthetic coding sequence
  source 1..1617: mol_type = other DNA
atggagggcggcagaagagccagagtggtgatcgagagcaagagaaacttcttcctgggcgccttccccacccccttccccgccgagcacgtggagctgggcagactgggcgacagcgagaccgccatggtgcccggcaagggcggcgccgactacatcctgctgcccttcaagaagatggacttcagcagaaacctgtacgacatcggcgagcagctggacagcgaggacctggccagcctgaagttcctgagcctggactacatcccccagagaaagcaggagcccatcaaggacgccctgatgctgttccagagactgcaggagaagagaatgctggaggagagcaacctgagcttcctgaaggagctgctgttcagaatcaacagactggacctgctgatcacctacctgaacaccagaaaggaggagatggagagagagctgcagacccccggcagagcccagatcagcgcctacagagtgatgctgtaccagatcagcgaggaggtgagcagaagcgagctgagaagcttcaagttcctgctgcaggaggagatcagcaagtgcaagctggacgacgacatgaacctgctggacatcttcatcgagatggagaagagagtgatcctgggcgagggcaagctggacatcctgaagagagtgtgcgcccagatcaacaagagcctgctgaagatcatcaacgactacgaggagttcagcaaggagagaagcagcagcctggagggcagccccgacgagttcagcaacggcgaggagctgtgcggcgtgatgaccatcagcgacagccccagagagcaggacagcgagagccagaccctggacaaggtgtaccagatgaagagcaagcccagaggctactgcctgatcatcaacaaccacaacttcgccaaggccagagagaaggtgcccaagctgcacagcatcagagacagaaacggcacccacctggacgccggcgccctgaccaccaccttcgaggagctgcacttcgagatcaagccccacgacgactgcaccgtggagcagatctacgagatcctgaagatctaccagctgatggaccacagcaacatggactgcttcatctgctgcatcctgagccacggcgacaagggcatcatctacggcaccgacggccaggaggcccccatctacgagctgaccagccagttcaccggcctgaagtgccccagcctggccggcaagcccaaggtgttcttcatccaggcctgccagggcgacaactaccagaagggcatccccgtggagaccgacagcgaggagcagccctacctggagatggacctgagcagcccccagaccagatacatccccgacgaggccgacttcctgctgggcatggccaccgtgaacaactgcgtgagctacagaaaccccgccgagggcacctggtacatccagagcctgtgccagagcctgagagagagatgccccagaggcgacgacatcctgaccatcctgaccgaggtgaactacgaggtgagcaacaaggacgacaagaagaacatgggcaagcagatgccccagcccaccttcaccctgagaaagaagctggtgttccccagcgactag

SEQ ID NO: 9862 - DNA, 708 bp, synthetic construct
  misc_feature 1..708: note = Description of Artificial Sequence: Synthetic coding sequence
  source 1..708: mol_type = other DNA
atggacttcagcagaaacctgtacgacatcggcgagcagctggacagcgaggacctggccagcctgaagttcctgagcctggactacatcccccagagaaagcaggagcccatcaaggacgccctgatgctgttccagagactgcaggagaagagaatgctggaggagagcaacctgagcttcctgaaggagctgctgttcagaatcaacagactggacctgctgatcacctacctgaacaccagaaaggaggagatggagagagagctgcagacccccggcagagcccagatcagcgcctacagagtgatgctgtaccagatcagcgaggaggtgagcagaagcgagctgagaagcttcaagttcctgctgcaggaggagatcagcaagtgcaagctggacgacgacatgaacctgctggacatcttcatcgagatggagaagagagtgatcctgggcgagggcaagctggacatcctgaagagagtgtgcgcccagatcaacaagagcctgctgaagatcatcaacgactacgaggagttcagcaaggagagaagcagcagcctggagggcagccccgacgagttcagcaacgacttcggccagagcctgcccaacgagaagcagaccagcggcatcctgagcgaccaccagcagagccagttctgcaagagcaccggcgagagcgcccagaccagccagcactag

SEQ ID NO: 9863 - DNA, 708 bp, synthetic construct; identical to SEQ ID NO: 9862
  misc_feature 1..708: note = Description of Artificial Sequence: Synthetic coding sequence
  source 1..708: mol_type = other DNA

SEQ ID NO: 9864 - DNA, 837 bp, synthetic construct
  misc_feature 1..837: note = Description of Artificial Sequence: Synthetic coding sequence
  source 1..837: mol_type = other DNA
atggacttcagcagaaacctgtacgacatcggcgagcagctggacagcgaggacctggccagcctgaagttcctgagcctggactacatcccccagagaaagcaggagcccatcaaggacgccctgatgctgttccagagactgcaggagaagagaatgctggaggagagcaacctgagcttcctgaaggagctgctgttcagaatcaacagactggacctgctgatcacctacctgaacaccagaaaggaggagatggagagagagctgcagacccccggcagagcccagatcagcgcctacagagtgatgctgtaccagatcagcgaggaggtgagcagaagcgagctgagaagcttcaagttcctgctgcaggaggagatcagcaagtgcaagctggacgacgacatgaacctgctggacatcttcatcgagatggagaagagagtgatcctgggcgagggcaagctggacatcctgaagagagtgtgcgcccagatcaacaagagcctgctgaagatcatcaacgactacgaggagttcagcaagggcgaggagctgtgcggcgtgatgaccatcagcgacagccccagagagcaggacagcgagagccagaccctggacaaggtgtaccagatgaagagcaagcccagaggctactgcctgatcatcaacaaccacaacttcgccaaggccagagagaaggtgcccaagctgcacagcatcagagacagaaacggcacccacctggacgccggcagccacagcgtggcccaggccggcgtgcagtggtgcgacctgagcagcctgcagcccccccccccctggttcaagtag

SEQ ID NO: 9865 - DNA, 1395 bp, synthetic construct; identical to SEQ ID NO: 9860
  misc_feature 1..1395: note = Description of Artificial Sequence: Synthetic coding sequence
  source 1..1395: mol_type = other DNA

SEQ ID NO: 9866 - DNA, 663 bp, synthetic construct
  misc_feature 1..663: note = Description of Artificial Sequence: Synthetic coding sequence
  source 1..663: mol_type = other DNA
atggacttcagcagaaacctgtacgacatcggcgagcagctggacagcgaggacctggccagcctgaagttcctgagcctggactacatcccccagagaaagcaggagcccatcaaggacgccctgatgctgttccagagactgcaggagaagagaatgctggaggagagcaacctgagcttcctgaaggagctgctgttcagaatcaacagactggacctgctgatcacctacctgaacaccagaaaggaggagatggagagagagctgcagacccccggcagagcccagatcagcgcctacagagtgatgctgtaccagatcagcgaggaggtgagcagaagcgagctgagaagcttcaagttcctgctgcaggaggagatcagcaagtgcaagctggacgacgacatgaacctgctggacatcttcatcgagatggagaagagagtgatcctgggcgagggcaagctggacatcctgaagagagtgtgcgcccagatcaacaagagcctgctgaagatcatcaacgactacgaggagttcagcaaggacttcggccagagcctgcccaacgagaagcagaccagcggcatcctgagcgaccaccagcagagccagttctgcaagagcaccggcgagagcgcccagaccagccagcactag

SEQ ID NO: 9867 - DNA, 597 bp, synthetic construct
  misc_feature 1..597: note = Description of Artificial Sequence: Synthetic coding sequence
  source 1..597: mol_type = other DNA
atggacttcagcagaaacctgtacgacatcggcgagcagctggacagcgaggacctggccagcctgaagttcctgagcctggactacatcccccagagaaagcaggagcccatcaaggacgccctgatgctgttccagagactgcaggagaagagaatgctggaggagagcaacctgagcttcctgaaggagctgctgttcagaatcaacagactggacctgctgatcacctacctgaacaccagaaaggaggagatggagagagagctgcagacccccggcagagcccagatcagcgcctacagagtgatgctgtaccagatcagcgaggaggtgagcagaagcgagctgagaagcttcaagttcctgctgcaggaggagatcagcaagtgcaagctggacgacgacatgaacctgctggacatcttcatcgagatggagaagagagtgatcctgggcgagggcaagctggacatcctgaagagagtgtgcgcccagatcaacaagagcctgctgaagatcatcaacgactacgaggagttcagcaaggagagaagcagcagcctggagggcagccccgacgagttcagcaactag

SEQ ID NO: 9868 - DNA, 351 bp, synthetic construct
  misc_feature 1..351: note = Description of Artificial Sequence: Synthetic coding sequence
  source 1..351: mol_type = other DNA
atggacttcagcagaaacctgtacgacatcggcgagcagctggacagcgaggacctggccagcctgaagttcctgagcctggactacatcccccagagaaagcaggagcccatcaaggacgccctgatgctgttccagagactgcaggagaagagaatgctggaggagagcaacctgagcttcctgaaggagctgctgttcagaatcaacagactggacctgctgatcacctacctgaacaccagaaaggaggagatggagagagagctgcagacccccggcagagcccagatcagcgcctacagagtgatgctgtaccagatcagcgaggaggtgagcagaagcgagtag

SEQ ID NO: 9869 - DNA, 1440 bp, synthetic construct
  misc_feature 1..1440: note = Description of Artificial Sequence: Synthetic coding sequence
  source 1..1440: mol_type = other DNA
atggacttcagcagaaacctgtacgacatcggcgagcagctggacagcgaggacctggccagcctgaagttcctgagcctggactacatcccccagagaaagcaggagcccatcaaggacgccctgatgctgttccagagactgcaggagaagagaatgctggaggagagcaacctgagcttcctgaaggagctgctgttcagaatcaacagactggacctgctgatcacctacctgaacaccagaaaggaggagatggagagagagctgcagacccccggcagagcccagatcagcgcctacagagtgatgctgtaccagatcagcgaggaggtgagcagaagcgagctgagaagcttcaagttcctgctgcaggaggagatcagcaagtgcaagctggacgacgacatgaacctgctggacatcttcatcgagatggagaagagagtgatcctgggcgagggcaagctggacatcctgaagagagtgtgcgcccagatcaacaagagcctgctgaagatcatcaacgactacgaggagttcagcaaggagagaagcagcagcctggagggcagccccgacgagttcagcaacggcgaggagctgtgcggcgtgatgaccatcagcgacagccccagagagcaggacagcgagagccagaccctggacaaggtgtaccagatgaagagcaagcccagaggctactgcctgatcatcaacaaccacaacttcgccaaggccagagagaaggtgcccaagctgcacagcatcagagacagaaacggcacccacctggacgccggcgccctgaccaccaccttcgaggagctgcacttcgagatcaagccccacgacgactgcaccgtggagcagatctacgagatcctgaagatctaccagctgatggaccacagcaacatggactgcttcatctgctgcatcctgagccacggcgacaagggcatcatctacggcaccgacggccaggaggcccccatctacgagctgaccagccagttcaccggcctgaagtgccccagcctggccggcaagcccaaggtgttcttcatccaggcctgccagggcgacaactaccagaagggcatccccgtggagaccgacagcgaggagcagccctacctggagatggacctgagcagcccccagaccagatacatccccgacgaggccgacttcctgctgggcatggccaccgtgaacaactgcgtgagctacagaaaccccgccgagggcacctggtacatccagagcctgtgccagagcctgagagagagatgccccagaggcgacgacatcctgaccatcctgaccgaggtgaactacgaggtgagcaacaaggacgacaagaagaacatgggcaagcagatgccccagcccaccttcaccctgagaaagaagctggtgttccccagcgactag

SEQ ID NO: 9870 - DNA, 375 bp, synthetic construct
  misc_feature 1..375: note = Description of Artificial Sequence: Synthetic coding sequence
  source 1..375: mol_type = other DNA
atggacttcagcagaaacctgtacgacatcggcgagcagctggacagcgaggacctggccagcctgaagttcctgagcctggactacatcccccagagaaagcaggagcccatcaaggacgccctgatgctgttccagagactgcaggagaagagaatgctggaggagagcaacctgagcttcctgaaggagctgctgttcagaatcaacagactggacctgctgatcacctacctgaacaccagaaaggaggagatggagagagagctgcagacccccggcagagcccagatcagcgcctacagagtgatgctgtaccagatcagcgaggaggtgagcagaagcgagctgagaagcttcaagttcctgctgtag

SEQ ID NO: 9871 - DNA, 630 bp, synthetic construct
  misc_feature 1..630: note = Description of Artificial Sequence: Synthetic coding sequence
  source 1..630: mol_type = other DNA
atggacttcagcagaaacctgtacgacatcggcgagcagctggacagcgaggacctggccagcctgaagttcctgagcctggactacatcccccagagaaagcaggagcccatcaaggacgccctgatgctgttccagagactgcaggagaagagaatgctggaggagagcaacctgagcttcctgaaggagctgctgttcagaatcaacagactggacctgctgatcacctacctgaacaccagaaaggaggagatggagagagagctgcagacccccggcagagcccagatcagcgcctacagagtgatgctgtaccagatcagcgaggaggtgagcagaagcgagctgagaagcttcaagttcctgctgcaggaggagatcagcaagtgcaagctggacgacgacatgaacctgctggacatcttcatcgagatggagaagagagtgatcctgggcgagggcaagctggacatcctgaagagagtgtgcgcccagatcaacaagagcctgctgaagatcatcaacgactacgaggagttcagcaaggacttcggccagagcctgcccaacgagaagcagaccagcggcatcctgagcgaccaccagcagagccagttctgcaagtag

SEQ ID NO: 9872 - DNA, 1251 bp, synthetic construct
  misc_feature 1..1251: note = Description of Artificial Sequence: Synthetic coding sequence
  source 1..1251: mol_type = other DNA
atggacgaggccgacagaagactgctgagaagatgcagactgagactggtggaggagctgcaggtggaccagctgtgggacgccctgctgagcagagagctgttcagaccccacatgatcgaggacatccagagagccggcagcggcagcagaagagaccaggccagacagctgatcatcgacctggagaccagaggcagccaggccctgcccctgttcatcagctgcctggaggacaccggccaggacatgctggccagcttcctgagaaccaacagacaggccgccaagctgagcaagcccaccctggagaacctgacccccgtggtgctgagacccgagatcagaaagcccgaggtgctgagacccgagacccccagacccgtggacatcggcagcggcggcttcggcgacgtgggcgccctggagagcctgagaggcaacgccgacctggcctacatcctgagcatggagccctgcggccactgcctgatcatcaacaacgtgaacttctgcagagagagcggcctgagaaccagaaccggcagcaacatcgactgcgagaagctgagaagaagattcagcagcctgcacttcatggtggaggtgaagggcgacctgaccgccaagaagatggtgctggccctgctggagctggcccagcaggaccacggcgccctggactgctgcgtggtggtgatcctgagccacggctgccaggccagccacctgcagttccccggcgccgtgtacggcaccgacggctgccccgtgagcgtggagaagatcgtgaacatcttcaacggcaccagctgccccagcctgggcggcaagcccaagctgttcttcatccaggcctgcggcggcgagcagaaggaccacggcttcgaggtggccagcaccagccccgaggacgagagccccggcagcaaccccgagcccgacgccacccccttccaggagggcctgagaaccttcgaccagctggacgccatcagcagcctgcccacccccagcgacatcttcgtgagctacagcaccttccccggcttcgtgagctggagagaccccaagagcggcagctggtacgtggagaccctggacgacatcttcgagcagtgggcccacagcgaggacctgcagagcctgctgctgagagtggccaacgccgtgagcgtgaagggcatctacaagcagatgcccggctgcttcaacttcctgagaaagaagctgttcttcaagaccagctag

SEQ ID NO: 9873 - DNA, 801 bp, synthetic construct
  misc_feature 1..801: note = Description of Artificial Sequence: Synthetic coding sequence
  source 1..801: mol_type = other DNA
atggacgaggccgacagaagactgctgagaagatgcagactgagactggtggaggagctgcaggtggaccagctgtgggacgccctgctgagcagagagctgttcagaccccacatgatcgaggacatccagagagccggcagcggcagcagaagagaccaggccagacagctgatcatcgacctggagaccagaggcagccaggccctgcccctgttcatcagctgcctggaggacaccggccaggacatgctggccagcttcctgagaaccaacagacaggccgccaagctgagcaagcccaccctggagaacctgacccccgtggtgctgagacccgagatcagaaagcccgaggtgctgagacccgagacccccagacccgtggacatcggcagcggcggcttcggcgacgtggagcagaaggaccacggcttcgaggtggccagcaccagccccgaggacgagagccccggcagcaaccccgagcccgacgccacccccttccaggagggcctgagaaccttcgaccagctggacgccatcagcagcctgcccacccccagcgacatcttcgtgagctacagcaccttccccggcttcgtgagctggagagaccccaagagcggcagctggtacgtggagaccctggacgacatcttcgagcagtgggcccacagcgaggacctgcagagcctgctgctgagagtggccaacgccgtgagcgtgaagggcatctacaagcagatgcccggctgcttcaacttcctgagaaagaagctgttcttcaagaccagctag

SEQ ID NO: 9874 - DNA, 603 bp, synthetic construct
  misc_feature 1..603: note = Description of Artificial Sequence: Synthetic coding sequence
  source 1..603: mol_type = other DNA
atggagccctgcggccactgcctgatcatcaacaacgtgaacttctgcagagagagcggcctgagaaccagaaccggcagcaacatcgactgcgagaagctgagaagaagattcagcagcctgcacttcatggtggaggtgaagggcgacctgaccgccaagaagatggtgctggccctgctggagctggcccagcaggaccacggcgccctggactgctgcgtggtggtgatcctgagccacggctgccaggccagccacctgcagttccccggcgccgtgtacggcaccgacggctgccccgtgagcgtggagaagatcgtgaacatcttcaacggcaccagctgccccagcctgggcggcaagcccaagctgttcttcatccaggcctgcggcggcggcttcgtgagctggagagaccccaagagcggcagctggtacgtggagaccctggacgacatcttcgagcagtgggcccacagcgaggacctgcagagcctgctgctgagagtggccaacgccgtgagcgtgaagggcatctacaagcagatgcccggctgcttcaacttcctgagaaagaagctgttcttcaagaccagctag

SEQ ID NO: 9875 - DNA, 1002 bp, synthetic construct
  misc_feature 1..1002: note = Description of Artificial Sequence: Synthetic coding sequence
  source 1..1002: mol_type = other DNA
atgctggccagcttcctgagaaccaacagacaggccgccaagctgagcaagcccaccctggagaacctgacccccgtggtgctgagacccgagatcagaaagcccgaggtgctgagacccgagacccccagacccgtggacatcggcagcggcggcttcggcgacgtgggcgccctggagagcctgagaggcaacgccgacctggcctacatcctgagcatggagccctgcggccactgcctgatcatcaacaacgtgaacttctgcagagagagcggcctgagaaccagaaccggcagcaacatcgactgcgagaagctgagaagaagattcagcagcctgcacttcatggtggaggtgaagggcgacctgaccgccaagaagatggtgctggccctgctggagctggcccagcaggaccacggcgccctggactgctgcgtggtggtgatcctgagccacggctgccaggccagccacctgcagttccccggcgccgtgtacggcaccgacggctgccccgtgagcgtggagaagatcgtgaacatcttcaacggcaccagctgccccagcctgggcggcaagcccaagctgttcttcatccaggcctgcggcggcgagcagaaggaccacggcttcgaggtggccagcaccagccccgaggacgagagccccggcagcaaccccgagcccgacgccacccccttccaggagggcctgagaaccttcgaccagctggacgccatcagcagcctgcccacccccagcgacatcttcgtgagctacagcaccttccccggcttcgtgagctggagagaccccaagagcggcagctggtacgtggagaccctggacgacatcttcgagcagtgggcccacagcgaggacctgcagagcctgctgctgagagtggccaacgccgtgagcgtgaagggcatctacaagcagatgcccggctgcttcaacttcctgagaaagaagctgttcttcaagaccagctag

SEQ ID NO: 9876 - DNA, 765 bp, synthetic construct
  misc_feature 1..765: note = Description of Artificial Sequence: Synthetic coding sequence
  source 1..765: mol_type = other DNA
atggacgaggccgacagaagactgctgagaagatgcagactgagactggtggaggagctgcaggtggaccagctgtgggacgccctgctgagcagagagctgttcagaccccacatgatcgaggacatccagagagccggcagcggcagcagaagagaccaggccagacagctgatcatcgacctggagaccagaggcagccaggccctgcccctgttcatcagctgcctggaggacaccggccaggacatgctggccagcttcctgagaaccaacagacaggccgccaagctgagcaagcccaccctggagaacctgacccccgtggtgctgagacccgagatcagaaagcccgaggtgctgagacccgagacccccagacccgtggacatcggcagcggcggcttcggcgacgtgggcgccctggagagcctgagaggcaacgccgacctggcctacatcctgagcatggagccctgcggccactgcctgatcatcaacaacgtgaacttctgcagagagagcggcctgagaaccagaaccggcagcaacatcgactgcgagaagctgagaagaagattcagcagcctgcacttcatggtggaggtgaagggcgacctgaccgccaaggccagccacctgcagttccccggcgccgtgtacggcaccgacggctgccccgtgagcgtggagaagatcgtgaacatcttcaacggcaccagctgccccagcctgggcggcaagcccaagctgttcttcatctag

SEQ ID NO: 9877 - DNA, 801 bp, synthetic construct
  misc_feature 1..801: note = Description of Artificial Sequence: Synthetic coding sequence
  source 1..801: mol_type = other DNA
atgctggccagcttcctgagaaccaacagacaggccgccaagctgagcaagcccaccctggagaacctgacccccgtggtgctgagacccgagatcagaaagcccgaggtgctgagacccgagacccccagacccgtggacatcggcagcggcggcttcggcgacgtgggcgccctggagagcctgagaggcaacgccgacctggcctacatcctgagcatggagccctgcggccactgcctgatcatcaacaacgtgaacttctgcagagagagcggcctgagaaccagaaccggcagcaacatcgactgcgagaagctgagaagaagattcagcagcctgcacttcatggtggaggtgaagggcgacctgaccgccaagaagatggtgctggccctgctggagctggcccagcaggaccacggcgccctggactgctgcgtggtggtgatcctgagccacggctgccaggccagccacctgcagttccccggcgccgtgtacggcaccgacggctgccccgtgagcgtggagaagatcgtgaacatcttcaacggcaccagctgccccagcctgggcggcaagcccaagctgttcttcatccaggcctgcggcggcgagcagaaggaccacggcttcgaggtggccagcaccagccccgaggacgagagccccggcagcaaccccgagcccgacgccacccccttccaggagggcctgagaaccttcgaccagctggacgccatcagcagcctgcccacccccagcgacatcttcgtgagctacagcaccttcccctag

SEQ ID NO: 9878 - DNA, 1266 bp, synthetic construct
  misc_feature 1..1266: note = Description of Artificial Sequence: Synthetic coding sequence
  source 1..1266: mol_type = other DNA
atggacgaggccgacagaagactgctgagaagatgcagactgagactggtggaggagctgcaggtggaccagctgtgggacgccctgctgagcagagagctgttcagaccccacatgatcgaggacatccagagagccggcagcggcagcagaagagaccaggccagacagctgatcatcgacctggagaccagaggcagccaggccctgcccctgttcatcagctgcctggaggacaccggccaggacatgctggccagcttcctgagaaccaacagacaggccgccaagctgagcaagcccaccctggagaacctgacccccgtggtgctgagacccgagatcagaaagcccgaggtgctgagacccgagacccccagacccgtggacatcggcagcggcggcttcggcgacgtgggcgccctggagagcctgagaggcaacgccgacctggcctacatcctgagcatggagccctgcggccactgcctgatcatcaacaacgtgaacttctgcagagagagcggcctgagaaccagaaccggcagcaacatcgactgcgagaagctgagaagaagattcagcagcctgcacttcatggtggaggtgaagggcgacctgaccgccaagaagatggtgctggccctgctggagctggcccagcaggaccacggcgccctggactgctgcgtggtggtgatcctgagccacggctgccaggccagccacctgcagttccccggcgccgtgtacggcaccgacggctgccccgtgagcgtggagaagatcgtgaacatcttcaacggcaccagctgccccagcctgggcggcaagcccaagctgttcttcatccaggcctgcggcggcgagcagaaggaccacggcttcgaggtggccagcaccagccccgaggacgagagccccggcagcaaccccgagcccgacgccacccccttccaggagggcctgagaaccttcgaccagctggacgccatcagcagcctgcccacccccagcgacatcttcgtgagctacagcaccttccccggcttcgtgagctggagagaccccaagagcggcagctggtacgtggagaccctggacgacatcttcgagcagtgggcccacagcgaggacctgcagagcctgctgctgagagtgagcgccgccttcctgtgcaagggcgagggcagactgctgagaggcagcgtgagcagctggggctggggcttcggcgtgagcagagccggccccaaccagggctag

SEQ ID NO: 9879 - DNA, 2721 bp, synthetic construct
  misc_feature 1..2721: note = Description of Artificial Sequence: Synthetic coding sequence
  source 1..2721: mol_type = other DNA
atgaccgccgtgcacgccggcaacatcaacttcaagtgggaccccaagagcctggagatcagaaccctggccgtggagagactgctggagcccctggtgacccaggtgaccaccctggtgaacaccaacagcaagggccccagcaacaagaagagaggcagaagcaagaaggcccacgtgctggccgccagcgtggagcaggccaccgagaacttcctggagaagggcgacaagatcgccaaggagagccagttcctgaaggaggagctggtggccgccgtggaggacgtgagaaagcagggcgacctgatgaaggccgccgccggcgagttcgccgacgacccctgcagcagcgtgaagagaggcaacatggtgagagccgccagagccctgctgagcgccgtgaccagactgctgatcctggccgacatggccgacgtgtacaagctgctggtgcagctgaaggtggtggaggacggcatcctgaagctgagaaacgccggcaacgagcaggacctgggcatccagtacaaggccctgaagcccgaggtggacaagctgaacatcatggccgccaagagacagcaggagctgaaggacgtgggccacagagaccagatggccgccgccagaggcatcctgcagaagaacgtgcccatcctgtacaccgccagccaggcctgcctgcagcaccccgacgtggccgcctacaaggccaacagagacctgatctacaagcagctgcagcaggccgtgaccggcatcagcaacgccgcccaggccaccgccagcgacgacgccagccagcaccagggcggcggcggcggcgagctggcctacgccctgaacaacttcgacaagcagatcatcgtggaccccctgagcttcagcgaggagagattcagacccagcctggaggagagactggagagcatcatcagcggcgccgccctgatggccgacagcagctgcaccagagacgacagaagagagagaatcgtggccgagtgcaacgccgtgagacaggccctgcaggacctgctgagcgagtacatgggcaacgccggcagaaaggagagaagcgacgccctgaacagcgccatcgacaagatgaccaagaagaccagagacctgagaagacagctgagaaaggccgtgatggaccacgtgagcgacagcttcctggagaccaacgtgcccctgctggtgctgatcgaggccgccaagaacggcaacgagaaggaggtgaaggagtacgcccaggtgttcagagagcacgccaacaagctgatcgaggtggccaacctggcctgcagcatcagcaacaacgaggagggcgtgaagctggtgagaatgagcgccagccagctggaggccctgtgcccccaggtgatcaacgccgccctggccctggccgccaagccccagagcaagctggcccaggagaacatggacctgttcaaggagcagtgggagaagcaggtgagagtgctgaccgacgccgtggacgacatcaccagcatcgacgacttcctggccgtgagcgagaaccacatcctggaggacgtgaacaagtgcgtgatcgccctgcaggagaaggacgtggacggcctggacagaaccgccggcgccatcagaggcagagccgccagagtgatccacgtggtgaccagcgagatggacaactacgagcccggcgtgtacaccgagaaggtgctggaggccaccaagctgctgagcaacaccgtgatgcccagattcaccgagcaggtggaggccgccgtggaggccctgagcagcgaccccgcccagcccatggacgagaacgagttcatcgacgccagcagactggtgtacgacggcatcagagacatcagaaaggccgtgctgatgatcagaacccccgaggagctggacgacagcgacttcgagaccgaggacttcgacgtgagaagcagaaccagcgtgcagaccgaggacgaccagctgatcgccggccagagcgccagagccatcatggcccagctgccccaggagcagaaggccaagatcgccgagcaggtggccagcttccaggaggagaagagcaagctggacgccgaggtgagcaagtgggacgacagcggcaacgacatcatcgtgctggccaagcagatgtgcatgatcatgatggagatgaccgacttcaccagaggcaagggccccctgaagaacaccagcgacgtgatcagcgccgccaagaagatcgccgaggccggcagcagaatggacaagctgggcagaaccatcgccgaccactgccccgacagcgcctgcaagcaggacctgctggcctacctgcagagaatcgccctgtactgccaccagctgaacatctgcagcaaggtgaaggccgaggtgcagaacctgggcggcgagctggtggtgagcggcgtggacagcgccatgagcctgatccaggccgccaagaacctgatgaacgccgtggtgcagaccgtgaaggccagctacgtggccagcaccaagtaccagaagagccagggcatggccagcctgaacctgcccgccgtgagctggaagatgaaggcccccgagaagaagcccctggtgaagagagagaagcaggacgagacccagaccaagatcaagagagccagccagaagaagcacgtgaaccccgtgcaggccctgagcgagttcaaggccatggacagcatctag

SEQ ID NO: 9880 - DNA, 2412 bp, synthetic construct
  misc_feature 1..2412: note = Description of Artificial Sequence: Synthetic coding sequence
  source 1..2412: mol_type = other DNA
atgaaggccgccgccggcgagttcgccgacgacccctgcagcagcgtgaagagaggcaacatggtgagagccgccagagccctgctgagcgccgtgaccagactgctgatcctggccgacatggccgacgtgtacaagctgctggtgcagctgaaggtggtggaggacggcatcctgaagctgagaaacgccggcaacgagcaggacctgggcatccagtacaaggccctgaagcccgaggtggacaagctgaacatcatggccgccaagagacagcaggagctgaaggacgtgggccacagagaccagatggccgccgccagaggcatcctgcagaagaacgtgcccatcctgtacaccgccagccaggcctgcctgcagcaccccgacgtggccgcctacaaggccaacagagacctgatctacaagcagctgcagcaggccgtgaccggcatcagcaacgccgcccaggccaccgccagcgacgacgccagccagcaccagggcggcggcggcggcgagctggcctacgccctgaacaacttcgacaagcagatcatcgtggaccccctgagcttcagcgaggagagattcagacccagcctggaggagagactggagagcatcatcagcggcgccgccctgatggccgacagcagctgcaccagagacgacagaagagagagaatcgtggccgagtgcaacgccgtgagacaggccctgcaggacctgctgagcgagtacatgggcaacgccggcagaaaggagagaagcgacgccctgaacagcgccatcgacaagatgaccaagaagaccagagacctgagaagacagctgagaaaggccgtgatggaccacgtgagcgacagcttcctggagaccaacgtgcccctgctggtgctgatcgaggccgccaagaacggcaacgagaaggaggtgaaggagtacgcccaggtgttcagagagcacgccaacaagctgatcgaggtggccaacctggcctgcagcatcagcaacaacgaggagggcgtgaagctggtgagaatgagcgccagccagctggaggccctgtgcccccaggtgatcaacgccgccctggccctggccgccaagccccagagcaagctggcccaggagaacatggacctgttcaaggagcagtgggagaagcaggtgagagtgctgaccgacgccgtggacgacatcaccagcatcgacgacttcctggccgtgagcgagaaccacatcctggaggacgtgaacaagtgcgtgatcgccctgcaggagaaggacgtggacggcctggacagaaccgccggcgccatcagaggcagagccgccagagtgatccacgtggtgaccagcgagatggacaactacgagcccggcgtgtacaccgagaaggtgctggaggccaccaagctgctgagcaacaccgtgatgcccagattcaccgagcaggtggaggccgccgtggaggccctgagcagcgaccccgcccagcccatggacgagaacgagttcatcgacgccagcagactggtgtacgacggcatcagagacatcagaaaggccgtgctgatgatcagaacccccgaggagctggacgacagcgacttcgagaccgaggacttcgacgtgagaagcagaaccagcgtgcagaccgaggacgaccagctgatcgccggccagagcgccagagccatcatggcccagctgccccaggagcagaaggccaagatcgccgagcaggtggccagcttccaggaggagaagagcaagctggacgccgaggtgagcaagtgggacgacagcggcaacgacatcatcgtgctggccaagcagatgtgcatgatcatgatggagatgaccgacttcaccagaggcaagggccccctgaagaacaccagcgacgtgatcagcgccgccaagaagatcgccgaggccggcagcagaatggacaagctgggcagaaccatcgccgaccactgccccgacagcgcctgcaagcaggacctgctggcctacctgcagagaatcgccctgtactgccaccagctgaacatctgcagcaaggtgaaggccgaggtgcagaacctgggcggcgagctggtggtgagcggcgtggacagcgccatgagcctgatccaggccgccaagaacctgatgaacgccgtggtgcagaccgtgaaggccagctacgtggccagcaccaagtaccagaagagccagggcatggccagcctgaacctgcccgccgtgagctggaagatgaaggcccccgagaagaagcccctggtgaagagagagaagcaggacgagacccagaccaagatcaagagagccagccagaagaagcacgtgaaccccgtgcaggccctgagcgagttcaaggccatggacagcatctag

SEQ ID NO: 9881 - DNA, 357 bp, synthetic construct
  misc_feature 1..357: note = Description of Artificial Sequence: Synthetic coding sequence
  source 1..357: mol_type = other DNA
atgaccgccgtgcacgccggcaacatcaacttcaagtgggaccccaagagcctggagatcagaaccctggccgtggagagactgctggagcccctggtgacccaggtgaccaccctggtgaacaccaacagcaagggccccagcaacaagaagagaggcagaagcaagaaggcccacgtgctggccgccagcgtggagcaggccaccgagaacttcctggagaagggcgacaagatcgccaaggagagccagttcctgaaggaggagctggtggccgccgtggaggacgtgagaaagcagggcgacctgatgaaggccgccgccggcgagttcgccgacgacccctgcagcagctag

SEQ ID NO: 9882 - DNA, 420 bp, synthetic construct
  misc_feature 1..420: note = Description of Artificial Sequence: Synthetic coding sequence
  source 1..420: mol_type = other DNA
atgaccgccgtgcacgccggcaacatcaacttcaagtgggaccccaagagcctggagatcagaaccctggccgtggagagactgctggagcccctggtgacccaggtgaccaccctggtgaacaccaacagcaagggccccagcaacaagaagagaggcagaagcaagaaggcccacgtgctggccgccagcgtggagcaggccaccgagaacttcctggagaagggcgacaagatcgccaaggagagccagttcctgaaggaggagctggtggccgccgtggaggacgtgagaaagcagggcgacctgatgaaggccgccgccggcgagttcgccgacgacccctgcagcagcgtgaagagaggcaacatggtgagagccgccagagccctgctgagcgccgtgaccagactgctgtag

SEQ ID NO: 9883 - DNA, 648 bp, synthetic construct
  misc_feature 1..648: note = Description of Artificial Sequence: Synthetic coding sequence
  source 1..648: mol_type = other DNA
atgaccgccgtgcacgccggcaacatcaacttcaagtgggaccccaagagcctggagatcagaaccctggccgtggagagactgctggagcccctggtgacccaggtgaccaccctggtgaacaccaacagcaagggccccagcaacaagaagagaggcagaagcaagaaggcccacgtgctggccgccagcgtggagcaggccaccgagaacttcctggagaagggcgacaagatcgccaaggagagccagttcctgaaggaggagctggtggccgccgtggaggacgtgagaaagcagggcgacctgatgaaggccgccgccggcgagttcgccgacgacccctgcagcagcgtgaagagaggcaacatggtgagagccgccagagccctgctgagcgccgtgaccagactgctgatcctggccgacatggccgacgtgtacaagctgctggtgcagctgaaggtggtggaggacggcatcctgaagctgagaaacgccggcaacgagcaggacctgggcatccagtacaaggccctgaagcccgaggtggacaagctgaacatcatggccgccaagagacagcaggagctgaaggacgtgggccacagagaccagatggccgccgccagaggcatcctgcagtag

SEQ ID NO: 9884 - DNA, 306 bp, synthetic construct
  misc_feature 1..306: note = Description of Artificial Sequence: Synthetic coding sequence
  source 1..306: mol_type = other DNA
atgaccgccgtgcacgccggcaacatcaacttcaagtgggaccccaagagcctggagatcagaaccctggccgtggagagactgctggagcccctggtgacccaggtgaccaccctggtgaacaccaacagcaagggccccagcaacaagaagagaggcagaagcaagaaggcccacgtgctggccgccagcgtggagcaggccaccgagaacttcctggagaagggcgacaagatcgccaaggagagccagttcctgaaggaggagctggtggccgccgtggaggacgtgagaaagcagggctag

SEQ ID NO: 9885 - DNA, 372 bp, synthetic construct
  misc_feature 1..372: note = Description of Artificial Sequence: Synthetic coding sequence
  source 1..372: mol_type = other DNA
atgaccgccgtgcacgccggcaacatcaacttcaagtgggaccccaagagcctggagatcagaaccctggccgtggagagactgctggagcccctggtgacccaggtgaccaccctggtgaacaccaacagcaagggccccagcaacaagaagagaggcagaagcaagaaggcccacgtgctggccgccagcgtggagcaggccaccgagaacttcctggagaagggcgacaagatcgccaaggagagccagttcctgaaggaggagctggtggccgccgtggaggacgtgagaaagcagggcgacctgatgaaggccgccgccggcgagttcgccgacgacccctgcagcagcgtgaagagaggcaactag

SEQ ID NO: 9886 - DNA, 471 bp, synthetic construct
  misc_feature 1..471: note = Description of Artificial Sequence: Synthetic coding sequence
  source 1..471: mol_type = other DNA
atgaccgccgtgcacgccggcaacatcaacttcaagtgggaccccaagagcctggagatcagaaccctggccgtggagagactgctggagcccctggtgacccaggtgaccaccctggtgaacaccaacagcaagggccccagcaacaagaagagaggcagaagcaagaaggcccacgtgctggccgccagcgtggagcaggccaccgagaacttcctggagaagggcgacaagatcgccaaggagagccagttcctgaaggaggagctggtggccgccgtggaggacgtgagaaagcagggcgacctgatgaaggccgccgccggcgagttcgccgacgacccctgcagcagcgtgaagagaggcaacatggtgagagccgccagagccctgctgagcgccgtgaccagactgctgatcctggccgacatggccgacgtgtacaagctgctggtgcagctgaaggtgtag

SEQ ID NO: 9887 - DNA, 285 bp, synthetic construct
  misc_feature 1..285: note = Description of Artificial Sequence: Synthetic coding sequence
  source 1..285: mol_type = other DNA
atgaccgccgtgcacgccggcaacatcaacttcaagtgggaccccaagagcctggagatcagaaccctggccgtggagagactgctggagcccctggtgacccaggtgaccaccctggtgaacaccaacagcaagggccccagcaacaagaagagaggcagaagcaagaaggcccacgtgctggccgccagcgtggagcaggccaccgagaacttcctggagaagggcgacaagatcgccaaggagagccagttcctgaaggaggagctggtggccgccgtgtag

SEQ ID NO: 9888 - DNA, 2790 bp, synthetic construct
  misc_feature 1..2790: note = Description of Artificial Sequence: Synthetic coding sequence
  source 1..2790: mol_type = other DNA
atgaccgccgtgcacgccggcaacatcaacttcaagtgggaccccaagagcctggagatcagaaccctggccgtggagagactgctggagcccctggtgacccaggtgaccaccctggtgaacaccaacagcaagggccccagcaacaagaagagaggcagaagcaagaaggcccacgtgctggccgccagcgtggagcaggccaccgagaacttcctggagaagggcgacaagatcgccaaggagagccagttcctgaaggaggagctggtggccgccgtggaggacgtgagaaagcagggcgacctgatgaaggccgccgccggcgagttcgccgacgacccctgcagcagcgtgaagagaggcaacatggtgagagccgccagagccctgctgagcgccgtgaccagactgctgatcctggccgacatggccgacgtgtacaagctgctggtgcagctgaaggtggtggaggacggcatcctgaagctgagaaacgccggcaacgagcaggacctgggcatccagtacaaggccctgaagcccgaggtggacaagctgaacatcatggccgccaagagacagcaggagctgaaggacgtgggccacagagaccagatggccgccgccagaggcatcctgcagaagaacgtgcccatcctgtacaccgccagccaggcctgcctgcagcaccccgacgtggccgcctacaaggccaacagagacctgatctacaagcagctgcagcaggccgtgaccggcatcagcaacgccgcccaggccaccgccagcgacgacgccagccagcaccagggcggcggcggcggcgagctggcctacgccctgaacaacttcgacaagcagatcatcgtggaccccctgagcttcagcgaggagagattcagacccagcctggaggagagactggagagcatcatcagcggcgccgccctgatggccgacagcagctgcaccagagacgacagaagagagagaatcgtggccgagtgcaacgccgtgagacaggccctgcaggacctgctgagcgagtacatgggcaacgccggcagaaaggagagaagcgacgccctgaacagcgccatcgacaagatgaccaagaagaccagagacctgagaagacagctgagaaaggccgtgatggaccacgtgagcgacagcttcctggagaccaacgtgcccctgctggtgctgatcgaggccgccaagaacggcaacgagaaggaggtgaaggagtacgcccaggtgttcagagagcacgccaacaagctgatcgaggtggccaacctggcctgcagcatcagcaacaacgaggagggcgtgaagctggtgagaatgagcgccagccagctggaggccctgtgcccccaggtgatcaacgccgccctggccctggccgccaagccccagagcaagctggcccaggagaacatggacctgttcaaggagcagtgggagaagcaggtgagagtgctgaccgacgccgtggacgacatcaccagcatcgacgacttcctggccgtgagcgagaaccacatcctggaggacgtgaacaagtgcgtgatcgccctgcaggagaaggacgtggacggcctggacagaaccgccggcgccatcagaggcagagccgccagagtgatccacgtggtgaccagcgagatggacaactacgagcccggcgtgtacaccgagaaggtgctggaggccaccaagctgctgagcaacaccgtgatgcccagattcaccgagcaggtggaggccgccgtggaggccctgagcagcgaccccgcccagcccatggacgagaacgagttcatcgacgccagcagactggtgtacgacggcatcagagacatcagaaaggccgtgctgatgatcagaacccccgaggagctggacgacagcgacttcgagaccgaggacttcgacgtgagaagcagaaccagcgtgcagaccgaggacgaccagctgatcgccggccagagcgccagagccatcatggcccagctgccccaggagcagaaggccaagatcgccgagcaggtggccagcttccaggaggagaagagcaagctggacgccgaggtgagcaagtgggacgacagcggcaacgacatcatcgtgctggccaagcagatgtgcatgatcatgatggagatgaccgacttcaccagaggcaagggccccctgaagaacaccagcgacgtgatcagcgccgccaagaagatcgccgaggccggcagcagaatggacaagctgggcagaaccatcgccgaccactgccccgacagcgcctgcaagcaggacctgctggcctacctgcagagaatcgccctgtactgccaccagctgaacatctgcagcaaggtgaaggccgaggtgcagaacctgggcggcgagctggtggtgagcggcaactgcgacacctgcggcgccctgcagggcctgaagggctggcccccccccctgtgcgccacccactgggtggacagcgccatgagcctgatccaggccgccaagaacctgatgaacgccgtggtgcagaccgtgaaggccagctacgtggccagcaccaagtaccagaagagccagggcatggccagcctgaacctgcccgccgtgagctggaagatgaaggcccccgagaagaagcccctggtgaagagagagaagcaggacgagacccagaccaagatcaagagagccagccagaagaagcacgtgaaccccgtgcaggccctgagcgagttcaaggccatggacagcatctag

SEQ ID NO: 9889 - DNA, 1611 bp, synthetic construct
  misc_feature 1..1611: note = Description of Artificial Sequence: Synthetic coding sequence
  source 1..1611: mol_type = other DNA
atgaccaagaagaccagagacctgagaagacagctgagaaaggccgtgatggaccacgtgagcgacagcttcctggagaccaacgtgcccctgctggtgctgatcgaggccgccaagaacggcaacgagaaggaggtgaaggagtacgcccaggtgttcagagagcacgccaacaagctgatcgaggtggccaacctggcctgcagcatcagcaacaacgaggagggcgtgaagctggtgagaatgagcgccagccagctggaggccctgtgcccccaggtgatcaacgccgccctggccctggccgccaagccccagagcaagctggcccaggagaacatggacctgttcaaggagcagtgggagaagcaggtgagagtgctgaccgacgccgtggacgacatcaccagcatcgacgacttcctggccgtgagcgagaaccacatcctggaggacgtgaacaagtgcgtgatcgccctgcaggagaaggacgtggacggcctggacagaaccgccggcgccatcagaggcagagccgccagagtgatccacgtggtgaccagcgagatggacaactacgagcccggcgtgtacaccgagaaggtgctggaggccaccaagctgctgagcaacaccgtgatgcccagattcaccgagcaggtggaggccgccgtggaggccctgagcagcgaccccgcccagcccatggacgagaacgagttcatcgacgccagcagactggtgtacgacggcatcagagacatcagaaaggccgtgctgatgatcagaacccccgaggagctggacgacagcgacttcgagaccgaggacttcgacgtgagaagcagaaccagcgtgcagaccgaggacgaccagctgatcgccggccagagcgccagagccatcatggcccagctgccccaggagcagaaggccaagatcgccgagcaggtggccagcttccaggaggagaagagcaagctggacgccgaggtgagcaagtgggacgacagcggcaacgacatcatcgtgctggccaagcagatgtgcatgatcatgatggagatgaccgacttcaccagaggcaagggccccctgaagaacaccagcgacgtgatcagcgccgccaagaagatcgccgaggccggcagcagaatggacaagctgggcagaaccatcgccgaccactgccccgacagcgcctgcaagcaggacctgctggcctacctgcagagaatcgccctgtactgccaccagctgaacatctgcagcaaggtgaaggccgaggtgcagaacctgggcggcgagctggtggtgagcggcgtggacagcgccatgagcctgatccaggccgccaagaacctgatgaacgccgtggtgcagaccgtgaaggccagctacgtggccagcaccaagtaccagaagagccagggcatggccagcctgaacctgcccgccgtgagctggaagatgaaggcccccgagaagaagcccctggtgaagagagagaagcaggacgagacccagaccaagatcaagagagccagccagaagaagcacgtgaaccccgtgcaggccctgagcgagttcaaggccatggacagcatctag

SEQ ID NO: 9890 - DNA, 2676 bp, synthetic construct
  misc_feature 1..2676: note = Description of Artificial Sequence: Synthetic coding sequence
  source 1..2676: mol_type = other DNA
atgaccgccgtgcacgccggcaacatcaacttcaagtgggaccccaagagcctggagatcagaaccctggccgtggagagactgctggagcccctggtgacccaggtgaccaccctggtgaacaccaacagcaagggccccagcaacaagaagagaggcagaagcaagaaggcccacgtgctggccgccagcgtggagcaggccaccgagaacttcctggagaagggcgacaagatcgccaaggagagccagttcctgaaggaggagctggtggccgccgtggaggacgtgagaaagcagggcgacctgatgaaggccgccgccggcgagttcgccgacgacccctgcagcagcgtgaagagaggcaacatggtgagagccgccagagccctgctgagcgccgtgaccagactgctgaaggtggtggaggacggcatcctgaagctgagaaacgccggcaacgagcaggacctgggcatccagtacaaggccctgaagcccgaggtggacaagctgaacatcatggccgccaagagacagcaggagctgaaggacgtgggccacagagaccagatggccgccgccagaggcatcctgcagaagaacgtgcccatcctgtacaccgccagccaggcctgcctgcagcaccccgacgtggccgcctacaaggccaacagagacctgatctacaagcagctgcagcaggccgtgaccggcatcagcaacgccgcccaggccaccgccagcgacgacgccagccagcaccagggcggcggcggcggcgagctggcctacgccctgaacaacttcgacaagcagatcatcgtggaccccctgagcttcagcgaggagagattcagacccagcctggaggagagactggagagcatcatcagcggcgccgccctgatggccgacagcagctgcaccagagacgacagaagagagagaatcgtggccgagtgcaacgccgtgagacaggccctgcaggacctgctgagcgagtacatgggcaacgccggcagaaaggagagaagcgacgccctgaacagcgccatcgacaagatgaccaagaagaccagagacctgagaagacagctgagaaaggccgtgatggaccacgtgagcgacagcttcctggagaccaacgtgcccctgctggtgctgatcgaggccgccaagaacggcaacgagaaggaggtgaaggagtacgcccaggtgttcagagagcacgccaacaagctgatcgaggtggccaacctggcctgcagcatcagcaacaacgaggagggcgtgaagctggtgagaatgagcgccagccagctggaggccctgtgcccccaggtgatcaacgccgccctggccctggccgccaagccccagagcaagctggcccaggagaacatggacctgttcaaggagcagtgggagaagcaggtgagagtgctgaccgacgccgtggacgacatcaccagcatcgacgacttcctggccgtgagcgagaaccacatcctggaggacgtgaacaagtgcgtgatcgccctgcaggagaaggacgtggacggcctggacagaaccgccggcgccatcagaggcagagccgccagagtgatccacgtggtgaccagcgagatggacaactacgagcccggcgtgtacaccgagaaggtgctggaggccaccaagctgctgagcaacaccgtgatgcccagattcaccgagcaggtggaggccgccgtggaggccctgagcagcgaccccgcccagcccatggacgagaacgagttcatcgacgccagcagactggtgtacgacggcatcagagacatcagaaaggccgtgctgatgatcagaacccccgaggagctggacgacagcgacttcgagaccgaggacttcgacgtgagaagcagaaccagcgtgcagaccgaggacgaccagctgatcgccggccagagcgccagagccatcatggcccagctgccccaggagcagaaggccaagatcgccgagcaggtggccagcttccaggaggagaagagcaagctggacgccgaggtgagcaagtgggacgacagcggcaacgacatcatcgtgctggccaagcagatgtgcatgatcatgatggagatgaccgacttcaccagaggcaagggccccctgaagaacaccagcgacgtgatcagcgccgccaagaagatcgccgaggccggcagcagaatggacaagctgggcagaaccatcgccgaccactgccccgacagcgcctgcaagcaggacctgctggcctacctgcagagaatcgccctgtactgccaccagctgaacatctgcagcaaggtgaaggccgaggtgcagaacctgggcggcgagctggtggtgagcggcgtggacagcgccatgagcctgatccaggccgccaagaacctgatgaacgccgtggtgcagaccgtgaaggccagctacgtggccagcaccaagtaccagaagagccagggcatggccagcctgaacctgcccgccgtgagctggaagatgaaggcccccgagaagaagcccctggtgaagagagagaagcaggacgagacccagaccaagatcaagagagccagccagaagaagcacgtgaaccccgtgcaggccctgagcgagttcaaggccatggacagcatctag

SEQ ID NO: 9891 - DNA, 2346 bp, synthetic construct
  misc_feature 1..2346: note = Description of Artificial Sequence: Synthetic coding sequence
  source 1..2346: mol_type = other DNA
atggccacccaggccgacctgatggagctggacatggccatggagcccgacagaaaggccgccgtgagccactggcagcagcagagctacctggacagcggcatccacagcggcgccaccaccaccgcccccagcctgagcggcaagggcaaccccgaggaggaggacgtggacaccagccaggtgctgtacgagtgggagcagggcttcagccagagcttcacccaggagcaggtggccgacatcgacggccagtacgccatgaccagagcccagagagtgagagccgccatgttccccgagaccctggacgagggcatgcagatccccagcacccagttcgacgccgcccaccccaccaacgtgcagagactggccgagcccagccagatgctgaagcacgccgtggtgaacctgatcaactaccaggacgacgccgagctggccaccagagccatccccgagctgaccaagctgctgaacgacgaggaccaggtggtggtgaacaaggccgccgtgatggtgcaccagctgagcaagaaggaggccagcagacacgccatcatgagaagcccccagatggtgagcgccatcgtgagaaccatgcagaacaccaacgacgtggagaccgccagatgcaccgccggcaccctgcacaacctgagccaccacagagagggcctgctggccatcttcaagagcggcggcatccccgccctggtgaagatgctgggcagccccgtggacagcgtgctgttctacgccatcaccaccctgcacaacctgctgctgcaccaggagggcgccaagatggccgtgagactggccggcggcctgcagaagatggtggccctgctgaacaagaccaacgtgaagttcctggccatcaccaccgactgcctgcagatcctggcctacggcaaccaggagagcaagctgatcatcctggccagcggcggcccccaggccctggtgaacatcatgagaacctacacctacgagaagctgctgtggaccaccagcagagtgctgaaggtgctgagcgtgtgcagcagcaacaagcccgccatcgtggaggccggcggcatgcaggccctgggcctgcacctgaccgaccccagccagagactggtgcagaactgcctgtggaccctgagaaacctgagcgacgccgccaccaagcaggagggcatggagggcctgctgggcaccctggtgcagctgctgggcagcgacgacatcaacgtggtgacctgcgccgccggcatcctgagcaacctgacctgcaacaactacaagaacaagatgatggtgtgccaggtgggcggcatcgaggccctggtgagaaccgtgctgagagccggcgacagagaggacatcaccgagcccgccatctgcgccctgagacacctgaccagcagacaccaggaggccgagatggcccagaacgccgtgagactgcactacggcctgcccgtggtggtgaagctgctgcacccccccagccactggcccctgatcaaggccaccgtgggcctgatcagaaacctggccctgtgccccgccaaccacgcccccctgagagagcagggcgccatccccagactggtgcagctgctggtgagagcccaccaggacacccagagaagaaccagcatgggcggcacccagcagcagttcgtggagggcgtgagaatggaggagatcgtggagggctgcaccggcgccctgcacatcctggccagagacgtgcacaacagaatcgtgatcagaggcctgaacaccatccccctgttcgtgcagctgctgtacagccccatcgagaacatccagagagtggccgccggcgtgctgtgcgagctggcccaggacaaggaggccgccgaggccatcgaggccgagggcgccaccgcccccctgaccgagctgctgcacagcagaaacgagggcgtggccacctacgccgccgccgtgctgttcagaatgagcgaggacaagccccaggactacaagaagagactgagcgtggagctgaccagcagcctgttcagaaccgagcccatggcctggaacgagaccgccgacctgggcctggacatcggcgcccagggcgagcccctgggctacagacaggacgaccccagctacagaagcttccacagcggcggctacggccaggacgccctgggcatggaccccatgatggagcacgagatgggcggccaccaccccggcgccgactaccccgtggacggcctgcccgacctgggccacgcccaggacctgatggacggcctgccccccggcgacagcaaccagctggcctggttcgacaccgacctgtag

SEQ ID NO: 9892 - DNA, 2346 bp, synthetic construct; identical to SEQ ID NO: 9891
  misc_feature 1..2346: note = Description of Artificial Sequence: Synthetic coding sequence
  source 1..2346: mol_type = other DNA

SEQ ID NO: 9893 - DNA, 2346 bp, synthetic construct; identical to SEQ ID NO: 9891
  misc_feature 1..2346: note = Description of Artificial Sequence: Synthetic coding sequence
  source 1..2346: mol_type = other DNA

SEQ ID NO: 9894 - DNA, 2346 bp, synthetic construct; identical to SEQ ID NO: 9891
  misc_feature 1..2346: note = Description of Artificial Sequence: Synthetic coding sequence
  source 1..2346: mol_type = other DNA

SEQ ID NO: 9895 - DNA, 453 bp, synthetic construct
  misc_feature 1..453: note = Description of Artificial Sequence: Synthetic coding sequence
  source 1..453: mol_type = other DNA
atggccacccaggccgacctgatggagctggacatggccatggagcccgacagaaaggccgccgtgagccactggcagcagcagagctacctggacagcggcatccacagcggcgccaccaccaccgcccccagcctgagcggcaagggcaaccccgaggaggaggacgtggacaccagccaggtgctgtacgagtgggagcagggcttcagccagagcttcacccaggagcaggtggccgacatcgacggccagtacgccatgaccagagcccagagagtgagagccgccatgttccccgagaccctggacgagggcatgcagatccccagcacccagttcgacgccgcccaccccaccaacgtgcagagactggccgagcccagccagatgctgaagcacgccgtggtgaacctgatcaactaccaggacgacgccgagctggccacctag

SEQ ID NO: 9896 - DNA, 42 bp, synthetic construct
  misc_feature 1..42: note = Description of Artificial Sequence: Synthetic coding sequence
  source 1..42: mol_type = other DNA
atggccacccaggccgacctgatggagctggacatggcctag

SEQ ID NO: 9897 - DNA, 303 bp, synthetic construct
  misc_feature 1..303: note = Description of Artificial Sequence: Synthetic coding sequence
  source 1..303: mol_type = other DNA
atggccacccaggccgacctgatggagctggacatggccatggagcccgacagaaaggccgccgtgagccactggcagcagcagagctacctggacagcggcatccacagcggcgccaccaccaccgcccccagcctgagcggcaagggcaaccccgaggaggaggacgtggacaccagccaggtgctgtacgagtgggagcagggcttcagccagagcttcacccaggagcaggtggccgacatcgacggccagtacgccatgaccagagcccagagagtgagagccgccatgttcccctag

SEQ ID NO: 9898 - DNA, 327 bp, synthetic construct
  misc_feature 1..327: note = Description of Artificial Sequence: Synthetic coding sequence
  source 1..327: mol_type = other DNA
atggccacccaggccgacctgatggagctggacatggccatggagcccgacagaaaggccgccgtgagccactggcagcagcagagctacctggacagcggcatccacagcggcgccaccaccaccgcccccagcctgagcggcaagggcaaccccgaggaggaggacgtggacaccagccaggtgctgtacgagtgggagcagggcttcagccagagcttcacccaggagcaggtggccgacatcgacggccagtacgccatgaccagagcccagagagtgagagccgccatgttccccgagaccctggacgagggcatgcagtag

SEQ ID NO: 9899 - DNA, 2325 bp, synthetic construct
  misc_feature 1..2325: note = Description of Artificial Sequence: Synthetic coding sequence
  source 1..2325: mol_type = other DNA
atggagctggacatggccatggagcccgacagaaaggccgccgtgagccactggcagcagcagagctacctggacagcggcatccacagcggcgccaccaccaccgcccccagcctgagcggcaagggcaaccccgaggaggaggacgtggacaccagccaggtgctgtacgagtgggagcagggcttcagccagagcttcacccaggagcaggtggccgacatcgacggccagtacgccatgaccagagcccagagagtgagagccgccatgttccccgagaccctggacgagggcatgcagatccccagcacccagttcgacgccgcccaccccaccaacgtgcagagactggccgagcccagccagatgctgaagcacgccgtggtgaacctgatcaactaccaggacgacgccgagctggccaccagagccatccccgagctgaccaagctgctgaacgacgaggaccaggtggtggtgaacaaggccgccgtgatggtgcaccagctgagcaagaaggaggccagcagacacgccatcatgagaagcccccagatggtgagcgccatcgtgagaaccatgcagaacaccaacgacgtggagaccgccagatgcaccgccggcaccctgcacaacctgagccaccacagagagggcctgctggccatcttcaagagcggcggcatccccgccctggtgaagatgctgggcagccccgtggacagcgtgctgttctacgccatcaccaccctgcacaacctgctgctgcaccaggagggcgccaagatggccgtgagactggccggcggcctgcagaagatggtggccctgctgaacaagaccaacgtgaagttcctggccatcaccaccgactgcctgcagatcctggcctacggcaaccaggagagcaagctgatcatcctggccagcggcggcccccaggccctggtgaacatcatgagaacctacacctacgagaagctgctgtggaccaccagcagagtgctgaaggtgctgagcgtgtgcagcagcaacaagcccgccatcgtggaggccggcggcatgcaggccctgggcctgcacctgaccgaccccagccagagactggtgcagaactgcctgtggaccctgagaaacctgagcgacgccgccaccaagcaggagggcatggagggcctgctgggcaccctggtgcagctgctgggcagcgacgacatcaacgtggtgacctgcgccgccggcatcctgagcaacctgacctgcaacaactacaagaacaagatgatggtgtgccaggtgggcggcatcgaggccctggtgagaaccgtgctgagagccggcgacagagaggacatcaccgagcccgccatctgcgccctgagacacctgaccagcagacaccaggaggccgagatggcccagaacgccgtgagactgcactacggcctgcccgtggtggtgaagctgctgcacccccccagccactggcccctgatcaaggccaccgtgggcctgatcagaaacctggccctgtgccccgccaaccacgcccccctgagagagcagggcgccatccccagactggtgcagctgctggtgagagcccaccaggacacccagagaagaaccagcatgggcggcacccagcagcagttcgtggagggcgtgagaatggaggagatcgtggagggctgcaccggcgccctgcacatcctggccagagacgtgcacaacagaatcgtgatcagaggcctgaacaccatccccctgttcgtgcagctgctgtacagccccatcgagaacatccagagagtggccgccggcgtgctgtgcgagctggcccaggacaaggaggccgccgaggccatcgaggccgagggcgccaccgcccccctgaccgagctgctgcacagcagaaacgagggcgtggccacctacgccgccgccgtgctgttcagaatgagcgaggacaagccccaggactacaagaagagactgagcgtggagctgaccagcagcctgttcagaaccgagcccatggcctggaacgagaccgccgacctgggcctggacatcggcgcccagggcgagcccctgggctacagacaggacgaccccagctacagaagcttccacagcggcggctacggccaggacgccctgggcatggaccccatgatggagcacgagatgggcggccaccaccccggcgccgactaccccgtggacggcctgcccgacctgggccacgcccaggacctgatggacggcctgccccccggcgacagcaaccagctggcctggttcgacaccgacctgtag

SEQ ID NO: 9900 - DNA, 1020 bp, synthetic construct
  misc_feature 1..1020: note = Description of Artificial Sequence: Synthetic coding sequence
  source 1..1020: mol_type = other DNA
atgtggcagctgtgggccagcctgtgctgcctgctggtgctggccaacgccagaagcagacccagcttccaccccctgagcgacgagctggtgaactacgtgaacaagagaaacaccacctggcaggccggccacaacttctacaacgtggacatgagctacctgaagagactgtgcggcaccttcctgggcggccccaagcccccccagagagtgatgttcaccgaggacctgaagctgcccgccagcttcgacgccagagagcagtggccccagtgccccaccatcaaggagatcagagaccagggcagctgcggcagctgctgggccttcggcgccgtggaggccatcagcgacagaatctgcatccacaccaacgcccacgtgagcgtggaggtgagcgccgaggacctgctgacctgctgcggcagcatgtgcggcgacggctgcaacggcggctaccccgccgaggcctggaacttctggaccagaaagggcctggtgagcggcggcctgtacgagagccacgtgggctgcagaccctacagcatccccccctgcgagcaccacgtgaacggcagcagacccccctgcaccggcgagggcgacacccccaagtgcagcaagatctgcgagcccggctacagccccacctacaagcaggacaagcactacggctacaacagctacagcgtgagcaacagcgagaaggacatcatggccgagatctacaagaacggccccgtggagggcgccttcagcgtgtacagcgacttcctgctgtacaagagcggcgtgtaccagcacgtgaccggcgagatgatgggcggccacgccatcagaatcctgggctggggcgtggagaacggcaccccctactggctggtggccaacagctggaacaccgactggggcgacaacggcttcttcaagatcctgagaggccaggaccactgcggcatcgagagcgaggtggtggccggcatccccagaaccgaccagtactgggagaagatctag

SEQ ID NO: 9901 - DNA, 1020 bp, synthetic construct; identical to SEQ ID NO: 9900
  misc_feature 1..1020: note = Description of Artificial Sequence: Synthetic coding sequence
  source 1..1020: mol_type = other DNA

SEQ ID NO: 9902 - DNA, 333 bp, synthetic construct
  misc_feature 1..333: note = Description of Artificial Sequence: Synthetic coding sequence
  source 1..333: mol_type = other DNA
atgtggcagctgtgggccagcctgtgctgcctgctggtgctggccaacgccagaagcagacccagcttccaccccctgagcgacgagctggtgaactacgtgaacaagagaaacaccacctggcaggccggccacaacttctacaacgtggacatgagctacctgaagagactgtgcggcaccttcctgggcggccccaagcccccccagagagtgatgttcaccgaggacctgaagctgcccgccagcttcgacgccagagagcagtggccccagtgccccaccatcaaggagatcagagaccagggcagctgcggcagctgctggctgtag

SEQ ID NO: 9903 - DNA, 1020 bp, synthetic construct; identical to SEQ ID NO: 9900
  misc_feature 1..1020: note = Description of Artificial Sequence: Synthetic coding sequence
  source 1..1020: mol_type = other DNA

SEQ ID NO: 9904 - DNA, 1020 bp, synthetic construct; identical to SEQ ID NO: 9900
  misc_feature 1..1020: note = Description of Artificial Sequence: Synthetic coding sequence
  source 1..1020: mol_type = other DNA

SEQ ID NO: 9905 - DNA, 1020 bp, synthetic construct; identical to SEQ ID NO: 9900
  misc_feature 1..1020: note = Description of Artificial Sequence: Synthetic coding sequence
  source 1..1020: mol_type = other DNA

SEQ ID NO: 9906 - DNA, 1020 bp, synthetic construct; identical to SEQ ID NO: 9900
  misc_feature 1..1020: note = Description of Artificial Sequence: Synthetic coding sequence
  source 1..1020: mol_type = other DNA

SEQ ID NO: 9907 - DNA, 1020 bp, synthetic construct; identical to SEQ ID NO: 9900
  misc_feature 1..1020: note = Description of Artificial Sequence: Synthetic coding sequence
  source 1..1020: mol_type = other DNA

SEQ ID NO: 9908 - DNA, 1020 bp, synthetic construct; identical to SEQ ID NO: 9900
  misc_feature 1..1020: note = Description of Artificial Sequence: Synthetic coding sequence
  source 1..1020: mol_type = other DNA

SEQ ID NO: 9909 - DNA, 831 bp, synthetic construct
  misc_feature 1..831: note = Description of Artificial Sequence: Synthetic coding sequence
  source 1..831: mol_type = other DNA
atggacatgaacagaagagccagctgcctgctgcccgacctgtgcggccagggctggggctggagactgttccccgccagctgcgcctacctgggcagcgtgccctggagagtgtggggcctgggcggcctgctggcccccctggccgccgccggcggcggcagcaccagcggcctgggccacctgggcagcacccagtggagcggcgagctggtggtgctgctgagcgaggtgttcatcagaggctgcctgttcagctgcaacggcggctaccccgccgaggcctggaacttctggaccagaaagggcctggtgagcggcggcctgtacgagagccacgtgggctgcagaccctacagcatccccccctgcgagcaccacgtgaacggcagcagacccccctgcaccggcgagggcgacacccccaagtgcagcaagatctgcgagcccggctacagccccacctacaagcaggacaagcactacggctacaacagctacagcgtgagcaacagcgagaaggacatcatggccgagatctacaagaacggccccgtggagggcgccttcagcgtgtacagcgacttcctgctgtacaagagcggcgtgtaccagcacgtgaccggcgagatgatgggcggccacgccatcagaatcctgggctggggcgtggagaacggcaccccctactggctggtggccaacagctggaacaccgactggggcgacaacggcttcttcaagatcctgagaggccaggaccactgcggcatcgagagcgaggtggtggccggcatccccagaaccgaccagtactgggagaagatctag

SEQ ID NO: 9910 - DNA, 738 bp, synthetic construct
  misc_feature 1..738: note = Description of Artificial Sequence: Synthetic coding sequence
  source 1..738: mol_type = other DNA
atgcccggcgccggccccctgagcatcccctgcagaatgagctgggccttcggcgccgtggaggccatcagcgacagaatctgcatccacaccaacgcccacgtgagcgtggaggtgagcgccgaggacctgctgacctgctgcggcagcatgtgcggcgacggctgcaacggcggctaccccgccgaggcctggaacttctggaccagaaagggcctggtgagcggcggcctgtacgagagccacgtgggctgcagaccctacagcatccccccctgcgagcaccacgtgaacggcagcagacccccctgcaccggcgagggcgacacccccaagtgcagcaagatctgcgagcccggctacagccccacctacaagcaggacaagcactacggctacaacagctacagcgtgagcaacagcgagaaggacatcatggccgagatctacaagaacggccccgtggagggcgccttcagcgtgtacagcgacttcctgctgtacaagagcggcgtgtaccagcacgtgaccggcgagatgatgggcggccacgccatcagaatcctgggctggggcgtggagaacggcaccccctactggctggtggccaacagctggaacaccgactggggcgacaacggcttcttcaagatcctgagaggccaggaccactgcggcatcgagagcgaggtggtggccggcatccccagaaccgaccagtactgggagaagatctag

SEQ ID NO: 9911 - DNA, 1239 bp, synthetic construct
  misc_feature 1..1239: note = Description of Artificial Sequence: Synthetic coding sequence
  source 1..1239: mol_type = other DNA
atgcagcccagcagcctgctgcccctggccctgtgcctgctggccgcccccgccagcgccctggtgagaatccccctgcacaagttcaccagcatcagaagaaccatgagcgaggtgggcggcagcgtggaggacctgatcgccaagggccccgtgagcaagtacagccaggccgtgcccgccgtgaccgagggccccatccccgaggtgctgaagaactacatggacgcccagtactacggcgagatcggcatcggcacccccccccagtgcttcaccgtggtgttcgacaccggcagcagcaacctgtgggtgcccagcatccactgcaagctgctggacatcgcctgctggatccaccacaagtacaacagcgacaagagcagcacctacgtgaagaacggcaccagcttcgacatccactacggcagcggcagcctgagcggctacctgagccaggacaccgtgagcgtgccctgccagagcgccagcagcgccagcgccctgggcggcgtgaaggtggagagacaggtgttcggcgaggccaccaagcagcccggcatcaccttcatcgccgccaagttcgacggcatcctgggcatggcctaccccagaatcagcgtgaacaacgtgctgcccgtgttcgacaacctgatgcagcagaagctggtggaccagaacatcttcagcttctacctgagcagagaccccgacgcccagcccggcggcgagctgatgctgggcggcaccgacagcaagtactacaagggcagcctgagctacctgaacgtgaccagaaaggcctactggcaggtgcacctggaccaggtggaggtggccagcggcctgaccctgtgcaaggagggctgcgaggccatcgtggacaccggcaccagcctgatggtgggccccgtggacgaggtgagagagctgcagaaggccatcggcgccgtgcccctgatccagggcgagtacatgatcccctgcgagaaggtgagcaccctgcccgccatcaccctgaagctgggcggcaagggctacaagctgagccccgaggactacaccctgaaggtgagccaggccggcaagaccctgtgcctgagcggcttcatgggcatggacatccccccccccagcggccccctgtggatcctgggcgacgtgttcatcggcagatactacaccgtgttcgacagagacaacaacagagtgggcttcgccgaggccgccagactgtag

SEQ ID NO: 9912 - DNA, 1002 bp, synthetic construct
  misc_feature 1..1002: note = Description of Artificial Sequence: Synthetic coding sequence
  source 1..1002: mol_type = other DNA
atgaaccccaccctgatcctggccgccttctgcctgggcatcgccagcgccaccctgaccttcgaccacagcctggaggcccagtggaccaagtggaaggccatgcacaacagactgtacggcatgaacgaggagggctggagaagagccgtgtgggagaagaacatgaagatgatcgagctgcacaaccaggagtacagagagggcaagcacagcttcaccatggccatgaacgccttcggcgacatgaccagcgaggagttcagacaggtgatgaacggcttccagaacagaaagcccagaaagggcaaggtgttccaggagcccctgttctacgaggcccccagaagcgtggactggagagagaagggctacgtgacccccgtgaagaaccagggccagtgcggcagctgctgggccttcagcgccaccggcgccctggagggccagatgttcagaaagaccggcagactgatcagcctgagcgagcagaacctggtggactgcagcggcccccagggcaacgagggctgcaacggcggcctgatggactacgccttccagtacgtgcaggacaacggcggcctggacagcgaggagagctacccctacgaggccaccgaggagagctgcaagtacaaccccaagtacagcgtggccaacgacaccggcttcgtggacatccccaagcaggagaaggccctgatgaaggccgtggccaccgtgggccccatcagcgtggccatcgacgccggccacgagagcttcctgttctacaaggagggcatctacttcgagcccgactgcagcagcgaggacatggaccacggcgtgctggtggtgggctacggcttcgagagcaccgagagcgacaacaacaagtactggctggtgaagaacagctggggcgaggagtggggcatgggcggctacgtgaagatggccaaggacagaagaaaccactgcggcatcgccagcgccgccagctaccccaccgtgtag

SEQ ID NO: 9913 - DNA, 678 bp, synthetic construct
  misc_feature 1..678: note = Description of Artificial Sequence: Synthetic coding sequence
  source 1..678: mol_type = other DNA
atgaaccccaccctgatcctggccgccttctgcctgggcatcgccagcgccaccctgaccttcgaccacagcctggaggcccagtggaccaagtggaaggccatgcacaacagactgtacggcatgaacgaggagggctggagaagagccgtgtgggagaagaacatgaagatgatcgagctgcacaaccaggagtacagagagggcaagcacagcttcaccatggccatgaacgccttcggcgacatgaccagcgaggagttcagacaggtgatgaacggcttccagaacagaaagcccagaaagggcaaggtgttccaggagcccctgttctacgaggcccccagaagcgtggactggagagagaagggctacgtgacccccgtgaagaaccagggccagtgcggcagctgctgggccttcagcgccaccggcgccctggagggccagatgttcagaaagaccggcagactgatcagcctgagcgagcagaacctggtggactgcagcggcccccagggcaacgagggctgcaacggcggcctgatggactacgccttccagtacgtgcaggacaacggcggcctggacagcgaggagagctacccctacgaggccaccgtgagcggcgccccctgccaccacagcagcagcgccttcggcagatggaccctgtag

SEQ ID NO: 9914 - DNA, 1002 bp, synthetic construct; identical to SEQ ID NO: 9912
  misc_feature 1..1002: note = Description of Artificial Sequence: Synthetic coding sequence
  source 1..1002: mol_type = other DNA

SEQ ID NO: 9915 - DNA, 120 bp, synthetic construct
  misc_feature 1..120: note = Description of Artificial Sequence: Synthetic coding sequence
  source 1..120: mol_type = other DNA
atgaaccccaccctgatcctggccgccttctgcctgggcatcgccagcgccaccctgaccttcgaccacagcctggaggcccagtggaccaagtggaaggccatgcacaacagactgtag

SEQ ID NO: 9916 - DNA, 444 bp, synthetic construct
  misc_feature 1..444: note = Description of Artificial Sequence: Synthetic coding sequence
  source 1..444: mol_type = other DNA
atggccgacgagctgagcgagaagcaggtgtacgacgcccacaccaaggagatcgacctggtgaacagagaccccaagcacctgaacgacgacgtggtgaagatcgacttcgaggacgtgatcgccgagcccgagggcacccacagcttcgacggcatctggaaggccagcttcaccaccttcaccgtgaccaagtactggttctacagactgctgagcgccctgttcggcatccccatggccctgatctggggcatctacttcgccatcctgagcttcctgcacatctgggccgtggtgccctgcatcaagagcttcctgatcgagatccagtgcatcagcagagtgtacagcatctacgtgcacaccgtgtgcgaccccctgttcgaggccgtgggcaagatcttcagcaacgtgagaatcaacctgcagaaggagatctag

SEQ ID NO: 9917 - DNA, 444 bp, synthetic construct; identical to SEQ ID NO: 9916
  misc_feature 1..444: note = Description of Artificial Sequence: Synthetic coding sequence
  source 1..444: mol_type = other DNA

SEQ ID NO: 9918 - DNA, 537 bp, synthetic construct
  misc_feature 1..537: note = Description of Artificial Sequence: Synthetic coding sequence
  source 1..537: mol_type = other DNA
atgagcggcggcaagtacgtggacagcgagggccacctgtacaccgtgcccatcagagagcagggcaacatctacaagcccaacaacaaggccatggccgacgagctgagcgagaagcaggtgtacgacgcccacaccaaggagatcgacctggtgaacagagaccccaagcacctgaacgacgacgtggtgaagatcgacttcgaggacgtgatcgccgagcccgagggcacccacagcttcgacggcatctggaaggccagcttcaccaccttcaccgtgaccaagtactggttctacagactgctgagcgccctgttcggcatccccatggccctgatctggggcatctacttcgccatcctgagcttcctgcacatctgggccgtggtgccctgcatcaagagcttcctgatcgagatccagtgcatcagcagagtgtacagcatctacgtgcacaccgtgtgcgaccccctgttcgaggccgtgggcaagatcttcagcaacgtgagaatcaacctgcagaaggagatctag

SEQ ID NO: 9919 - DNA, 345 bp, synthetic construct
  misc_feature 1..345: note = Description of Artificial Sequence: Synthetic coding sequence
  source 1..345: mol_type = other DNA
atggccggcggcaaggccggcaaggacagcggcaaggccaaggccaaggccgtgagcagaagccagagagccggcctgcagttccccgtgggcagaatccacagacacctgaagaccagaaccaccagccacggcagagtgggcgccaccgccgccgtgtacagcgccgccatcctggagtacctgaccgccgaggtgctggagctggccggcaacgccagcaaggacctgaaggtgaagagaatcacccccagacacctgcagctggccatcagaggcgacgaggagctggacagcctgatcaaggccaccatcgccggcggcgagaagagaagatgcagctag

SEQ ID NO: 9920 - DNA, 339 bp, synthetic construct
  misc_feature 1..339: note = Description of Artificial Sequence: Synthetic coding sequence
  source 1..339: mol_type = other DNA
atgggcctggagaccgagaaggccgacgtgcagctgttcatggacgacgacagctacagccaccacagcggcctggagtacgccgaccccgagaagttcgccgacagcgaccaggacagagacccccacagactgaacagccacctgaaggacttcaacgccttctgcaaggacctgcccaacggcagcgccttcagcgccgacaacatggaggagtgcgacagatgctaccactgcagcatcgtgtacgagagaagaaccatgctgctgttctgccagcccgccaccgagcccggcctgaacacctggacccccggcctggagatcggcatcctgtag

SEQ ID NO: 9921 - DNA, 342 bp, synthetic construct
  misc_feature 1..342: note = Description of Artificial Sequence: Synthetic coding sequence
  source 1..342: mol_type = other DNA
atgggcctggagaccgagaaggccgacgtgcagctgttcatggacgacgacagctacagccaccacagcggcctggagtacgccgaccccgagaagttcgccgacagcgaccaggacagagacccccacagactgaacagccacctgaagctgggcttcgaggacgtgatcgccgagcccgtgaccacccacagcttcgacaaggtgtggatctgcagccacgccctgttcgagatcagcaagtacgtgatgtacaagttcctgaccgtgttcctggccatccccctggccttcatcgccggcatcctgttcgccaccctgagctgcctgcacatctggtag

SEQ ID NO: 9922 - DNA, 1038 bp, synthetic construct
  misc_feature 1..1038: note = Description of Artificial Sequence: Synthetic coding sequence
  source 1..1038: mol_type = other DNA
atgcagagactggtggcctgggaccccgcctgcctgcccctgcccccccccccccccgccttcaagagcatggaggtggccaacttctactacgaggccgactgcctggccgccgcctacggcggcaaggccgcccccgccgccccccccgccgccagacccggccccagaccccccgccggcgagctgggcagcatcggcgaccacgagagagccatcgacttcagcccctacctggagcccctgggcgccccccaggcccccgcccccgccaccgccaccgacaccttcgaggccgccccccccgcccccgcccccgcccccgccagcagcggccagcaccacgacttcctgagcgacctgttcagcgacgactacggcggcaagaactgcaagaagcccgccgagtacggctacgtgagcctgggcagactgggcgccgccaagggcgccctgcaccccggctgcttcgcccccctgcaccccccccccccccccccccccccccccgccgagctgaaggccgagcccggcttcgagcccgccgactgcaagagaaaggaggaggccggcgcccccggcggcggcgccggcatggccgccggcttcccctacgccctgagagcctacctgggctaccaggccgtgcccagcggcagcagcggcagcctgagcaccagcagcagcagcagcccccccggcacccccagccccgccgacgccaaggccccccccaccgcctgctacgccggcgccgcccccgcccccagccaggtgaagagcaaggccaagaagaccgtggacaagcacagcgacgagtacaagatcagaagagagagaaacaacatcgccgtgagaaagagcagagacaaggccaagatgagaaacctggagacccagcacaaggtgctggagctgaccgccgagaacgagagactgcagaagaaggtggagcagctgagcagagagctgagcaccctgagaaacctgttcaagcagctgcccgagcccctgctggccagcagcggccactgctag

SEQ ID NO: 9923 - DNA, 2184 bp, synthetic construct
  misc_feature 1..2184: note = Description of Artificial Sequence: Synthetic coding sequence
  source 1..2184: mol_type = other DNA
atggagggcgacgccgtggaggccatcgtggaggagagcgagaccttcatcaagggcaaggagagaaagacctaccagagaagaagagagggcggccaggaggaggacgcctgccacctgccccagaaccagaccgacggcggcgaggtggtgcaggacgtgaacagcagcgtgcagatggtgatgatggagcagctggaccccaccctgctgcagatgaagaccgaggtgatggagggcaccgtggcccccgaggccgaggccgccgtggacgacacccagatcatcaccctgcaggtggtgaacatggaggagcagcccatcaacatcggcgagctgcagctggtgcaggtgcccgtgcccgtgaccgtgcccgtggccaccaccagcgtggaggagctgcagggcgcctacgagaacgaggtgagcaaggagggcctggccgagagcgagcccatgatctgccacaccctgcccctgcccgagggcttccaggtggtgaaggtgggcgccaacggcgaggtggagaccctggagcagggcgagctgcccccccaggaggaccccagctggcagaaggaccccgactaccagccccccgccaagaagaccaagaagaccaagaagagcaagctgagatacaccgaggagggcaaggacgtggacgtgagcgtgtacgacttcgaggaggagcagcaggagggcctgctgagcgaggtgaacgccgagaaggtggtgggcaacatgaagccccccaagcccaccaagatcaagaagaagggcgtgaagaagaccttccagtgcgagctgtgcagctacacctgccccagaagaagcaacctggacagacacatgaagagccacaccgacgagagaccccacaagtgccacctgtgcggcagagccttcagaaccgtgaccctgctgagaaaccacctgaacacccacaccggcaccagaccccacaagtgccccgactgcgacatggccttcgtgaccagcggcgagctggtgagacacagaagatacaagcacacccacgagaagcccttcaagtgcagcatgtgcgactacgccagcgtggaggtgagcaagctgaagagacacatcagaagccacaccggcgagagacccttccagtgcagcctgtgcagctacgccagcagagacacctacaagctgaagagacacatgagaacccacagcggcgagaagccctacgagtgctacatctgccacgccagattcacccagagcggcaccatgaagatgcacatcctgcagaagcacaccgagaacgtggccaagttccactgcccccactgcgacaccgtgatcgccagaaagagcgacctgggcgtgcacctgagaaagcagcacagctacatcgagcagggcaagaagtgcagatactgcgacgccgtgttccacgagagatacgccctgatccagcaccagaagagccacaagaacgagaagagattcaagtgcgaccagtgcgactacgcctgcagacaggagagacacatgatcatgcacaagagaacccacaccggcgagaagccctacgcctgcagccactgcgacaagaccttcagacagaagcagctgctggacatgcacttcaagagataccacgaccccaacttcgtgcccgccgccttcgtgtgcagcaagtgcggcaagaccttcaccagaagaaacaccatggccagacacgccgacaactgcgccggccccgacggcgtggagggcgagaacggcggcgagaccaagaagagcaagagaggcagaaagagaaagatgagaagcaagaaggaggacagcagcgacagcgagaacgccgagcccgacctggacgacaacgaggacgaggaggagcccgccgtggagatcgagcccgagcccgagccccagcccgtgacccccgcccccccccccgccaagaagagaagaggcagaccccccggcagaaccaaccagcccaagcagaaccagcccaccgccatcatccaggtggaggaccagaacaccggcgccatcgagaacatcatcgtggaggtgaagaaggagcccgacgccgagcccgccgagggcgaggaggaggaggcccagcccgccgccaccgacgcccccaacggcgacctgacccccgagatgatcctgagcatgatggacagatag

SEQ ID NO: 9924 - DNA, 1200 bp, synthetic construct
  misc_feature 1..1200: note = Description of Artificial Sequence: Synthetic coding sequence
  source 1..1200: mol_type = other DNA
atggccttcgtgaccagcggcgagctggtgagacacagaagatacaagcacacccacgagaagcccttcaagtgcagcatgtgcgactacgccagcgtggaggtgagcaagctgaagagacacatcagaagccacaccggcgagagacccttccagtgcagcctgtgcagctacgccagcagagacacctacaagctgaagagacacatgagaacccacagcggcgagaagccctacgagtgctacatctgccacgccagattcacccagagcggcaccatgaagatgcacatcctgcagaagcacaccgagaacgtggccaagttccactgcccccactgcgacaccgtgatcgccagaaagagcgacctgggcgtgcacctgagaaagcagcacagctacatcgagcagggcaagaagtgcagatactgcgacgccgtgttccacgagagatacgccctgatccagcaccagaagagccacaagaacgagaagagattcaagtgcgaccagtgcgactacgcctgcagacaggagagacacatgatcatgcacaagagaacccacaccggcgagaagccctacgcctgcagccactgcgacaagaccttcagacagaagcagctgctggacatgcacttcaagagataccacgaccccaacttcgtgcccgccgccttcgtgtgcagcaagtgcggcaagaccttcaccagaagaaacaccatggccagacacgccgacaactgcgccggccccgacggcgtggagggcgagaacggcggcgagaccaagaagagcaagagaggcagaaagagaaagatgagaagcaagaaggaggacagcagcgacagcgagaacgccgagcccgacctggacgacaacgaggacgaggaggagcccgccgtggagatcgagcccgagcccgagccccagcccgtgacccccgcccccccccccgccaagaagagaagaggcagaccccccggcagaaccaaccagcccaagcagaaccagcccaccgccatcatccaggtggaggaccagaacaccggcgccatcgagaacatcatcgtggaggtgaagaaggagcccgacgccgagcccgccgagggcgaggaggaggaggcccagcccgccgccaccgacgcccccaacggcgacctgacccccgagatgatcctgagcatgatggacagatag

SEQ ID NO: 9925 - DNA, 1128 bp, synthetic construct
  misc_feature 1..1128: note = Description of Artificial Sequence: Synthetic coding sequence
  source 1..1128: mol_type = other DNA
atggagagagccagctgcctgctgctgctgctgctgcccctggtgcacgtgagcgccaccacccccgagccctgcgagctggacgacgaggacttcagatgcgtgtgcaacttcagcgagccccagcccgactggagcgaggccttccagtgcgtgagcgccgtggaggtggagatccacgccggcggcctgaacctggagcccttcctgaagagagtggacgccgacgccgaccccagacagtacgccgacaccgtgaaggccctgagagtgagaagactgaccgtgggcgccgcccaggtgcccgcccagctgctggtgggcgccctgagagtgctggcctacagcagactgaaggagctgaccctggaggacctgaagatcaccggcaccatgccccccctgcccctggaggccaccggcctggccctgagcagcctgagactgagaaacgtgagctgggccaccggcagaagctggctggccgagctgcagcagtggctgaagcccggcctgaaggtgctgagcatcgcccaggcccacagccccgccttcagctgcgagcaggtgagagccttccccgccctgaccagcctggacctgagcgacaaccccggcctgggcgagagaggcctgatggccgccctgtgcccccacaagttccccgccatccagaacctggccctgagaaacaccggcatggagacccccaccggcgtgtgcgccgccctggccgccgccggcgtgcagccccacagcctggacctgagccacaacagcctgagagccaccgtgaaccccagcgcccccagatgcatgtggagcagcgccctgaacagcctgaacctgagcttcgccggcctggagcaggtgcccaagggcctgcccgccaagctgagagtgctggacctgagctgcaacagactgaacagagccccccagcccgacgagctgcccgaggtggacaacctgaccctggacggcaaccccttcctggtgcccggcaccgccctgccccacgagggcagcatgaacagcggcgtggtgcccgcctgcgccagaagcaccctgagcgtgggcgtgagcggcaccctggtgctgctgcagggcgccagaggcttcgcctag

SEQ ID NO: 9926 - DNA, 1128 bp, synthetic construct; identical to SEQ ID NO: 9925
  misc_feature 1..1128: note = Description of Artificial Sequence: Synthetic coding sequence
  source 1..1128: mol_type = other DNA

SEQ ID NO: 9927 - DNA, 402 bp, synthetic construct
  misc_feature 1..402: note = Description of Artificial Sequence: Synthetic coding sequence
  source 1..402: mol_type = other DNA
atgagcttcccctgcaagttcgtggccagcttcctgctgatcttcaacgtgagcagcaagggcgccgtgagcaaggagatcaccaacgccctggagacctggggcgccctgggccaggacatcaacctggacatccccagcttccagatgagcgacgacatcgacgacatcaagtgggagaagaccagcgacaagaagaagatcgcccagttcagaaaggagaaggagaccttcaaggagaaggacacctacaagctgttcaagaacggcaccctgaagatcaagcacctgaagaccgacgaccaggacatctacaaggtgagcatctacgacaccaagggcaagaacgtgctggagaagatcttcgacctgaagatccagggcaagtgcagcttcccctag

SEQ ID NO: 9928 - DNA, 1056 bp, synthetic construct
  misc_feature 1..1056: note = Description of Artificial Sequence: Synthetic coding sequence
  source 1..1056: mol_type = other DNA
atgagcttcccctgcaagttcgtggccagcttcctgctgatcttcaacgtgagcagcaagggcgccgtgagcaaggagatcaccaacgccctggagacctggggcgccctgggccaggacatcaacctggacatccccagcttccagatgagcgacgacatcgacgacatcaagtgggagaagaccagcgacaagaagaagatcgcccagttcagaaaggagaaggagaccttcaaggagaaggacacctacaagctgttcaagaacggcaccctgaagatcaagcacctgaagaccgacgaccaggacatctacaaggtgagcatctacgacaccaagggcaagaacgtgctggagaagatcttcgacctgaagatccaggagagagtgagcaagcccaagatcagctggacctgcatcaacaccaccctgacctgcgaggtgatgaacggcaccgaccccgagctgaacctgtaccaggacggcaagcacctgaagctgagccagagagtgatcacccacaagtggaccaccagcctgagcgccaagttcaagtgcaccgccggcaacaaggtgagcaaggagagcagcgtggagcccgtgagctgccccgagaagggcctggacatctacctgatcatcggcatctgcggcggcggcagcctgctgatggtgttcgtggccctgctggtgttctacatcaccaagagaaagaagcagagaagcagaagaaacgacgaggagctggagaccagagcccacagagtggccaccgaggagagaggcagaaagccccaccagatccccgccagcaccccccagaaccccgccaccagccagcaccccccccccccccccggccacagaagccaggcccccagccacagaccccccccccccggccacagagtgcagcaccagccccagaagagaccccccgcccccagcggcacccaggtgcaccagcagaagggcccccccctgcccagacccagagtgcagcccaagcccccccacggcgccgccgagaacagcctgagccccagcagcaactag

SEQ ID NO: 9929 - DNA, 2544 bp, synthetic construct
  misc_feature 1..2544: note = Description of Artificial Sequence: Synthetic coding sequence
  source 1..2544: mol_type = other DNA
atgcacctgctgggcccctggctgctgctgctggtgctggagtacctggccttcagcgacagcagcaagtgggtgttcgagcaccccgagaccctgtacgcctgggagggcgcctgcgtgtggatcccctgcacctacagagccctggacggcgacctggagagcttcatcctgttccacaaccccgagtacaacaagaacaccagcaagttcgacggcaccagactgtacgagagcaccaaggacggcaaggtgcccagcgagcagaagagagtgcagttcctgggcgacaagaacaagaactgcaccctgagcatccaccccgtgcacctgaacgacagcggccagctgggcctgagaatggagagcaagaccgagaagtggatggagagaatccacctgaacgtgagcgagagacccttccccccccacatccagctgccccccgagatccaggagagccaggaggtgaccctgacctgcctgctgaacttcagctgctacggctaccccatccagctgcagtggctgctggagggcgtgcccatgagacaggccgccgtgaccagcaccagcctgaccatcaagagcgtgttcaccagaagcgagctgaagttcagcccccagtggagccaccacggcaagatcgtgacctgccagctgcaggacgccgacggcaagttcctgagcaacgacaccgtgcagctgaacgtgaagcacacccccaagctggagatcaaggtgacccccagcgacgccatcgtgagagagggcgacagcgtgaccatgacctgcgaggtgagcagcagcaaccccgagtacaccaccgtgagctggctgaaggacggcaccagcctgaagaagcagaacaccttcaccctgaacctgagagaggtgaccaaggaccagagcggcaagtactgctgccaggtgagcaacgacgtgggccccggcagaagcgaggaggtgttcctgcaggtgcagtacgcccccgagcccagcaccgtgcagatcctgcacagccccgccgtggagggcagccaggtggagttcctgtgcatgagcctggccaaccccctgcccaccaactacacctggtaccacaacggcaaggagatgcagggcagaaccgaggagaaggtgcacatccccaagatcctgccctggcacgccggcacctacagctgcgtggccgagaacatcctgggcaccggccagagaggccccggcgccgagctggacgtgcagtacccccccaagaaggtgaccaccgtgatccagaaccccatgcccatcagagagggcgacaccgtgaccctgagctgcaactacaacagcagcaaccccagcgtgaccagatacgagtggaagccccacggcgcctgggaggagcccagcctgggcgtgctgaagatccagaacgtgggctgggacaacaccaccatcgcctgcgccgcctgcaacagctggtgcagctgggccagccccgtggccctgaacgtgcagtacgcccccagagacgtgagagtgagaaagatcaagcccctgagcgagatccacagcggcaacagcgtgagcctgcagtgcgacttcagcagcagccaccccaaggaggtgcagttcttctgggagaagaacggcagactgctgggcaaggagagccagctgaacttcgacagcatcagccccgaggacgccggcagctacagctgctgggtgaacaacagcatcggccagaccgccagcaaggcctggaccctggaggtgctgtacgcccccagaagactgagagtgagcatgagccccggcgaccaggtgatggagggcaagagcgccaccctgacctgcgagagcgacgccaacccccccgtgagccactacacctggttcgactggaacaaccagagcctgccctaccacagccagaagctgagactggagcccgtgaaggtgcagcacagcggcgcctactggtgccagggcaccaacagcgtgggcaagggcagaagccccctgagcaccctgaccgtgtactacagccccgagaccatcggcagaagagtggccgtgggcctgggcagctgcctggccatcctgatcctggccatctgcggcctgaagctgcagagaagatggaagagaacccagagccagcagggcctgcaggagaacagcagcggccagagcttcttcgtgagaaacaagaaggtgagaagagcccccctgagcgagggcccccacagcctgggctgctacaaccccatgatggaggacggcatcagctacaccaccctgagattccccgagatgaacatccccagaaccggcgacgccgagagcagcgagatgcagagacccccccccgactgcgacgacaccgtgacctacagcgccctgcacaagagacaggtgggcgactacgagaacgtgatccccgacttccccgaggacgagggcatccactacagcgagctgatccagttcggcgtgggcgagagaccccaggcccaggagaacgtggactacgtgatcctgaagcactag

SEQ ID NO: 9930 - DNA, 1989 bp, synthetic construct
  misc_feature 1..1989: note = Description of Artificial Sequence: Synthetic coding sequence
  source 1..1989: mol_type = other DNA
atggagagcaagaccgagaagtggatggagagaatccacctgaacgtgagcgagagacccttccccccccacatccagctgccccccgagatccaggagagccaggaggtgaccctgacctgcctgctgaacttcagctgctacggctaccccatccagctgcagtggctgctggagggcgtgcccatgagacaggccgccgtgaccagcaccagcctgaccatcaagagcgtgttcaccagaagcgagctgaagttcagcccccagtggagccaccacggcaagatcgtgacctgccagctgcaggacgccgacggcaagttcctgagcaacgacaccgtgcagctgaacgtgaagcacacccccaagctggagatcaaggtgacccccagcgacgccatcgtgagagagggcgacagcgtgaccatgacctgcgaggtgagcagcagcaaccccgagtacaccaccgtgagctggctgaaggacggcaccagcctgaagaagcagaacaccttcaccctgaacctgagagaggtgaccaaggaccagagcggcaagtactgctgccaggtgagcaacgacgtgggccccggcagaagcgaggaggtgttcctgcaggtgcagtacgcccccgagcccagcaccgtgcagatcctgcacagccccgccgtggagggcagccaggtggagttcctgtgcatgagcctggccaaccccctgcccaccaactacacctggtaccacaacggcaaggagatgcagggcagaaccgaggagaaggtgcacatccccaagatcctgccctggcacgccggcacctacagctgcgtggccgagaacatcctgggcaccggccagagaggccccggcgccgagctggacgtgcagtacccccccaagaaggtgaccaccgtgatccagaaccccatgcccatcagagagggcgacaccgtgaccctgagctgcaactacaacagcagcaaccccagcgtgaccagatacgagtggaagccccacggcgcctgggaggagcccagcctgggcgtgctgaagatccagaacgtgggctgggacaacaccaccatcgcctgcgccgcctgcaacagctggtgcagctgggccagccccgtggccctgaacgtgcagtacgcccccagagacgtgagagtgagaaagatcaagcccctgagcgagatccacagcggcaacagcgtgagcctgcagtgcgacttcagcagcagccaccccaaggaggtgcagttcttctgggagaagaacggcagactgctgggcaaggagagccagctgaacttcgacagcatcagccccgaggacgccggcagctacagctgctgggtgaacaacagcatcggccagaccgccagcaaggcctggaccctggaggtgctgtacgcccccagaagactgagagtgagcatgagccccggcgaccaggtgatggagggcaagagcgccaccctgacctgcgagagcgacgccaacccccccgtgagccactacacctggttcgactggaacaaccagagcctgccctaccacagccagaagctgagactggagcccgtgaaggtgcagcacagcggcgcctactggtgccagggcaccaacagcgtgggcaagggcagaagccccctgagcaccctgaccgtgtactacagccccgagaccatcggcagaagagtggccgtgggcctgggcagctgcctggccatcctgatcctggccatctgcggcctgaagctgcagagaagagacgccgagagcagcgagatgcagagacccccccccgactgcgacgacaccgtgacctacagcgccctgcacaagagacaggtgggcgactacgagaacgtgatccccgacttccccgaggacgagggcatccactacagcgagctgatccagttcggcgtgggcgagagaccccaggcccaggagaacgtggactacgtgatcctgaagcactag

SEQ ID NO: 9931 - DNA, 2013 bp, synthetic construct
  misc_feature 1..2013: note = Description of Artificial Sequence: Synthetic coding sequence
  source 1..2013: mol_type = other DNA
atgcacctgctgggcccctggctgctgctgctggtgctggagtacctggccttcagcgacagcagcaagtgggtgttcgagcaccccgagaccctgtacgcctgggagggcgcctgcgtgtggatcccctgcacctacagagccctggacggcgacctggagagcttcatcctgttccacaaccccgagtacaacaagaacaccagcaagttcgacggcaccagactgtacgagagcaccaaggacggcaaggtgcccagcgagcagaagagagtgcagttcctgggcgacaagaacaagaactgcaccctgagcatccaccccgtgcacctgaacgacagcggccagctgggcctgagaatggagagcaagaccgagaagtggatggagagaatccacctgaacgtgagcgagagacccttccccccccacatccagctgccccccgagatccaggagagccaggaggtgaccctgacctgcctgctgaacttcagctgctacggctaccccatccagctgcagtggctgctggagggcgtgcccatgagacaggccgccgtgaccagcaccagcctgaccatcaagagcgtgttcaccagaagcgagctgaagttcagcccccagtggagccaccacggcaagatcgtgacctgccagctgcaggacgccgacggcaagttcctgagcaacgacaccgtgcagctgaacgtgaagcacccccccaagaaggtgaccaccgtgatccagaaccccatgcccatcagagagggcgacaccgtgaccctgagctgcaactacaacagcagcaaccccagcgtgaccagatacgagtggaagccccacggcgcctgggaggagcccagcctgggcgtgctgaagatccagaacgtgggctgggacaacaccaccatcgcctgcgccgcctgcaacagctggtgcagctgggccagccccgtggccctgaacgtgcagtacgcccccagagacgtgagagtgagaaagatcaagcccctgagcgagatccacagcggcaacagcgtgagcctgcagtgcgacttcagcagcagccaccccaaggaggtgcagttcttctgggagaagaacggcagactgctgggcaaggagagccagctgaacttcgacagcatcagccccgaggacgccggcagctacagctgctgggtgaacaacagcatcggccagaccgccagcaaggcctggaccctggaggtgctgtacgcccccagaagactgagagtgagcatgagccccggcgaccaggtgatggagggcaagagcgccaccctgacctgcgagagcgacgccaacccccccgtgagccactacacctggttcgactggaacaaccagagcctgccctaccacagccagaagctgagactggagcccgtgaaggtgcagcacagcggcgcctactggtgccagggcaccaacagcgtgggcaagggcagaagccccctgagcaccctgaccgtgtactacagccccgagaccatcggcagaagagtggccgtgggcctgggcagctgcctggccatcctgatcctggccatctgcggcctgaagctgcagagaagatggaagagaacccagagccagcagggcctgcaggagaacagcagcggccagagcttcttcgtgagaaacaagaaggtgagaagagcccccctgagcgagggcccccacagcctgggctgctacaaccccatgatggaggacggcatcagctacaccaccctgagattccccgagatgaacatccccagaaccggcgacgccgagagcagcgagatgcagagacccccccccgactgcgacgacaccgtgacctacagcgccctgcacaagagacaggtgggcgactacgagaacgtgatccccgacttccccgaggacgagggcatccactacagcgagctgatccagttcggcgtgggcgagagaccccaggcccaggagaacgtggactacgtgatcctgaagcactag

SEQ ID NO: 9932 - DNA, 2028 bp, synthetic construct
  misc_feature 1..2028: note = Description of Artificial Sequence: Synthetic coding sequence
  source 1..2028: mol_type = other DNA
atgagcctgtggctgctggagggcgtgcccatgagacaggccgccgtgaccagcaccagcctgaccatcaagagcgtgttcaccagaagcgagctgaagttcagcccccagtggagccaccacggcaagatcgtgacctgccagctgcaggacgccgacggcaagttcctgagcaacgacaccgtgcagctgaacgtgaagcacacccccaagctggagatcaaggtgacccccagcgacgccatcgtgagagagggcgacagcgtgaccatgacctgcgaggtgagcagcagcaaccccgagtacaccaccgtgagctggctgaaggacggcaccagcctgaagaagcagaacaccttcaccctgaacctgagagaggtgaccaaggaccagagcggcaagtactgctgccaggtgagcaacgacgtgggccccggcagaagcgaggaggtgttcctgcaggtgcagtacgcccccgagcccagcaccgtgcagatcctgcacagccccgccgtggagggcagccaggtggagttcctgtgcatgagcctggccaaccccctgcccaccaactacacctggtaccacaacggcaaggagatgcagggcagaaccgaggagaaggtgcacatccccaagatcctgccctggcacgccggcacctacagctgcgtggccgagaacatcctgggcaccggccagagaggccccggcgccgagctggacgtgcagtacccccccaagaaggtgaccaccgtgatccagaaccccatgcccatcagagagggcgacaccgtgaccctgagctgcaactacaacagcagcaaccccagcgtgaccagatacgagtggaagccccacggcgcctgggaggagcccagcctgggcgtgctgaagatccagaacgtgggctgggacaacaccaccatcgcctgcgccgcctgcaacagctggtgcagctgggccagccccgtggccctgaacgtgcagtacgcccccagagacgtgagagtgagaaagatcaagcccctgagcgagatccacagcggcaacagcgtgagcctgcagtgcgacttcagcagcagccaccccaaggaggtgcagttcttctgggagaagaacggcagactgctgggcaaggagagccagctgaacttcgacagcatcagccccgaggacgccggcagctacagctgctgggtgaacaacagcatcggccagaccgccagcaaggcctggaccctggaggtgctgtacgcccccagaagactgagagtgagcatgagccccggcgaccaggtgatggagggcaagagcgccaccctgacctgcgagagcgacgccaacccccccgtgagccactacacctggttcgactggaacaaccagagcctgccctaccacagccagaagctgagactggagcccgtgaaggtgcagcacagcggcgcctactggtgccagggcaccaacagcgtgggcaagggcagaagccccctgagcaccctgaccgtgtactacagccccgagaccatcggcagaagagtggccgtgggcctgggcagctgcctggccatcctgatcctggccatctgcggcctgaagctgcagagaagatggaagagaacccagagccagcagggcctgcaggagaacagcagcggccagagcttcttcgtgagaaacaagaaggtgagaagagcccccctgagcgagggcccccacagcctgggctgctacaaccccatgatggaggacggcatcagctacaccaccctgagattccccgagatgaacatccccagaaccggcgacgccgagagcagcgagatgcagagacccccccccgactgcgacgacaccgtgacctacagcgccctgcacaagagacaggtgggcgactacgagaacgtgatccccgacttccccgaggacgagggcatccactacagcgagctgatccagttcggcgtgggcgagagaccccaggcccaggagaacgtggactacgtgatcctgaagcactag

SEQ ID NO: 9933 - DNA, 2280 bp, synthetic construct
  misc_feature 1..2280: note = Description of Artificial Sequence: Synthetic coding sequence
  source 1..2280: mol_type = other DNA
atgcacctgctgggcccctggctgctgctgctggtgctggagtacctggccttcagcgacagcagcaagtgggtgttcgagcaccccgagaccctgtacgcctgggagggcgcctgcgtgtggatcccctgcacctacagagccctggacggcgacctggagagcttcatcctgttccacaaccccgagtacaacaagaacaccagcaagttcgacggcaccagactgtacgagagcaccaaggacggcaaggtgcccagcgagcagaagagagtgcagttcctgggcgacaagaacaagaactgcaccctgagcatccaccccgtgcacctgaacgacagcggccagctgggcctgagaatggagagcaagaccgagaagtggatggagagaatccacctgaacgtgagcgagagacccttccccccccacatccagctgccccccgagatccaggagagccaggaggtgaccctgacctgcctgctgaacttcagctgctacggctaccccatccagctgcagtggctgctggagggcgtgcccatgagacaggccgccgtgaccagcaccagcctgaccatcaagagcgtgttcaccagaagcgagctgaagttcagcccccagtggagccaccacggcaagatcgtgacctgccagctgcaggacgccgacggcaagttcctgagcaacgacaccgtgcagctgaacgtgaagcacacccccaagctggagatcaaggtgacccccagcgacgccatcgtgagagagggcgacagcgtgaccatgacctgcgaggtgagcagcagcaaccccgagtacaccaccgtgagctggctgaaggacggcaccagcctgaagaagcagaacaccttcaccctgaacctgagagaggtgaccaaggaccagagcggcaagtactgctgccaggtgagcaacgacgtgggccccggcagaagcgaggaggtgttcctgcaggtgcagtacccccccaagaaggtgaccaccgtgatccagaaccccatgcccatcagagagggcgacaccgtgaccctgagctgcaactacaacagcagcaaccccagcgtgaccagatacgagtggaagccccacggcgcctgggaggagcccagcctgggcgtgctgaagatccagaacgtgggctgggacaacaccaccatcgcctgcgccgcctgcaacagctggtgcagctgggccagccccgtggccctgaacgtgcagtacgcccccagagacgtgagagtgagaaagatcaagcccctgagcgagatccacagcggcaacagcgtgagcctgcagtgcgacttcagcagcagccaccccaaggaggtgcagttcttctgggagaagaacggcagactgctgggcaaggagagccagctgaacttcgacagcatcagccccgaggacgccggcagctacagctgctgggtgaacaacagcatcggccagaccgccagcaaggcctggaccctggaggtgctgtacgcccccagaagactgagagtgagcatgagccccggcgaccaggtgatggagggcaagagcgccaccctgacctgcgagagcgacgccaacccccccgtgagccactacacctggttcgactggaacaaccagagcctgccctaccacagccagaagctgagactggagcccgtgaaggtgcagcacagcggcgcctactggtgccagggcaccaacagcgtgggcaagggcagaagccccctgagcaccctgaccgtgtactacagccccgagaccatcggcagaagagtggccgtgggcctgggcagctgcctggccatcctgatcctggccatctgcggcctgaagctgcagagaagatggaagagaacccagagccagcagggcctgcaggagaacagcagcggccagagcttcttcgtgagaaacaagaaggtgagaagagcccccctgagcgagggcccccacagcctgggctgctacaaccccatgatggaggacggcatcagctacaccaccctgagattccccgagatgaacatccccagaaccggcgacgccgagagcagcgagatgcagagacccccccccgactgcgacgacaccgtgacctacagcgccctgcacaagagacaggtgggcgactacgagaacgtgatccccgacttccccgaggacgagggcatccactacagcgagctgatccagttcggcgtgggcgagagaccccaggcccaggagaacgtggactacgtgatcctgaagcactag

SEQ ID NO: 9934 - DNA, 2256 bp, synthetic construct
  misc_feature 1..2256: note = Description of Artificial Sequence: Synthetic coding sequence
  source 1..2256: mol_type = other DNA
atgcacctgctgggcccctggctgctgctgctggtgctggagtacctggccttcagcgacagcagcaagtgggtgttcgagcaccccgagaccctgtacgcctgggagggcgcctgcgtgtggatcccctgcacctacagagccctggacggcgacctggagagcttcatcctgttccacaaccccgagtacaacaagaacaccagcaagttcgacggcaccagactgtacgagagcaccaaggacggcaaggtgcccagcgagcagaagagagtgcagttcctgggcgacaagaacaagaactgcaccctgagcatccaccccgtgcacctgaacgacagcggccagctgggcctgagaatggagagcaagaccgagaagtggatggagagaatccacctgaacgtgagcgagagacccttccccccccacatccagctgccccccgagatccaggagagccaggaggtgaccctgacctgcctgctgaacttcagctgctacggctaccccatccagctgcagtggctgctggagggcgtgcccatgagacaggccgccgtgaccagcaccagcctgaccatcaagagcgtgttcaccagaagcgagctgaagttcagcccccagtggagccaccacggcaagatcgtgacctgccagctgcaggacgccgacggcaagttcctgagcaacgacaccgtgcagctgaacgtgaagcacacccccaagctggagatcaaggtgacccccagcgacgccatcgtgagagagggcgacagcgtgaccatgacctgcgaggtgagcagcagcaaccccgagtacaccaccgtgagctggctgaaggacggcaccagcctgaagaagcagaacaccttcaccctgaacctgagagaggtgaccaaggaccagagcggcaagtactgctgccaggtgagcaacgacgtgggccccggcagaagcgaggaggtgttcctgcaggtgcagtacgcccccgagcccagcaccgtgcagatcctgcacagccccgccgtggagggcagccaggtggagttcctgtgcatgagcctggccaaccccctgcccaccaactacacctggtaccacaacggcaaggagatgcagggcagaaccgaggagaaggtgcacatccccaagatcctgccctggcacgccggcacctacagctgcgtggccgagaacatcctgggcaccggccagagaggccccggcgccgagctggacgtgcagtacccccccaagaaggtgaccaccgtgatccagaaccccatgcccatcagagagggcgacaccgtgaccctgagctgcaactacaacagcagcaaccccagcgtgaccagatacgagtggaagccccacggcgcctgggaggagcccagcctgggcgtgctgaagatccagaacgtgggctgggacaacaccaccatcgcctgcgccgcctgcaacagctggtgcagctgggccagccccgtggccctgaacgtgcagtacgcccccagagacgtgagagtgagaaagatcaagcccctgagcgagatccacagcggcaacagcgtgagcctgcagtgcgacttcagcagcagccaccccaaggaggtgcagttcttctgggagaagaacggcagactgctgggcaaggagagccagctgaacttcgacagcatcagccccgaggacgccggcagctacagctgctgggtgaacaacagcatcggccagaccgccagcaaggcctggaccctggaggtgctgtacgcccccagaagactgagagtgagcatgagccccggcgaccaggtgatggagggcaagagcgccaccctgacctgcgagagcgacgccaacccccccgtgagccactacacctggttcgactggaacaaccagagcctgccctaccacagccagaagctgagactggagcccgtgaaggtgcagcacagcggcgcctactggtgccagggcaccaacagcgtgggcaagggcagaagccccctgagcaccctgaccgtgtactacagccccgagaccatcggcagaagagtggccgtgggcctgggcagctgcctggccatcctgatcctggccatctgcggcctgaagctgcagagaagatggaagagaacccagagccagcagggcctgcaggagaacagcagcggccagagcttcttcgtgagaaacaagaagagatgcagagtgctgagagacgccgagaccagccccggcctgagatag

SEQ ID NO: 9935 - DNA, 783 bp, synthetic construct
  misc_feature 1..783: note = Description of Artificial Sequence: Synthetic coding sequence
  source 1..783: mol_type = other DNA
atggccagaccccacccctggtggctgtgcgtgctgggcaccctggtgggcctgagcgccacccccgcccccaagagctgccccgagagacactactgggcccagggcaagctgtgctgccagatgtgcgagcccggcaccttcctggtgaaggactgcgaccagcacagaaaggccgcccagtgcgacccctgcatccccggcgtgagcttcagccccgaccaccacaccagaccccactgcgagagctgcagacactgcaacagcggcctgctggtgagaaactgcaccatcaccgccaacgccgagtgcgcctgcagaaacggctggcagtgcagagacaaggagtgcaccgagtgcgaccccctgcccaaccccagcctgaccgccagaagcagccaggccctgagcccccacccccagcccacccacctgccctacgtgagcgagatgctggaggccagaaccgccggccacatgcagaccctggccgacttcagacagctgcccgccagaaccctgagcacccactggcccccccagagaagcctgtgcagcagcgacttcatcagaatcctggtgatcttcagcggcatgttcctggtgttcaccctggccggcgccctgttcctgcaccagagaagaaagtacagaagcaacaagggcgagagccccgtggagcccgccgagccctgccactacagctgccccagagaggaggagggcagcaccatccccatccaggaggactacagaaagcccgagcccgcctgcagcccctag

SEQ ID NO: 9936 - DNA, 1158 bp, synthetic construct
  misc_feature 1..1158: note = Description of Artificial Sequence: Synthetic coding sequence
  source 1..1158: mol_type = other DNA
atgctggtgagaagaggcgccagagccggccccagaatgcccagaggctggaccgccctgtgcctgctgagcctgctgcccagcggcttcatgagcctggacaacaacggcaccgccacccccgagctgcccacccagggcaccttcagcaacgtgagcaccaacgtgagctaccaggagaccaccacccccagcaccctgggcagcaccagcctgcaccccgtgagccagcacggcaacgaggccaccaccaacatcaccgagaccaccgtgaagttcaccagcaccagcgtgatcaccagcgtgtacggcaacaccaacagcagcgtgcagagccagaccagcgtgatcagcaccgtgttcaccacccccgccaacgtgagcacccccgagaccaccctgaagcccagcctgagccccggcaacgtgagcgacctgagcaccaccagcaccagcctggccaccagccccaccaagccctacaccagcagcagccccatcctgagcgacatcaaggccgagatcaagtgcagcggcatcagagaggtgaagctgacccagggcatctgcctggagcagaacaagaccagcagctgcgccgagttcaagaaggacagaggcgagggcctggccagagtgctgtgcggcgaggagcaggccgacgccgacgccggcgcccaggtgtgcagcctgctgctggcccagagcgaggtgagaccccagtgcctgctgctggtgctggccaacagaaccgagatcagcagcaagctgcagctgatgaagaagcaccagagcgacctgaagaagctgggcatcctggacttcaccgagcaggacgtggccagccaccagagctacagccagaagaccctgatcgccctggtgaccagcggcgccctgctggccgtgctgggcatcaccggctacttcctgatgaacagaagaagctggagccccaccggcgagagactgggcgaggacccctactacaccgagaacggcggcggccagggctacagcagcggccccggcaccagccccgaggcccagggcaaggccagcgtgaacagaggcgcccaggagaacggcaccggccaggccaccagcagaaacggccacagcgccagacagcacgtggtggccgacaccgagctgtag

SEQ ID NO: 9937 - DNA, 987 bp, synthetic construct
  misc_feature 1..987: note = Description of Artificial Sequence: Synthetic coding sequence
  source 1..987: mol_type = other DNA
atgctggtgagaagaggcgccagagccggccccagaatgcccagaggctggaccgccctgtgcctgctgagcctgctgcccagcggcttcatgagcctggacaacaacggcaccgccacccccgagctgcccacccagggcaccttcagcaacgtgagcaccaacgtgagctaccaggagaccaccacccccagcaccctgggcagcaccagcctgcaccccgtgagccagcacggcaacgaggccaccaccaacatcaccgagaccaccgtgaagttcaccagcaccagcgtgatcaccagcgtgtacggcaacaccaacagcagcgtgcagagccagaccagcgtgatcagcaccgtgttcaccacccccgccaacgtgagcacccccgagaccaccctgaagcccagcctgagccccggcaacgtgagcgacctgagcaccaccagcaccagcctggccaccagccccaccaagccctacaccagcagcagccccatcctgagcgacatcaaggccgagatcaagtgcagcggcatcagagaggtgaagctgacccagggcatctgcctggagcagaacaagaccagcagctgcgccgagttcaagaaggacagaggcgagggcctggccagagtgctgtgcggcgaggagcaggccgacgccgacgccggcgcccaggtgtgcagcctgctgctggcccagagcgaggtgagaccccagtgcctgctgctggtgctggccaacagaaccgagatcagcagcaagctgcagctgatgaagaagcaccagagcgacctgaagaagctgggcatcctggacttcaccgagcaggacgtggccagccaccagagctacagccagaagaccctgatcgccctggtgaccagcggcgccctgctggccgtgctgggcatcaccggctacttcctgatgaacagaagaagctggagccccaccggcgagagactggagctggagccctag

SEQ ID NO: 9938 - DNA, 684 bp, synthetic construct
  misc_feature 1..684: note = Description of Artificial Sequence: Synthetic coding sequence
  source 1..684: mol_type = other DNA
atggacttcggccccggcagactgttcagattcttcagctactgcgtggtggcccacatccagctggccgtgttcttcttcagcgtgggcatcctggagaccagaatcctgctggccgacggcgccgagttcaagaaggacagaggcgagggcctggccagagtgctgtgcggcgaggagcaggccgacgccgacgccggcgcccaggtgtgcagcctgctgctggcccagagcgaggtgagaccccagtgcctgctgctggtgctggccaacagaaccgagatcagcagcaagctgcagctgatgaagaagcaccagagcgacctgaagaagctgggcatcctggacttcaccgagcaggacgtggccagccaccagagctacagccagaagaccctgatcgccctggtgaccagcggcgccctgctggccgtgctgggcatcaccggctacttcctgatgaacagaagaagctggagccccaccggcgagagactgggcgaggacccctactacaccgagaacggcggcggccagggctacagcagcggccccggcaccagccccgaggcccagggcaaggccagcgtgaacagaggcgcccaggagaacggcaccggccaggccaccagcagaaacggccacagcgccagacagcacgtggtggccgacaccgagctgtag

SEQ ID NO: 9939 - DNA, 1068 bp, synthetic construct
  misc_feature 1..1068: note = Description of Artificial Sequence: Synthetic coding sequence
  source 1..1068: mol_type = other DNA
atgagcctggacaacaacggcaccgccacccccgagctgcccacccagggcaccttcagcaacgtgagcaccaacgtgagctaccaggagaccaccacccccagcaccctgggcagcaccagcctgcaccccgtgagccagcacggcaacgaggccaccaccaacatcaccgagaccaccgtgaagttcaccagcaccagcgtgatcaccagcgtgtacggcaacaccaacagcagcgtgcagagccagaccagcgtgatcagcaccgtgttcaccacccccgccaacgtgagcacccccgagaccaccctgaagcccagcctgagccccggcaacgtgagcgacctgagcaccaccagcaccagcctggccaccagccccaccaagccctacaccagcagcagccccatcctgagcgacatcaaggccgagatcaagtgcagcggcatcagagaggtgaagctgacccagggcatctgcctggagcagaacaagaccagcagctgcgccgagttcaagaaggacagaggcgagggcctggccagagtgctgtgcggcgaggagcaggccgacgccgacgccggcgcccaggtgtgcagcctgctgctggcccagagcgaggtgagaccccagtgcctgctgctggtgctggccaacagaaccgagatcagcagcaagctgcagctgatgaagaagcaccagagcgacctgaagaagctgggcatcctggacttcaccgagcaggacgtggccagccaccagagctacagccagaagaccctgatcgccctggtgaccagcggcgccctgctggccgtgctgggcatcaccggctacttcctgatgaacagaagaagctggagccccaccggcgagagactgggcgaggacccctactacaccgagaacggcggcggccagggctacagcagcggccccggcaccagccccgaggcccagggcaaggccagcgtgaacagaggcgcccaggagaacggcaccggccaggccaccagcagaaacggccacagcgccagacagcacgtggtggccgacaccgagctgtag

SEQ ID NO: 9940 - DNA, 753 bp, synthetic construct
  misc_feature 1..753: note = Description of Artificial Sequence: Synthetic coding sequence
  source 1..753: mol_type = other DNA
atgttcctgcagatgtaccccaccaagaagctgcagcacctggtgcccctggaggtgcccgcctgcaccctgtgcctgaacatggccatgagaccccagcagaccagccaggccgagatcaagtgcagcggcatcagagaggtgaagctgacccagggcatctgcctggagcagaacaagaccagcagctgcgccgagttcaagaaggacagaggcgagggcctggccagagtgctgtgcggcgaggagcaggccgacgccgacgccggcgcccaggtgtgcagcctgctgctggcccagagcgaggtgagaccccagtgcctgctgctggtgctggccaacagaaccgagatcagcagcaagctgcagctgatgaagaagcaccagagcgacctgaagaagctgggcatcctggacttcaccgagcaggacgtggccagccaccagagctacagccagaagaccctgatcgccctggtgaccagcggcgccctgctggccgtgctgggcatcaccggctacttcctgatgaacagaagaagctggagccccaccggcgagagactgggcgaggacccctactacaccgagaacggcggcggccagggctacagcagcggccccggcaccagccccgaggcccagggcaaggccagcgtgaacagaggcgcccaggagaacggcaccggccaggccaccagcagaaacggccacagcgccagacagcacgtggtggccgacaccgagctgtag

SEQ ID NO: 9941 - DNA, 516 bp, synthetic construct
  misc_feature 1..516: note = Description of Artificial Sequence: Synthetic coding sequence
  source 1..516: mol_type = other DNA
atggagcacagcaccttcctgagcggcctggtgctggccaccctgctgagccaggtgagccccttcaagatccccatcgaggagctggaggacagagtgttcgtgaactgcaacaccagcatcacctgggtggagggcaccgtgggcaccctgctgagcgacatcaccagactggacctgggcaagagaatcctggaccccagaggcatctacagatgcaacggcaccgacatctacaaggacaaggagagcaccgtgcaggtgcactacagaatgtgccagagctgcgtggagctggaccccgccaccgtggccggcatcatcgtgaccgacgtgatcgccaccctgctgctggccctgggcgtgttctgcttcgccggccacgagaccggcagactgagcggcgccgccgacacccaggccctgctgagaaacgaccaggtgtaccagcccctgagagacagagacgacgcccagtacagccacctgggcggcaactgggccagaaacaagtag

SEQ ID NO: 9942 - DNA, 384 bp, synthetic construct
  misc_feature 1..384: note = Description of Artificial Sequence: Synthetic coding sequence
  source 1..384: mol_type = other DNA
atggagcacagcaccttcctgagcggcctggtgctggccaccctgctgagccaggtgagccccttcaagatccccatcgaggagctggaggacagagtgttcgtgaactgcaacaccagcatcacctgggtggagggcaccgtgggcaccctgctgagcgacatcaccagactggacctgggcaagagaatcctggaccccagaggcatctacagatgcaacggcaccgacatctacaaggacaaggagagcaccgtgcaggtgcactacagaaccgccgacacccaggccctgctgagaaacgaccaggtgtaccagcccctgagagacagagacgacgcccagtacagccacctgggcggcaactgggccagaaacaagtag

SEQ ID NO: 9943 - DNA, 1377 bp, synthetic construct
  misc_feature 1..1377: note = Description of Artificial Sequence: Synthetic coding sequence
  source 1..1377: mol_type = other DNA
atgaacagaggcgtgcccttcagacacctgctgctggtgctgcagctggccctgctgcccgccgccacccagggcaagaaggtggtgctgggcaagaagggcgacaccgtggagctgacctgcaccgccagccagaagaagagcatccagttccactggaagaacagcaaccagatcaagatcctgggcaaccagggcagcttcctgaccaagggccccagcaagctgaacgacagagccgacagcagaagaagcctgtgggaccagggcaacttccccctgatcatcaagaacctgaagatcgaggacagcgacacctacatctgcgaggtggaggaccagaaggaggaggtgcagctgctggtgttcggcctgaccgccaacagcgacacccacctgctgcagggccagagcctgaccctgaccctggagagcccccccggcagcagccccagcgtgcagtgcagaagccccagaggcaagaacatccagggcggcaagaccctgagcgtgagccagctggagctgcaggacagcggcacctggacctgcaccgtgctgcagaaccagaagaaggtggagttcaagatcgacatcgtggtgctggccttccagaaggccagcagcatcgtgtacaagaaggagggcgagcaggtggagttcagcttccccctggccttcaccgtggagaagctgaccggcagcggcgagctgtggtggcaggccgagagagccagcagcagcaagagctggatcaccttcgacctgaagaacaaggaggtgagcgtgaagagagtgacccaggaccccaagctgcagatgggcaagaagctgcccctgcacctgaccctgccccaggccctgccccagtacgccggcagcggcaacctgaccctggccctggaggccaagaccggcaagctgcaccaggaggtgaacctggtggtgatgagagccacccagctgcagaagaacctgacctgcgaggtgtggggccccaccagccccaagctgatgctgagcctgaagctggagaacaaggaggccaaggtgagcaagagagagaaggccgtgtgggtgctgaaccccgaggccggcatgtggcagtgcctgctgagcgacagcggccaggtgctgctggagagcaacatcaaggtgctgcccacctggagcacccccgtgcagcccatggccctgatcgtgctgggcggcgtggccggcctgctgctgttcatcggcctgggcatcttcttctgcgtgagatgcagacacagaagaagacaggccgagagaatgagccagatcaagagactgctgagcgagaagaagacctgccagtgcccccacagattccagaagacctgcagccccatctag

SEQ ID NO: 9944 - DNA, 723 bp, synthetic construct
  misc_feature 1..723: note = Description of Artificial Sequence: Synthetic coding sequence
  source 1..723: mol_type = other DNA
atgatcgagacctacaaccagaccagccccagaagcgccgccaccggcctgcccatcagcatgaagatcttcatgtacctgctgaccgtgttcctgatcacccagatgatcggcagcgccctgttcgccgtgtacctgcacagaagactggacaagatcgaggacgagagaaacctgcacgaggacttcgtgttcatgaagaccatccagagatgcaacaccggcgagagaagcctgagcctgctgaactgcgaggagatcaagagccagttcgagggcttcgtgaaggacatcatgctgaacaaggaggagaccaagaaggagaacagcttcgagatgcagaaggtgctgcagtgggccgagaagggctactacaccatgagcaacaacctggtgaccctggagaacggcaagcagctgaccgtgaagagacagggcctgtactacatctacgcccaggtgaccttctgcagcaacagagaggccagcagccaggcccccttcatcgccagcctgtgcctgaagagccccggcagattcgagagaatcctgctgagagccgccaacacccacagcagcgccaagccctgcggccagcagagcatccacctgggcggcgtgttcgagctgcagcccggcgccagcgtgttcgtgaacgtgaccgaccccagccaggtgagccacggcaccggcttcaccagcttcggcctgctgaagctgtag

SEQ ID NO: 9945 - DNA, 786 bp, synthetic construct
  misc_feature 1..786: note = Description of Artificial Sequence: Synthetic coding sequence
  source 1..786: mol_type = other DNA
atgatcgagacctacaaccagaccagccccagaagcgccgccaccggcctgcccatcagcatgaagatcttcatgtacctgctgaccgtgttcctgatcacccagatgatcggcagcgccctgttcgccgtgtacctgcacagaagactggacaagatcgaggacgagagaaacctgcacgaggacttcgtgttcatgaagaccatccagagatgcaacaccggcgagagaagcctgagcctgctgaactgcgaggagatcaagagccagttcgagggcttcgtgaaggacatcatgctgaacaaggaggagaccaagaaggagaacagcttcgagatgcagaagggcgaccagaacccccagatcgccgcccacgtgatcagcgaggccagcagcaagaccaccagcgtgctgcagtgggccgagaagggctactacaccatgagcaacaacctggtgaccctggagaacggcaagcagctgaccgtgaagagacagggcctgtactacatctacgcccaggtgaccttctgcagcaacagagaggccagcagccaggcccccttcatcgccagcctgtgcctgaagagccccggcagattcgagagaatcctgctgagagccgccaacacccacagcagcgccaagccctgcggccagcagagcatccacctgggcggcgtgttcgagctgcagcccggcgccagcgtgttcgtgaacgtgaccgaccccagccaggtgagccacggcaccggcttcaccagcttcggcctgctgaagctgtag

SEQ ID NO: 9946 - DNA, 612 bp, synthetic construct
  misc_feature 1..612: note = Description of Artificial Sequence: Synthetic coding sequence
  source 1..612: mol_type = other DNA
atggtgagactgcccctgcagtgcgtgctgtggggctgcctgctgaccgccgtgcaccccgagccccccaccgcctgcagagagaagcagtacctgatcaacagccagtgctgcagcctgtgccagcccggccagaagctggtgagcgactgcaccgagttcaccgagaccgagtgcctgccctgcggcgagagcgagttcctggacacctggaacagagagacccactgccaccagcacaagtactgcgaccccaacctgggcctgagagtgcagcagaagggcaccagcgagaccgacaccatctgcacctgcgaggagggctggcactgcaccagcgaggcctgcgagagctgcgtgctgcacagaagctgcagccccggcttcggcgtgaagcagatcgccaccggcgtgagcgacaccatctgcgagccctgccccgtgggcttcttcagcaacgtgagcagcgccttcgagaagtgccacccctggaccagaagccccggcagcgccgagagccccggcggcgacccccaccacctgagagaccccgtgtgccaccccctgggcgccggcctgtaccagaagggcggccaggaggccaaccagtag

SEQ ID NO: 9947 - DNA, 786 bp, synthetic construct
  misc_feature 1..786: note = Description of Artificial Sequence: Synthetic coding sequence
  source 1..786: mol_type = other DNA
ggcagaagccccctgagaaccagagacagagtgctgaccaactgggaggacggcctgaccgtggcctacggcgccgtgaagctgatccagagcctgagcctgcagcccgtgggctggcagcagaactggggcctgagcagcccccccaccatgctgctgcccagcagagcccagagccccaccgagctgcccctggcccccctggccgagcccaacaccggctgcagcagcctgctgagctggcacagcaccagaggcgagctgcacctgtgggccctgggcctgggccagatgggcggcagcaagtgcggcagccccctgagccccctggcccccaccctggaggccctgagaagaccctggtgcggccagcagggcgccggcggcaccagaggcatcagcaccgacccccccagcggcaagggcggcagagcctggggcagagaccccctgcccagagagggcctgctgagaggcaccgccgcccccgccgccggcggcgacctgaccccctgcctgagcagaccccccacccccagcagaaaccccagaagaagcatcttccccaccatcttcctggcccccaccctgctgctgcagtgcagaagactgtacatggacgccaacagaagccccagaagaatggccaagagagtggccagccagtgcagaagagacagcgaggccgcccccacccaggagtgcggccacgtgggcaagcaggccgtgggccagagagcctggtgctgctgctgctgcggcgtgagagtgagaggctggcactag

SEQ ID NO: 9948 - DNA, 834 bp, synthetic construct
  misc_feature 1..834: note = Description of Artificial Sequence: Synthetic coding sequence
  source 1..834: mol_type = other DNA
atggtgagactgcccctgcagtgcgtgctgtggggctgcctgctgaccgccgtgcaccccgagccccccaccgcctgcagagagaagcagtacctgatcaacagccagtgctgcagcctgtgccagcccggccagaagctggtgagcgactgcaccgagttcaccgagaccgagtgcctgccctgcggcgagagcgagttcctggacacctggaacagagagacccactgccaccagcacaagtactgcgaccccaacctgggcctgagagtgcagcagaagggcaccagcgagaccgacaccatctgcacctgcgaggagggctggcactgcaccagcgaggcctgcgagagctgcgtgctgcacagaagctgcagccccggcttcggcgtgaagcagatcgccaccggcgtgagcgacaccatctgcgagccctgccccgtgggcttcttcagcaacgtgagcagcgccttcgagaagtgccacccctggaccagctgcgagaccaaggacctggtggtgcagcaggccggcaccaacaagaccgacgtggtgtgcggcccccaggacagactgagagccctggtggtgatccccatcatcttcggcatcctgttcgccatcctgctggtgctggtgttcatcaagaaggtggccaagaagcccaccaacaaggccccccaccccaagcaggagccccaggagatcaacttccccgacgacctgcccggcagcaacaccgccgcccccgtgcaggagaccctgcacggctgccagcccgtgacccaggaggacggcaaggagagcagaatcagcgtgcaggagagacagtag

SEQ ID NO: 9949 - DNA, 1086 bp, synthetic construct
  misc_feature 1..1086: note = Description of Artificial Sequence: Synthetic coding sequence
  source 1..1086: mol_type = other DNA
atggacaagttctggtggcacgccgcctggggcctgtgcctggtgcccctgagcctggcccagatcgacctgaacatcacctgcagattcgccggcgtgttccacgtggagaagaacggcagatacagcatcagcagaaccgaggccgccgacctgtgcaaggccttcaacagcaccctgcccaccatggcccagatggagaaggccctgagcatcggcttcgagacctgcagatacggcttcatcgagggccacgtggtgatccccagaatccaccccaacagcatctgcgccgccaacaacaccggcgtgtacatcctgaccagcaacaccagccagtacgacacctactgcttcaacgccagcgccccccccgaggaggactgcaccagcgtgaccgacctgcccaacgccttcgacggccccatcaccatcaccatcgtgaacagagacggcaccagatacgtgcagaagggcgagtacagaaccaaccccgaggacatctaccccagcaaccccaccgacgacgacgtgagcagcggcagcagcagcgagagaagcagcaccagcggcggctacatcttctacaccttcagcaccgtgcaccccatccccgacgaggacagcccctggatcaccgacagcaccgacagaatccccgccaccagagaccaggacaccttccaccccagcggcggcagccacaccacccacggcagcgagagcgacggccacagccacggcagccaggagggcggcgccaacaccaccagcggccccatcagaaccccccagatccccgagtggctgatcatcctggccagcctgctggccctggccctgatcctggccgtgtgcatcgccgtgaacagcagaagaagatgcggccagaagaagaagctggtgatcaacagcggcaacggcgccgtggaggacagaaagcccagcggcctgaacggcgaggccagcaagagccaggagatggtgcacctggtgaacaaggagagcagcgagacccccgaccagttcatgaccgccgacgagaccagaaacctgcagaacgtggacatgaagatcggcgtgtag

SEQ ID NO: 9950 - DNA, 420 bp, synthetic construct
  misc_feature 1..420: note = Description of Artificial Sequence: Synthetic coding sequence
  source 1..420: mol_type = other DNA
atggacaagttctggtggcacgccgcctggggcctgtgcctggtgcccctgagcctggcccagatcgacctgaacatcacctgcagattcgccggcgtgttccacgtggagaagaacggcagatacagcatcagcagaaccgaggccgccgacctgtgcaaggccttcaacagcaccctgcccaccatggcccagatggagaaggccctgagcatcggcttcgagacctgcagcctgcactgcagccagcagagcaagaaggtgtgggccgaggagaaggccagcgaccagcagtggcagtggagctgcggcggccagaaggccaagtggacccagagaagaggccagcaggtgagcggcaacggcgccttcggcgagcagggcgtggtgagaaacagcagacccgtgtacgacagctag

SEQ ID NO: 9951 - DNA, 1023 bp, synthetic construct
  misc_feature 1..1023: note = Description of Artificial Sequence: Synthetic coding sequence
  source 1..1023: mol_type = other DNA
atggacaagttctggtggcacgccgcctggggcctgtgcctggtgcccctgagcctggcccagatcgacctgaacatcacctgcagattcgccggcgtgttccacgtggagaagaacggcagatacagcatcagcagaaccgaggccgccgacctgtgcaaggccttcaacagcaccctgcccaccatggcccagatggagaaggccctgagcatcggcttcgagacctgcagatacggcttcatcgagggccacgtggtgatccccagaatccaccccaacagcatctgcgccgccaacaacaccggcgtgtacatcctgaccagcaacaccagccagtacgacacctactgcttcaacgccagcgccccccccgaggaggactgcaccagcgtgaccgacctgcccaacgccttcgacggccccatcaccatcaccatcgtgaacagagacggcaccagatacgtgcagaagggcgagtacagaaccaaccccgaggacatctaccccagcaaccccaccgacgacgacgtgagcagcggcagcagcagcgagagaagcagcaccagcggcggctacatcttctacaccttcagcaccgtgcaccccatccccgacgaggacagcccctggatcaccgacagcaccgacagaatccccgccaccagacacagccacggcagccaggagggcggcgccaacaccaccagcggccccatcagaaccccccagatccccgagtggctgatcatcctggccagcctgctggccctggccctgatcctggccgtgtgcatcgccgtgaacagcagaagaagatgcggccagaagaagaagctggtgatcaacagcggcaacggcgccgtggaggacagaaagcccagcggcctgaacggcgaggccagcaagagccaggagatggtgcacctggtgaacaaggagagcagcgagacccccgaccagttcatgaccgccgacgagaccagaaacctgcagaacgtggacatgaagatcggcgtgtag

SEQ ID NO: 9952 - DNA, 1191 bp, synthetic construct
  misc_feature 1..1191: note = Description of Artificial Sequence: Synthetic coding sequence
  source 1..1191: mol_type = other DNA
atggacaagttctggtggcacgccgcctggggcctgtgcctggtgcccctgagcctggcccagatcgacctgaacatcacctgcagattcgccggcgtgttccacgtggagaagaacggcagatacagcatcagcagaaccgaggccgccgacctgtgcaaggccttcaacagcaccctgcccaccatggcccagatggagaaggccctgagcatcggcttcgagacctgcagatacggcttcatcgagggccacgtggtgatccccagaatccaccccaacagcatctgcgccgccaacaacaccggcgtgtacatcctgaccagcaacaccagccagtacgacacctactgcttcaacgccagcgccccccccgaggaggactgcaccagcgtgaccgacctgcccaacgccttcgacggccccatcaccatcaccatcgtgaacagagacggcaccagatacgtgcagaagggcgagtacagaaccaaccccgaggacatctaccccagcaaccccaccgacgacgacgtgagcagcggcagcagcagcgagagaagcagcaccagcggcggctacatcttctacaccttcagcaccgtgcaccccatccccgacgaggacagcccctggatcaccgacagcaccgacagaatccccgccaccaacatggacagcagccacagcatcaccctgcagcccaccgccaaccccaacaccggcctggtggaggacctggacagaaccggccccctgagcatgaccaccagaagagaccaggacaccttccaccccagcggcggcagccacaccacccacggcagcgagagcgacggccacagccacggcagccaggagggcggcgccaacaccaccagcggccccatcagaaccccccagatccccgagtggctgatcatcctggccagcctgctggccctggccctgatcctggccgtgtgcatcgccgtgaacagcagaagaagatgcggccagaagaagaagctggtgatcaacagcggcaacggcgccgtggaggacagaaagcccagcggcctgaacggcgaggccagcaagagccaggagatggtgcacctggtgaacaaggagagcagcgagacccccgaccagttcatgaccgccgacgagaccagaaacctgcagaacgtggacatgaagatcggcgtgtag

SEQ ID NO: 9953 - DNA, 2100 bp, synthetic construct
  misc_feature 1..2100: note = Description of Artificial Sequence: Synthetic coding sequence
  source 1..2100: mol_type = other DNA
atggacaagttctggtggcacgccgcctggggcctgtgcctggtgcccctgagcctggcccagatcgacctgaacatcacctgcagattcgccggcgtgttccacgtggagaagaacggcagatacagcatcagcagaaccgaggccgccgacctgtgcaaggccttcaacagcaccctgcccaccatggcccagatggagaaggccctgagcatcggcttcgagacctgcagatacggcttcatcgagggccacgtggtgatccccagaatccaccccaacagcatctgcgccgccaacaacaccggcgtgtacatcctgaccagcaacaccagccagtacgacacctactgcttcaacgccagcgccccccccgaggaggactgcaccagcgtgaccgacctgcccaacgccttcgacggccccatcaccatcaccatcgtgaacagagacggcaccagatacgtgcagaagggcgagtacagaaccaaccccgaggacatctaccccagcaaccccaccgacgacgacgtgagcagcggcagcagcagcgagagaagcagcaccagcggcggctacatcttctacaccttcagcaccgtgcaccccatccccgacgaggacagcccctggatcaccgacagcaccgacagaatccccgccaccagcaccagcagcaacaccatcagcgccggctgggagcccaacgaggagaacgaggacgagagagacagacacctgagcttcagcggcagcggcatcgacgacgacgaggacttcatcagcagcaccatcagcaccacccccagagccttcgaccacaccaagcagaaccaggactggacccagtggaaccccagccacagcaaccccgaggtgctgctgcagaccaccaccagaatgaccgacgtggacagaaacggcaccaccgcctacgagggcaactggaaccccgaggcccacccccccctgatccaccacgagcaccacgaggaggaggagaccccccacagcaccagcaccatccaggccacccccagcagcaccaccgaggagaccgccacccagaaggagcagtggttcggcaacagatggcacgagggctacagacagacccccaaggaggacagccacagcaccaccggcaccgccgccgccagcgcccacaccagccaccccatgcagggcagaaccacccccagccccgaggacagcagctggaccgacttcttcaaccccatcagccaccccatgggcagaggccaccaggccggcagaagaatggacatggacagcagccacagcatcaccctgcagcccaccgccaaccccaacaccggcctggtggaggacctggacagaaccggccccctgagcatgaccacccagcagagcaacagccagagcttcagcaccagccacgagggcctggaggaggacaaggaccaccccaccaccagcaccctgaccagcagcaacagaaacgacgtgaccggcggcagaagagaccccaaccacagcgagggcagcaccaccctgctggagggctacaccagccactacccccacaccaaggagagcagaaccttcatccccgtgaccagcgccaagaccggcagcttcggcgtgaccgccgtgaccgtgggcgacagcaacagcaacgtgaacagaagcctgagcggcgaccaggacaccttccaccccagcggcggcagccacaccacccacggcagcgagagcgacggccacagccacggcagccaggagggcggcgccaacaccaccagcggccccatcagaaccccccagatccccgagtggctgatcatcctggccagcctgctggccctggccctgatcctggccgtgtgcatcgccgtgaacagcagaagaagatgcggccagaagaagaagctggtgatcaacagcggcaacggcgccgtggaggacagaaagcccagcggcctgaacggcgaggccagcaagagccaggagatggtgcacctggtgaacaaggagagcagcgagacccccgaccagttcatgaccgccgacgagaccagaaacctgcagaacgtggacatgaagatcggcgtgtag

SEQ ID NO: 9954 - DNA, 243 bp, synthetic construct
  misc_feature 1..243: note = Description of Artificial Sequence: Synthetic coding sequence
  source 1..243: mol_type = other DNA
atggacaagttctggtggcacgccgcctggggcctgtgcctggtgcccctgagcctggcccagatcgacctgaacatcacctgcagattcgccggcgtgttccacgtggagaagaacggcagatacagcatcagcagaaccgaggccgccgacctgtgcaaggccttcaacagcaccctgcccaccatggcccagatggagaaggccctgagcatcggcttcgagacctgcagcagcacctag

SEQ ID NO: 9955 - DNA, 2229 bp, synthetic construct
  misc_feature 1..2229: note = Description of Artificial Sequence: Synthetic coding sequence
  source 1..2229: mol_type = other DNA
atggacaagttctggtggcacgccgcctggggcctgtgcctggtgcccctgagcctggcccagatcgacctgaacatcacctgcagattcgccggcgtgttccacgtggagaagaacggcagatacagcatcagcagaaccgaggccgccgacctgtgcaaggccttcaacagcaccctgcccaccatggcccagatggagaaggccctgagcatcggcttcgagacctgcagatacggcttcatcgagggccacgtggtgatccccagaatccaccccaacagcatctgcgccgccaacaacaccggcgtgtacatcctgaccagcaacaccagccagtacgacacctactgcttcaacgccagcgccccccccgaggaggactgcaccagcgtgaccgacctgcccaacgccttcgacggccccatcaccatcaccatcgtgaacagagacggcaccagatacgtgcagaagggcgagtacagaaccaaccccgaggacatctaccccagcaaccccaccgacgacgacgtgagcagcggcagcagcagcgagagaagcagcaccagcggcggctacatcttctacaccttcagcaccgtgcaccccatccccgacgaggacagcccctggatcaccgacagcaccgacagaatccccgccaccaccctgatgagcaccagcgccaccgccaccgagaccgccaccaagagacaggagacctgggactggttcagctggctgttcctgcccagcgagagcaagaaccacctgcacaccaccacccagatggccggcaccagcagcaacaccatcagcgccggctgggagcccaacgaggagaacgaggacgagagagacagacacctgagcttcagcggcagcggcatcgacgacgacgaggacttcatcagcagcaccatcagcaccacccccagagccttcgaccacaccaagcagaaccaggactggacccagtggaaccccagccacagcaaccccgaggtgctgctgcagaccaccaccagaatgaccgacgtggacagaaacggcaccaccgcctacgagggcaactggaaccccgaggcccacccccccctgatccaccacgagcaccacgaggaggaggagaccccccacagcaccagcaccatccaggccacccccagcagcaccaccgaggagaccgccacccagaaggagcagtggttcggcaacagatggcacgagggctacagacagacccccaaggaggacagccacagcaccaccggcaccgccgccgccagcgcccacaccagccaccccatgcagggcagaaccacccccagccccgaggacagcagctggaccgacttcttcaaccccatcagccaccccatgggcagaggccaccaggccggcagaagaatggacatggacagcagccacagcatcaccctgcagcccaccgccaaccccaacaccggcctggtggaggacctggacagaaccggccccctgagcatgaccacccagcagagcaacagccagagcttcagcaccagccacgagggcctggaggaggacaaggaccaccccaccaccagcaccctgaccagcagcaacagaaacgacgtgaccggcggcagaagagaccccaaccacagcgagggcagcaccaccctgctggagggctacaccagccactacccccacaccaaggagagcagaaccttcatccccgtgaccagcgccaagaccggcagcttcggcgtgaccgccgtgaccgtgggcgacagcaacagcaacgtgaacagaagcctgagcggcgaccaggacaccttccaccccagcggcggcagccacaccacccacggcagcgagagcgacggccacagccacggcagccaggagggcggcgccaacaccaccagcggccccatcagaaccccccagatccccgagtggctgatcatcctggccagcctgctggccctggccctgatcctggccgtgtgcatcgccgtgaacagcagaagaagatgcggccagaagaagaagctggtgatcaacagcggcaacggcgccgtggaggacagaaagcccagcggcctgaacggcgaggccagcaagagccaggagatggtgcacctggtgaacaaggagagcagcgagacccccgaccagttcatgaccgccgacgagaccagaaacctgcagaacgtggacatgaagatcggcgtgtag

SEQ ID NO: 9956 - DNA, 2145 bp, synthetic construct
  misc_feature 1..2145: note = Description of Artificial Sequence: Synthetic coding sequence
  source 1..2145: mol_type = other DNA
atggacaagttctggtggcacgccgcctggggcctgtgcctggtgcccctgagcctggcccagatcgacctgaacatcacctgcagattcgccggcgtgttccacgtggagaagaacggcagatacagcatcagcagaaccgaggccgccgacctgtgcaaggccttcaacagcaccctgcccaccatggcccagatggagaaggccctgagcatcggcttcgagacctgcagatacggcttcatcgagggccacgtggtgatccccagaatccaccccaacagcatctgcgccgccaacaacaccggcgtgtacatcctgaccagcaacaccagccagtacgacacctactgcttcaacgccagcgccccccccgaggaggactgcaccagcgtgaccgacctgcccaacgccttcgacggccccatcaccatcaccatcgtgaacagagacggcaccagatacgtgcagaagggcgagtacagaaccaaccccgaggacatctaccccagcaaccccaccgacgacgacgtgagcagcggcagcagcagcgagagaagcagcaccagcggcggctacatcttctacaccttcagcaccgtgcaccccatccccgacgaggacagcccctggatcaccgacagcaccgacagaatccccgccaccaccctgatgagcaccagcgccaccgccaccgagaccgccaccaagagacaggagacctgggactggttcagctggctgttcctgcccagcgagagcaagaaccacctgcacaccaccacccagatggccggcaccagcagcaacaccatcagcgccggctgggagcccaacgaggagaacgaggacgagagagacagacacctgagcttcagcggcagcggcatcgacgacgacgaggacttcatcagcagcaccatcagcaccacccccagagccttcgaccacaccaagcagaaccaggactggacccagtggaaccccagccacagcaaccccgaggtgctgctgcagaccaccaccagaatgaccgccgacgtggacagaaacggcaccaccgcctacgagggcaactggaaccccgaggcccacccccccctgatccaccacgagcaccacgaggaggaggagaccccccacagcaccagcaccatccaggccacccccagcagcaccaccgaggagaccgccacccagaaggagcagtggttcggcaacagatggcacgagggctacagacagacccccaaggaggacagccacagcaccaccggcaccgccgccgccagcgcccacaccagccaccccatgcagggcagaaccacccccagccccgaggacagcagctggaccgacttcttcaaccccatcagccaccccatgggcagaggccaccaggccggcagaagaatggacatggacagcagccacagcatcaccctgcagcccaccgccaaccccaacaccggcctggtggaggacctggacagaaccggccccctgagcatgaccaccagaaacagaaacgacgtgaccggcggcagaagagaccccaaccacagcgagggcagcaccaccctgctggagggctacaccagccactacccccacaccaaggagagcagaaccttcatccccgtgaccagcgccaagaccggcagcttcggcgtgaccgccgtgaccgtgggcgacagcaacagcaacgtgaacagaagcctgagcggcgaccaggacaccttccaccccagcggcggcagccacaccacccacggcagcgagagcgacggccacagccacggcagccaggagggcggcgccaacaccaccagcggccccatcagaaccccccagatccccgagtggctgatcatcctggccagcctgctggccctggccctgatcctggccgtgtgcatcgccgtgaacagcagaagaagatgcggccagaagaagaagctggtgatcaacagcggcaacggcgccgtggaggacagaaagcccagcggcctgaacggcgaggccagcaagagccaggagatggtgcacctggtgaacaaggagagcagcgagacccccgaccagttcatgaccgccgacgagaccagaaacctgcagaacgtggacatgaagatcggcgtgtag

SEQ ID NO: 9957 - DNA, 1482 bp, synthetic construct
  misc_feature 1..1482: note = Description of Artificial Sequence: Synthetic coding sequence
  source 1..1482: mol_type = other DNA
atggacaagttctggtggcacgccgcctggggcctgtgcctggtgcccctgagcctggcccagatcgacctgaacatcacctgcagattcgccggcgtgttccacgtggagaagaacggcagatacagcatcagcagaaccgaggccgccgacctgtgcaaggccttcaacagcaccctgcccaccatggcccagatggagaaggccctgagcatcggcttcgagacctgcagatacggcttcatcgagggccacgtggtgatccccagaatccaccccaacagcatctgcgccgccaacaacaccggcgtgtacatcctgaccagcaacaccagccagtacgacacctactgcttcaacgccagcgccccccccgaggaggactgcaccagcgtgaccgacctgcccaacgccttcgacggccccatcaccatcaccatcgtgaacagagacggcaccagatacgtgcagaagggcgagtacagaaccaaccccgaggacatctaccccagcaaccccaccgacgacgacgtgagcagcggcagcagcagcgagagaagcagcaccagcggcggctacatcttctacaccttcagcaccgtgcaccccatccccgacgaggacagcccctggatcaccgacagcaccgacagaatccccgccaccaacatggacagcagccacagcatcaccctgcagcccaccgccaaccccaacaccggcctggtggaggacctggacagaaccggccccctgagcatgaccacccagcagagcaacagccagagcttcagcaccagccacgagggcctggaggaggacaaggaccaccccaccaccagcaccctgaccagcagcaacagaaacgacgtgaccggcggcagaagagaccccaaccacagcgagggcagcaccaccctgctggagggctacaccagccactacccccacaccaaggagagcagaaccttcatccccgtgaccagcgccaagaccggcagcttcggcgtgaccgccgtgaccgtgggcgacagcaacagcaacgtgaacagaagcctgagcggcgaccaggacaccttccaccccagcggcggcagccacaccacccacggcagcgagagcgacggccacagccacggcagccaggagggcggcgccaacaccaccagcggccccatcagaaccccccagatccccgagtggctgatcatcctggccagcctgctggccctggccctgatcctggccgtgtgcatcgccgtgaacagcagaagaagatgcggccagaagaagaagctggtgatcaacagcggcaacggcgccgtggaggacagaaagcccagcggcctgaacggcgaggccagcaagagccaggagatggtgcacctggtgaacaaggagagcagcgagacccccgaccagttcatgaccgccgacgagaccagaaacctgcagaacgtggacatgaagatcggcgtgtag

SEQ ID NO: 9958 - DNA, 1290 bp, synthetic construct
  misc_feature 1..1290: note = Description of Artificial Sequence: Synthetic coding sequence
  source 1..1290: mol_type = other DNA
atggacaagttctggtggcacgccgcctggggcctgtgcctggtgcccctgagcctggcccagatcgacctgaacatcacctgcagattcgccggcgtgttccacgtggagaagaacggcagatacagcatcagcagaaccgaggccgccgacctgtgcaaggccttcaacagcaccctgcccaccatggcccagatggagaaggccctgagcatcggcttcgagacctgcagatacggcttcatcgagggccacgtggtgatccccagaatccaccccaacagcatctgcgccgccaacaacaccggcgtgtacatcctgaccagcaacaccagccagtacgacacctactgcttcaacgccagcgccccccccgaggaggactgcaccagcgtgaccgacctgcccaacgccttcgacggccccatcaccatcaccatcgtgaacagagacggcaccagatacgtgcagaagggcgagtacagaaccaaccccgaggacatctaccccagcaaccccaccgacgacgacgtgagcagcggcagcagcagcgagagaagcagcaccagcggcggctacatcttctacaccttcagcaccgtgcaccccatccccgacgaggacagcccctggatcaccgacagcaccgacagaatccccgccaccaacagaaacgacgtgaccggcggcagaagagaccccaaccacagcgagggcagcaccaccctgctggagggctacaccagccactacccccacaccaaggagagcagaaccttcatccccgtgaccagcgccaagaccggcagcttcggcgtgaccgccgtgaccgtgggcgacagcaacagcaacgtgaacagaagcctgagcggcgaccaggacaccttccaccccagcggcggcagccacaccacccacggcagcgagagcgacggccacagccacggcagccaggagggcggcgccaacaccaccagcggccccatcagaaccccccagatccccgagtggctgatcatcctggccagcctgctggccctggccctgatcctggccgtgtgcatcgccgtgaacagcagaagaagatgcggccagaagaagaagctggtgatcaacagcggcaacggcgccgtggaggacagaaagcccagcggcctgaacggcgaggccagcaagagccaggagatggtgcacctggtgaacaaggagagcagcgagacccccgaccagttcatgaccgccgacgagaccagaaacctgcagaacgtggacatgaagatcggcgtgtag

SEQ ID NO: 9959 - DNA, 2025 bp, synthetic construct
  misc_feature 1..2025: note = Description of Artificial Sequence: Synthetic coding sequence
  source 1..2025: mol_type = other DNA
atggacaagttctggtggcacgccgcctggggcctgtgcctggtgcccctgagcctggcccagatcgacctgaacatcacctgcagattcgccggcgtgttccacgtggagaagaacggcagatacagcatcagcagaaccgaggccgccgacctgtgcaaggccttcaacagcaccctgcccaccatggcccagatggagaaggccctgagcatcggcttcgagacctgcagatacggcttcatcgagggccacgtggtgatccccagaatccaccccaacagcatctgcgccgccaacaacaccggcgtgtacatcctgaccagcaacaccagccagtacgacacctactgcttcaacgccagcgccccccccgaggaggactgcaccagcgtgaccgacctgcccaacgccttcgacggccccatcaccatcaccatcgtgaacagagacggcaccagatacgtgcagaagggcgagtacagaaccaaccccgaggacatctaccccagcaaccccaccgacgacgacgtgagcagcggcagcagcagcgagagaagcagcaccagcggcggctacatcttctacaccttcagcaccgtgcaccccatccccgacgaggacagcccctggatcaccgacagcaccgacagaatccccgccaccaccctgatgagcaccagcgccaccgccaccgagaccgccaccaagagacaggagacctgggactggttcagctggctgttcctgcccagcgagagcaagaaccacctgcacaccaccacccagatggccggcaccagcagcaacaccatcagcgccggctgggagcccaacgaggagaacgaggacgagagagacagacacctgagcttcagcggcagcggcatcgacgacgacgaggacttcatcagcagcaccatcagcaccacccccagagccttcgaccacaccaagcagaaccaggactggacccagtggaaccccagccacagcaaccccgaggtgctgctgcagaccaccaccagaatgaccgacgtggacagaaacggcaccaccgcctacgagggcaactggaaccccgaggcccacccccccctgatccaccacgagcaccacgaggaggaggagaccccccacagcaccagcaccatccaggccacccccagcagcaccaccgaggagaccgccacccagaaggagcagtggttcggcaacagatggcacgagggctacagacagacccccaaggaggacagccacagcaccaccggcaccgccgccgccagcgcccacaccagccaccccatgcagggcagaaccacccccagccccgaggacagcagctggaccgacttcttcaaccccatcagccaccccatgggcagaggccaccaggccggcagaagaatggacatggacagcagccacagcatcaccctgcagcccaccgccaaccccaacaccggcctggtggaggacctggacagaaccggccccctgagcatgaccacccagcagagcaacagccagagcttcagcaccagccacgagggcctggaggaggacaaggaccaccccaccaccagcaccctgaccagcagcagagaccaggacaccttccaccccagcggcggcagccacaccacccacggcagcgagagcgacggccacagccacggcagccaggagggcggcgccaacaccaccagcggccccatcagaaccccccagatccccgagtggctgatcatcctggccagcctgctggccctggccctgatcctggccgtgtgcatcgccgtgaacagcagaagaagatgcggccagaagaagaagctggtgatcaacagcggcaacggcgccgtggaggacagaaagcccagcggcctgaacggcgaggccagcaagagccaggagatggtgcacctggtgaacaaggagagcagcgagacccccgaccagttcatgaccgccgacgagaccagaaacctgcagaacgtggacatgaagatcggcgtgtag

SEQ ID NO: 9960 - DNA, 2100 bp, synthetic construct
  misc_feature 1..2100: note = Description of Artificial Sequence: Synthetic coding sequence
  source 1..2100: mol_type = other DNA
atggacaagttctggtggcacgccgcctggggcctgtgcctggtgcccctgagcctggcccagatcgacctgaacatcacctgcagattcgccggcgtgttccacgtggagaagaacggcagatacagcatcagcagaaccgaggccgccgacctgtgcaaggccttcaacagcaccctgcccaccatggcccagatggagaaggccctgagcatcggcttcgagacctgcagatacggcttcatcgagggccacgtggtgatccccagaatccaccccaacagcatctgcgccgccaacaacaccggcgtgtacatcctgaccagcaacaccagccagtacgacacctactgcttcaacgccagcgccccccccgaggaggactgcaccagcgtgaccgacctgcccaacgccttcgacggccccatcaccatcaccatcgtgaacagagacggcaccagatacgtgcagaagggcgagtacagaaccaaccccgaggacatctaccccagcaaccccaccgacgacgacgtgagcagcggcagcagcagcgagagaagcagcaccagcggcggctacatcttctacaccttcagcaccgtgcaccccatccccgacgaggacagcccctggatcaccgacagcaccgacagaatccccgccaccaccctgatgagcaccagcgccaccgccaccgagaccgccaccaagagacaggagacctgggactggttcagctggctgttcctgcccagcgagagcaagaaccacctgcacaccaccacccagatggccggcaccagcagcaacaccatcagcgccggctgggagcccaacgaggagaacgaggacgagagagacagacacctgagcttcagcggcagcggcatcgacgacgacgaggacttcatcagcagcaccatcagcaccacccccagagccttcgaccacaccaagcagaaccaggactggacccagtggaaccccagccacagcaaccccgaggtgctgctgcagaccaccaccagaatgaccgacgtggacagaaacggcaccaccgcctacgagggcaactggaaccccgaggcccacccccccctgatccaccacgagcaccacgaggaggaggagaccccccacagcaccagcaccaccgccagcgcccacaccagccaccccatgcagggcagaaccacccccagccccgaggacagcagctggaccgacttcttcaaccccatcagccaccccatgggcagaggccaccaggccggcagaagaatggacatggacagcagccacagcatcaccctgcagcccaccgccaaccccaacaccggcctggtggaggacctggacagaaccggccccctgagcatgaccacccagcagagcaacagccagagcttcagcaccagccacgagggcctggaggaggacaaggaccaccccaccaccagcaccctgaccagcagcaacagaaacgacgtgaccggcggcagaagagaccccaaccacagcgagggcagcaccaccctgctggagggctacaccagccactacccccacaccaaggagagcagaaccttcatccccgtgaccagcgccaagaccggcagcttcggcgtgaccgccgtgaccgtgggcgacagcaacagcaacgtgaacagaagcctgagcggcgaccaggacaccttccaccccagcggcggcagccacaccacccacggcagcgagagcgacggccacagccacggcagccaggagggcggcgccaacaccaccagcggccccatcagaaccccccagatccccgagtggctgatcatcctggccagcctgctggccctggccctgatcctggccgtgtgcatcgccgtgaacagcagaagaagatgcggccagaagaagaagctggtgatcaacagcggcaacggcgccgtggaggacagaaagcccagcggcctgaacggcgaggccagcaagagccaggagatggtgcacctggtgaacaaggagagcagcgagacccccgaccagttcatgaccgccgacgagaccagaaacctgcagaacgtggacatgaagatcggcgtgtag

SEQ ID NO: 9961 - DNA, 237 bp, synthetic construct
  misc_feature 1..237: note = Description of Artificial Sequence: Synthetic coding sequence
  source 1..237: mol_type = other DNA
atggacaagttctggtggcacgccgcctggggcctgtgcctggtgcccctgagcctggcccagatcgacctgaacatcacctgcagattcgccggcgtgttccacgtggagaagaacggcagatacagcatcagcagaaccgaggccgccgacctgtgcaaggccttcaacagcaccctgcccaccatggcccagatggagaaggccctgagcatcggcttcgagacctgcagatag

SEQ ID NO: 9962 - DNA, 885 bp, synthetic construct
  misc_feature 1..885: note = Description of Artificial Sequence: Synthetic coding sequence
  source 1..885: mol_type = other DNA
tgagacaagttctggtggcacgccgcctggggcctgtgcctggtgcccctgagcctggcccagatcgacctgaacatcacctgcagattcgccggcgtgttccacgtggagaagaacggcagatacagcatcagcagaaccgaggccgccgacctgtgcaaggccttcaacagcaccctgcccaccatggcccagatggagaaggccctgagcatcggcttcgagacctgcagatacggcttcatcgagggccacgtggtgatccccagaatccaccccaacagcatctgcgccgccaacaacaccggcgtgtacatcctgaccagcaacaccagccagtacgacacctactgcttcaacgccagcgccccccccgaggaggactgcaccagcgtgaccgacctgcccaacgccttcgacggccccatcaccatcaccatcgtgaacagagacggcaccagatacgtgcagaagggcgagtacagaaccaaccccgaggacatctaccccagcaaccccaccgacgacgacgtgagcagcggcagcagcagcgagagaagcagcaccagcggcggctacatcttctacaccttcagcaccgtgcaccccatccccgacgaggacagcccctggatcaccgacagcaccgacagaatccccgccaccagagaccaggacaccttccaccccagcggcggcagccacaccacccacggcagcgagagcgacggccacagccacggcagccaggagggcggcgccaacaccaccagcggccccatcagaaccccccagatccccgagtggctgatcatcctggccagcctgctggccctggccctgatcctggccgtgtgcatcgccgtgaacagcagaagaagctag

SEQ ID NO: 9963 - DNA, 918 bp, synthetic construct
  misc_feature 1..918: note = Description of Artificial Sequence: Synthetic coding sequence
  source 1..918: mol_type = other DNA
atgtggcccctggtggccgccctgctgctgggcagcgcctgctgcggcagcgcccagctgctgttcaacaagaccaagagcgtggagttcaccttctgcaacgacaccgtggtgatcccctgcttcgtgaccaacatggaggcccagaacaccaccgaggtgtacgtgaagtggaagttcaagggcagagacatctacaccttcgacggcgccctgaacaagagcaccgtgcccaccgacttcagcagcgccaagatcgaggtgagccagctgctgaagggcgacgccagcctgaagatggacaagagcgacgccgtgagccacaccggcaactacacctgcgaggtgaccgagctgaccagagagggcgagaccatcatcgagctgaagtacagagtggtgagctggttcagccccaacgagaacatcctgatcgtgatcttccccatcttcgccatcctgctgttctggggccagttcggcatcaagaccctgaagtacagaagcggcggcatggacgagaagaccatcgccctgctggtggccggcctggtgatcaccgtgatcgtgatcgtgggcgccatcctgttcgtgcccggcgagtacagcctgaagaacgccaccggcctgggcctgatcgtgaccagcaccggcatcctgatcctgctgcactactacgtgttcagcaccgccatcggcctgaccagcttcgtgatcgccatcctggtgatccaggtgatcgcctacatcctggccgtggtgggcctgagcctgtgcatcgccgcctgcatccccatgcacggccccctgctgatcagcggcctgagcatcctggccctggcccagctgctgggcctggtgtacatgaagttcgtggccagcaaccagaagaccatccagccccccagaaacaactag

SEQ ID NO: 9964 - DNA, 972 bp, synthetic construct
  misc_feature 1..972: note = Description of Artificial Sequence: Synthetic coding sequence
  source 1..972: mol_type = other DNA
atgtggcccctggtggccgccctgctgctgggcagcgcctgctgcggcagcgcccagctgctgttcaacaagaccaagagcgtggagttcaccttctgcaacgacaccgtggtgatcccctgcttcgtgaccaacatggaggcccagaacaccaccgaggtgtacgtgaagtggaagttcaagggcagagacatctacaccttcgacggcgccctgaacaagagcaccgtgcccaccgacttcagcagcgccaagatcgaggtgagccagctgctgaagggcgacgccagcctgaagatggacaagagcgacgccgtgagccacaccggcaactacacctgcgaggtgaccgagctgaccagagagggcgagaccatcatcgagctgaagtacagagtggtgagctggttcagccccaacgagaacatcctgatcgtgatcttccccatcttcgccatcctgctgttctggggccagttcggcatcaagaccctgaagtacagaagcggcggcatggacgagaagaccatcgccctgctggtggccggcctggtgatcaccgtgatcgtgatcgtgggcgccatcctgttcgtgcccggcgagtacagcctgaagaacgccaccggcctgggcctgatcgtgaccagcaccggcatcctgatcctgctgcactactacgtgttcagcaccgccatcggcctgaccagcttcgtgatcgccatcctggtgatccaggtgatcgcctacatcctggccgtggtgggcctgagcctgtgcatcgccgcctgcatccccatgcacggccccctgctgatcagcggcctgagcatcctggccctggcccagctgctgggcctggtgtacatgaagttcgtggccagcaaccagaagaccatccagccccccagaaaggccgtggaggagcccctgaacgccttcaaggagagcaagggcatgatgaacgacgagtag

SEQ ID NO: 9965 - DNA, 1488 bp, synthetic construct
  misc_feature 1..1488: note = Description of Artificial Sequence: Synthetic coding sequence
  source 1..1488: mol_type = other DNA
atgcccatgggcagcctgcagcccctggccaccctgtacctgctgggcatgctggtggccagctgcctgggcagactgagctggtacgaccccgacttccaggccagactgaccagaagcaacagcaagtgccagggccagctggaggtgtacctgaaggacggctggcacatggtgtgcagccagagctggggcagaagcagcaagcagtgggaggaccccagccaggccagcaaggtgtgccagagactgaactgcggcgtgcccctgagcctgggccccttcctggtgacctacaccccccagagcagcatcatctgctacggccagctgggcagcttcagcaactgcagccacagcagaaacgacatgtgccacagcctgggcctgacctgcctggagccccagaagaccaccccccccaccaccagacccccccccaccaccacccccgagcccaccgccccccccagactgcagctggtggcccagagcggcggccagcactgcgccggcgtggtggagttctacagcggcagcctgggcggcaccatcagctacgaggcccaggacaagacccaggacctggagaacttcctgtgcaacaacctgcagtgcggcagcttcctgaagcacctgcccgagaccgaggccggcagagcccaggaccccggcgagcccagagagcaccagcccctgcccatccagtggaagatccagaacagcagctgcaccagcctggagcactgcttcagaaagatcaagccccagaagagcggcagagtgctggccctgctgtgcagcggcttccagcccaaggtgcagagcagactggtgggcggcagcagcatctgcgagggcaccgtggaggtgagacagggcgcccagtgggccgccctgtgcgacagcagcagcgccagaagcagcctgagatgggaggaggtgtgcagagagcagcagtgcggcagcgtgaacagctacagagtgctggacgccggcgaccccaccagcagaggcctgttctgcccccaccagaagctgagccagtgccacgagctgtgggagagaaacagctactgcaagaaggtgttcgtgacctgccaggaccccaaccccgccggcctggccgccggcaccgtggccagcatcatcctggccctggtgctgctggtggtgctgctggtggtgtgcggccccctggcctacaagaagctggtgaagaagttcagacagaagaagcagagacagtggatcggccccaccggcatgaaccagaacatgagcttccacagaaaccacaccgccaccgtgagaagccacgccgagaaccccaccgccagccacgtggacaacgagtacagccagccccccagaaacagccacctgagcgcctaccccgccctggagggcgccctgcacagaagcagcatgcagcccgacaacagcagcgacagcgactacgacctgcacggcgcccagagactgtag

SEQ ID NO: 9966 - DNA, 582 bp, synthetic construct
  misc_feature 1..582: note = Description of Artificial Sequence: Synthetic coding sequence
  source 1..582: mol_type = other DNA
atgcccgaggagggcagcggctgcagcgtgagaagaagaccctacggctgcgtgctgagagccgccctggtgcccctggtggccggcctggtgatctgcctggtggtgtgcatccagagattcgcccaggcccagcagcagctgcccctggagagcctgggctgggacgtggccgagctgcagctgaaccacaccggcccccagcaggaccccagactgtactggcagggcggccccgccctgggcagaagcttcctgcacggccccgagctggacaagggccagctgagaatccacagagacggcatctacatggtgcacatccaggtgaccctggccatctgcagcagcaccaccgccagcagacaccaccccaccaccctggccgtgggcatctgcagccccgccagcagaagcatcagcctgctgagactgagcttccaccagggctgcaccatcgccagccagagactgacccccctggccagaggcgacaccctgtgcaccaacctgaccggcaccctgctgcccagcagaaacaccgacgagaccttcttcggcgtgcagtgggtgagaccctag

SEQ ID NO: 9967 - DNA, 627 bp, synthetic construct
  misc_feature 1..627: note = Description of Artificial Sequence: Synthetic coding sequence
  source 1..627: mol_type = other DNA
atgcccgaggagggcagcggctgcagcgtgagaagaagaccctacggctgcgtgctgagagccgccctggtgcccctggtggccggcctggtgatctgcctggtggtgtgcatccagagattcgcccaggcccagcagcagctgcccctggagagcctgggctgggacgtggccgagctgcagctgaaccacaccggcccccagcaggaccccagactgtactggcagggcggccccgccctgggcagaagcttcctgcacggccccgagctggacaagggccagctgagaatccacagagacggcatctacatggtgcacatccaggtgaccctggccatctgcagcagcaccaccgccagcagacaccaccccaccaccctggccgtgggcatctgcagccccgccagcagaagcatcagcctgctgagactgagcttccaccagggcctgttcggcttctggaactggggcctgaaggtgaagtgcttcctgagacacctgatctggaccgcccactgcttcatccccctgacccagctggtgttcatgcaggccctgcagagctggagaaaccaccactgcagccacttcaccgacgaggagaacagaggcgtgaacagatag

SEQ ID NO: 9968 - DNA, 1305 bp, synthetic construct
  misc_feature 1..1305: note = Description of Artificial Sequence: Synthetic coding sequence
  source 1..1305: mol_type = other DNA
atgagcgccgacggcgccgaggccgacggcagcacccaggtgaccgtggaggagcccgtgcagcagcccagcgtggtggacagagtggccagcatgcccctgatcagcagcacctgcgacatggtgagcgccgcctacgccagcaccaaggagagctacccccacatcaagaccgtgtgcgacgccgccgagaagggcgtgagaaccctgaccgccgccgccgtgagcggcgcccagcccatcctgagcaagctggagccccagatcgccagcgccagcgagtacgcccacagaggcctggacaagctggaggagaacctgcccatcctgcagcagcccaccgagaaggtgctggccgacaccaaggagctggtgagcagcaaggtgagcggcgcccaggagatggtgagcagcgccaaggacaccgtggccacccagctgagcgaggccgtggacgccaccagaggcgccgtgcagagcggcgtggacaagaccaagagcgtggtgaccggcggcgtgcagagcgtgatgggcagcagactgggccagatggtgctgagcggcgtggacaccgtgctgggcaagagcgaggagtgggccgacaaccacctgcccctgaccgacgccgagctggccagaatcgccaccagcctggacggcttcgacgtggccagcgtgcagcagcagagacaggagcagagctacttcgtgagactgggcagcctgagcgagagactgagacagcacgcctacgagcacagcctgggcaagctgagagccaccaagcagagagcccaggaggccctgctgcagctgagccaggtgctgagcctgatggagaccgtgaagcagggcgtggaccagaagctggtggagggccaggagaagctgcaccagatgtggctgagctggaaccagaagcagctgcagggccccgagaaggagccccccaagcccgagcaggtggagagcagagccctgaccatgttcagagacatcgcccagcagctgcaggccacctgcaccagcctgggcagcagcatccagggcctgcccaccaacgtgaaggaccaggtgcagcaggccagaagacaggtggaggacctgcaggccaccttcagcagcatccacagcttccaggacctgagcagcagcatcctggcccagagcagagagagagtggccagcgccagagaggccctggaccacatggtggagtacgtggcccagaacacccccgtgacctggctggtgggccccttcgcccccggcatcaccgagaaggcccccgaggagaagaagtag

SEQ ID NO: 9969 - DNA, 567 bp, synthetic construct
  misc_feature 1..567: note = Description of Artificial Sequence: Synthetic coding sequence
  source 1..567: mol_type = other DNA
atgcccggcggccccggcgtgctgcaggccctgcccgccaccatcttcctgctgttcctgctgagcgccgtgtacctgggccccggctgccaggccctgtggatgcacaaggtgcccgccagcctgatggtgagcctgggcgaggacgcccacttccagtgcccccacaacagcagcaacaacgccaacgtgacctggtggagagtgctgcacggcaactacacctggccccccgagttcctgggccccggcgaggaccccaacgagcccccccccagacccttcctggacatgggcgagggcaccaagaacagaatcatcaccgccgagggcatcatcctgctgttctgcgccgtggtgcccggcaccctgctgctgttcagaaagagatggcagaacgagaagctgggcctggacgccggcgacgagtacgaggacgagaacctgtacgagggcctgaacctggacgactgcagcatgtacgaggacatcagcagaggcctgcagggcacctaccaggacgtgggcagcctgaacatcggcgacgtgcagctggagaagccctag

SEQ ID NO: 9970 - DNA, 867 bp, synthetic construct
  misc_feature 1..867: note = Description of Artificial Sequence: Synthetic coding sequence
  source 1..867: mol_type = other DNA
atgggccacaccagaagacagggcaccagccccagcaagtgcccctacctgaacttcttccagctgctggtgctggccggcctgagccacttctgcagcggcgtgatccacgtgaccaaggaggtgaaggaggtggccaccctgagctgcggccacaacgtgagcgtggaggagctggcccagaccagaatctactggcagaaggagaagaagatggtgctgaccatgatgagcggcgacatgaacatctggcccgagtacaagaacagaaccatcttcgacatcaccaacaacctgagcatcgtgatcctggccctgagacccagcgacgagggcacctacgagtgcgtggtgctgaagtacgagaaggacgccttcaagagagagcacctggccgaggtgaccctgagcgtgaaggccgacttccccacccccagcatcagcgacttcgagatccccaccagcaacatcagaagaatcatctgcagcaccagcggcggcttccccgagccccacctgagctggctggagaacggcgaggagctgaacgccatcaacaccaccgtgagccaggaccccgagaccgagctgtacgccgtgagcagcaagctggacttcaacatgaccaccaaccacagcttcatgtgcctgatcaagtacggccacctgagagtgaaccagaccttcaactggaacaccaccaagcaggagcacttccccgacaacctgctgcccagctgggccatcaccctgatcagcgtgaacggcatcttcgtgatctgctgcctgacctactgcttcgcccccagatgcagagagagaagaagaaacgagagactgagaagagagagcgtgagacccgtgtag

SEQ ID NO: 9971 - DNA, 489 bp, synthetic construct
  misc_feature 1..489: note = Description of Artificial Sequence: Synthetic coding sequence
  source 1..489: mol_type = other DNA
atgggccacaccagaagacagggcaccagccccagcaagtgcccctacctgaacttcttccagctgctggtgctggccggcctgagccacttctgcagcggcgtgatccacgtgaccaaggaggtgaaggaggtggccaccctgagctgcggccacaacgtgagcgtggaggagctggcccagaccagaatctactggcagaaggagaagaagatggtgctgaccatgatgagcggcgacatgaacatctggcccgagtacaagaacagaaccatcttcgacatcaccaacaacctgagcatcgtgatcctggccctgagacccagcgacgagggcacctacgagtgcgtggtgctgaagtacgagaaggacgccttcaagagagagcacctggccgaggtgaccctgagcgtgaagggcttcgcccccagatgcagagagagaagaagaaacgagagactgagaagagagagcgtgagacccgtgtag

SEQ ID NO: 9972 - DNA, 771 bp, synthetic construct
  misc_feature 1..771: note = Description of Artificial Sequence: Synthetic coding sequence
  source 1..771: mol_type = other DNA
atgggccacaccagaagacagggcaccagccccagcaagtgcccctacctgaacttcttccagctgctggtgctggccggcctgagccacttctgcagcggcgtgatccacgtgaccaaggaggtgaaggaggtggccaccctgagctgcggccacaacgtgagcgtggaggagctggcccagaccagaatctactggcagaaggagaagaagatggtgctgaccatgatgagcggcgacatgaacatctggcccgagtacaagaacagaaccatcttcgacatcaccaacaacctgagcatcgtgatcctggccctgagacccagcgacgagggcacctacgagtgcgtggtgctgaagtacgagaaggacgccttcaagagagagcacctggccgaggtgaccctgagcgtgaaggccgacttccccacccccagcatcagcgacttcgagatccccaccagcaacatcagaagaatcatctgcagcaccagcggcggcttccccgagccccacctgagctggctggagaacggcgaggagctgaacgccatcaacaccaccgtgagccaggaccccgagaccgagctgtacgccgtgagcagcaagctggacttcaacatgaccaccaaccacagcttcatgtgcctgatcaagtacggccacctgagagtgaaccagaccttcaactggaacaccagcttcgcccccagatgcagagagagaagaagaaacgagagactgagaagagagagcgtgagacccgtgtag

SEQ ID NO: 9973 - DNA, 867 bp, synthetic construct; identical to SEQ ID NO: 9970
  misc_feature 1..867: note = Description of Artificial Sequence: Synthetic coding sequence
  source 1..867: mol_type = other DNA

SEQ ID NO: 9974 - DNA, 456 bp, synthetic construct
  misc_feature 1..456: note = Description of Artificial Sequence: Synthetic coding sequence
  source 1..456: mol_type = other DNA
atgagcatccccttcagcaacacccactacagaatcccccagggcttcggcaacctgctggagggcctgaccagagagatcctgagagagcagcccgacaacatccccgccttcgccgccgcctacttcgagagcctgctggagaagagagagaagaccaacttcgaccccgccgagtggggcagcaaggtggaggacagattctacaacaaccacgccttcgaggagcaggagccccccgagaagagcgaccccaagcaggaggagagccagatcagcggcaaggaggaggagaccagcgtgaccatcctggacagcagcgaggaggacaaggagaaggaggaggtggccgccgtgaagatccaggccgccttcagaggccacatcgccagagaggaggccaagaagatgaagaccaacagcctgcagaacgaggagaaggaggagaacaagtag

SEQ ID NO: 9975 - DNA, 729 bp, synthetic construct
  misc_feature 1..729: note = Description of Artificial Sequence: Synthetic coding sequence
  source 1..729: mol_type = other DNA
atgggcagcgcctgcatcaaggtgaccaagtacttcctgttcctgttcaacctgatcttcttcatcctgggcgccgtgatcctgggcttcggcgtgtggatcctggccgacaagagcagcttcatcagcgtgctgcagaccagcagcagcagcctgagaatgggcgcctacgtgttcatcggcgtgggcgccgtgaccatgctgatgggcttcctgggctgcatcggcgccgtgaacgaggtgagatgcctgctgggcctgctgaagcaggagatgggcggcatcgtgaccgagctgatcagagactacaacagcagcagagaggacagcctgcaggacgcctgggactacgtgcaggcccaggtgaagtgctgcggctgggtgagcttctacaactggaccgacaacgccgagctgatgaacagacccgaggtgacctacccctgcagctgcgaggtgaagggcgaggaggacaacagcctgagcgtgagaaagggcttctgcgaggcccccggcaacagaacccagagcggcaaccaccccgaggactggcccgtgtaccaggagggctgcatggagaaggtgcaggcctggctgcaggagaacctgggcatcatcctgggcgtgggcgtgggcgtggccatcatcgagctgctgggcatggtgctgagcatctgcctgtgcagacacgtgcacagcgaggactacagcaaggtgcccaagtactag

SEQ ID NO: 9976 - DNA, 207 bp, synthetic construct
  misc_feature 1..207: note = Description of Artificial Sequence: Synthetic coding sequence
  source 1..207: mol_type = other DNA
atgggcagcgcctgcatcaaggtgaccaagtacttcctgttcctgttcaacctgatcttcttcatcctgggcgccgtgatcctgggcttcggcgtgtggatcctggccgacaagagcagcttcatcagcgtgctgcagaccagcagcagcagcctgagaatgggcgcctacgtgttcatcggcgtgggcgccgtgaccatgctgtag

SEQ ID NO: 9977 - DNA, 117 bp, synthetic construct
  misc_feature 1..117: note = Description of Artificial Sequence: Synthetic coding sequence
  source 1..117: mol_type = other DNA
atgggcagcgcctgcatcaaggtgaccaagtacttcctgttcctgttcaacctgatcttcttcatcctgggcgccgtgatcctgggcttcggcgtgtggatcctggccgacaagtag

SEQ ID NO: 9978 - DNA, 318 bp, synthetic construct
  misc_feature 1..318: note = Description of Artificial Sequence: Synthetic coding sequence
  source 1..318: mol_type = other DNA
atgggcagcgcctgcatcaaggtgaccaagtacttcctgttcctgttcaacctgatcttcttcatcctgggcgccgtgatcctgggcttcggcgtgtggatcctggccgacaagagcagcttcatcagcgtgctgcagaccagcagcagcagcctgagaatgggcgcctacgtgttcatcggcgtgggcgccgtgaccatgctgatgggcttcctgggctgcatcggcgccgtgaacgaggtgagatgcctgctgggcctgtacttcgccttcctgctgctgatcctgatcgcccaggtgaccgccggcgccctgtag

SEQ ID NO: 9979 - DNA, 327 bp, synthetic construct
  misc_feature 1..327: note = Description of Artificial Sequence: Synthetic coding sequence
  source 1..327: mol_type = other DNA
atgggcagcgcctgcatcaaggtgaccaagtacttcctgttcctgttcaacctgatcttcttcatcctgggcgccgtgatcctgggcttcggcgtgtggatcctggccgacaagagcagcttcatcagcgtgctgcagaccagcagcagcagcctgagaatgggcgcctacgtgttcatcggcgtgggcgccgtgaccatgctgatgggcttcctgggctgcatcggcgccgtgaacgaggtgagatgcctgctgggcctgtacttcgccttcctgctgctgatcctgatcgcccaggtgaccgccggcgccctgttctacttctag

SEQ ID NO: 9980 - DNA, 708 bp, synthetic construct
  misc_feature 1..708: note = Description of Artificial Sequence: Synthetic coding sequence
  source 1..708: mol_type = other DNA
atggccctgcccgtgaccgccctgctgctgcccctggccctgctgctgcacgccgccagacccagccagttcagagtgagccccctggacagaacctggaacctgggcgagaccgtggagctgaagtgccaggtgctgctgagcaaccccaccagcggctgcagctggctgttccagcccagaggcgccgccgccagccccaccttcctgctgtacctgagccagaacaagcccaaggccgccgagggcctggacacccagagattcagcggcaagagactgggcgacaccttcgtgctgaccctgagcgacttcagaagagagaacgagggctactacttctgcagcgccctgagcaacagcatcatgtacttcagccacttcgtgcccgtgttcctgcccgccaagcccaccaccacccccgcccccagaccccccacccccgcccccaccatcgccagccagcccctgagcctgagacccgaggcctgcagacccgccgccggcggcgccgtgcacaccagaggcctggacttcgcctgcgacatctacatctgggcccccctggccggcacctgcggcgtgctgctgctgagcctggtgatcaccctgtactgcaaccacagaaacagaagaagagtgtgcaagtgccccagacccgtggtgaagagcggcgacaagcccagcctgagcgccagatacgtgtag

SEQ ID NO: 9981 - DNA, 597 bp, synthetic construct
  misc_feature 1..597: note = Description of Artificial Sequence: Synthetic coding sequence
  source 1..597: mol_type = other DNA
atggccctgcccgtgaccgccctgctgctgcccctggccctgctgctgcacgccgccagacccagccagttcagagtgagccccctggacagaacctggaacctgggcgagaccgtggagctgaagtgccaggtgctgctgagcaaccccaccagcggctgcagctggctgttccagcccagaggcgccgccgccagccccaccttcctgctgtacctgagccagaacaagcccaaggccgccgagggcctggacacccagagattcagcggcaagagactgggcgacaccttcgtgctgaccctgagcgacttcagaagagagaacgagggctactacttctgcagcgccctgagcaacagcatcatgtacttcagccacttcgtgcccgtgttcctgcccgccaagcccaccaccacccccgcccccagaccccccacccccgcccccaccatcgccagccagcccctgagcctgagacccgaggcctgcagacccgccgccggcggcgccggcaacagaagaagagtgtgcaagtgccccagacccgtggtgaagagcggcgacaagcccagcctgagcgccagatacgtgtag

SEQ ID NO: 9982 - DNA, 708 bp, synthetic construct; identical to SEQ ID NO: 9980
  misc_feature 1..708: note = Description of Artificial Sequence: Synthetic coding sequence
  source 1..708: mol_type = other DNA

SEQ ID NO: 9983 - DNA, 597 bp, synthetic construct
  misc_feature 1..597: note = Description of Artificial Sequence: Synthetic coding sequence
  source 1..597: mol_type = other DNA
atggccctgcccgtgaccgccctgctgctgcccctggccctgctgctgcacgccgccagacccagccagttcagagtgagccccctggacagaacctggaacctgggcgagaccgtggagctgaagtgccaggtgctgctgagcaaccccaccagcggctgcagctggctgttccagcccagaggcgccgccgccagccccaccttcctgctgtacctgagccagaacaagcccaaggccgccgagggcctggacacccagagattcagcggcaagagactgggcgacaccttcgtgctgaccctgagcgacttcagaagagagaacgagggctactacttctgcagcgccctgagcaacagcatcatgtacttcagccacttcgtgcccgtgttcctgcccgtgcacaccagaggcctggacttcgcctgcgacatctacatctgggcccccctggccggcacctgcggcgtgctgctgctgagcctggtgatcaccctgtactgcaaccacagaaacagaagaagagtgtgcaagtgccccagacccgtggtgaagagcggcgacaagcccagcctgagcgccagatacgtgtag

SEQ ID NO: 9984 - DNA, 663 bp, synthetic construct
  misc_feature 1..663: note = Description of Artificial Sequence: Synthetic coding sequence
  source 1..663: mol_type = other DNA
atggccctgcccgtgaccgccctgctgctgcccctggccctgctgctgcacgccgccagacccagccagttcagagtgagccccctggacagaacctggaacctgggcgagaccgtggagctgaagtgccaggtgctgctgagcaaccccaccagcggctgcagctggctgttccagcccagaggcgccgccgccagccccaccttcctgctgtacctgagccagaacaagcccaaggccgccgagggcctggacaccctgagcgacttcagaagagagaacgagggctactacttctgcagcgccctgagcaacagcatcatgtacttcagccacttcgtgcccgtgttcctgcccgccaagcccaccaccacccccgcccccagaccccccacccccgcccccaccatcgccagccagcccctgagcctgagacccgaggcctgcagacccgccgccggcggcgccgtgcacaccagaggcctggacttcgcctgcgacatctacatctgggcccccctggccggcacctgcggcgtgctgctgctgagcctggtgatcaccctgtactgcaaccacagaaacagaagaagagtgtgcaagtgccccagacccgtggtgaagagcggcgacaagcccagcctgagcgccagatacgtgtag

SEQ ID NO: 9985 - DNA, 597 bp, synthetic construct; identical to SEQ ID NO: 9981
  misc_feature 1..597: note = Description of Artificial Sequence: Synthetic coding sequence
  source 1..597: mol_type = other DNA

SEQ ID NO: 9986 - DNA, 831 bp, synthetic construct
  misc_feature 1..831: note = Description of Artificial Sequence: Synthetic coding sequence
  source 1..831: mol_type = other DNA
atgagaaaccaggcccccggcagacccaagggcgccaccttcccccccagaagacccaccggcagcagagccccccccctggcccccgagctgagagccaagcagagacccggcgagagagtgatggccctgcccgtgaccgccctgctgctgcccctggccctgctgctgcacgccgccagacccagccagttcagagtgagccccctggacagaacctggaacctgggcgagaccgtggagctgaagtgccaggtgctgctgagcaaccccaccagcggctgcagctggctgttccagcccagaggcgccgccgccagccccaccttcctgctgtacctgagccagaacaagcccaaggccgccgagggcctggacacccagagattcagcggcaagagactgggcgacaccttcgtgctgaccctgagcgacttcagaagagagaacgagggctactacttctgcagcgccctgagcaacagcatcatgtacttcagccacttcgtgcccgtgttcctgcccgccaagcccaccaccacccccgcccccagaccccccacccccgcccccaccatcgccagccagcccctgagcctgagacccgaggcctgcagacccgccgccggcggcgccgtgcacaccagaggcctggacttcgcctgcgacatctacatctgggcccccctggccggcacctgcggcgtgctgctgctgagcctggtgatcaccctgtactgcaaccacagaaacagaagaagagtgtgcaagtgccccagacccgtggtgaagagcggcgacaagcccagcctgagcgccagatacgtgtag

SEQ ID NO: 9987 - DNA, 240 bp, synthetic construct
  misc_feature 1..240: note = Description of Artificial Sequence: Synthetic coding sequence
  source 1..240: mol_type = other DNA
atgagccacaagcagatctactacagcgacaagtacgacgacgaggagttcgagtacagacacgtgatgctgcccaaggacatcgccaagctggtgcccaagacccacctgatgagcgagagcgagtggagaaacctgggcgtgcagcagagccagggctgggtgcactacatgatccacgagcccgagccccacatcctgctgttcagaagacccctgcccaagaagcccaagaagtag

SEQ ID NO: 9988 - DNA, 204 bp, synthetic construct
  misc_feature 1..204: note = Description of Artificial Sequence: Synthetic coding sequence
  source 1..204: mol_type = other DNA
atgagccacaagcagatctactacagcgacaagtacgacgacgaggagttcgagtacagacacgtgatgctgcccaaggacatcgccaagctggtgcccaagacccacctgatgagcgagagcgagtggagaaacctgggcgtgcagcagagccagggctgggtgcactacatgatccacgagcccggccagtgcaccggctag

SEQ ID NO: 9989 - DNA, 192 bp, synthetic construct
  misc_feature 1..192: note = Description of Artificial Sequence: Synthetic coding sequence
  source 1..192: mol_type = other DNA
atgagaaccagacacgtgatgctgcccaaggacatcgccaagctggtgcccaagacccacctgatgagcgagagcgagtggagaaacctgggcgtgcagcagagccagggctgggtgcactacatgatccacgagcccgagccccacatcctgctgttcagaagacccctgcccaagaagcccaagaagtag

SEQ ID NO: 9990 - DNA, 240 bp, synthetic construct
  misc_feature 1..240: note = Description of Artificial Sequence: Synthetic coding sequence
  source 1..240: mol_type = other DNA
atggcccacaagcagatctactacagcgacaagtacttcgacgagcactacgagtacagacacgtgatgctgcccagagagctgagcaagcaggtgcccaagacccacctgatgagcgaggaggagtggagaagactgggcgtgcagcagagcctgggctgggtgcactacatgatccacgagcccgagccccacatcctgctgttcagaagacccctgcccaaggaccagcagaagtag

SEQ ID NO: 9991 - DNA, 1533 bp, synthetic construct
  misc_feature 1..1533: note = Description of Artificial Sequence: Synthetic coding sequence
  source 1..1533: mol_type = other DNA
atgcaccccctgcagtgcgtgctgcaggtgcagagaagcctgggctggggccccctggccagcgtgagctggctgagcctgagaatgtgcagagcccacagcagcctgagcagcaccatgtgccccagccccgagagacaggaggacggcgccagaaaggacttcagcagcagactggccgccggccccaccttccagcacttcctgaagagcgccagcgccccccaggagaagctgagcagcgaggtggaggacccccccccctacctgatgatggacgagctgctgggcagacagagaaaggtgtacctggagacctacggctgccagatgaacgtgaacgacaccgagatcgcctggagcatcctgcagaagagcggctacctgagaaccagcaacctgcaggaggccgacgtgatcctgctggtgacctgcagcatcagagagaaggccgagcagaccatctggaacagactgcaccagctgaaggccctgaagaccagaagacccagaagcagagtgcccctgagaatcggcatcctgggctgcatggccgagagactgaaggaggagatcctgaacagagagaagatggtggacatcctggccggccccgacgcctacagagacctgcccagactgctggccgtggccgagagcggccagcaggccgccaacgtgctgctgagcctggacgagacctacgccgacgtgatgcccgtgcagaccagcgccagcgccaccagcgccttcgtgagcatcatgagaggctgcgacaacatgtgcagctactgcatcgtgcccttcaccagaggcagagagagaagcagacccatcgccagcatcctggaggaggtgaagaagctgagcgagcaggtgctgcagctgatccacgagagagacaacatctgcaagcagatccacctgcccgcccagagcggcagcagcagagtgctggaggccatgagaagaggctacagcagagaggcctacgtggagctggtgcaccacatcagagagagcatccccggcgtgagcctgagcagcgacttcatcgccggcttctgcggcgagaccgaggaggaccacgtgcagaccgtgagcctgctgagagaggtgcagtacaacatgggcttcctgttcgcctacagcatgagacagaagaccagagcctaccacagactgaaggacgacgtgcccgaggaggtgaagctgagaagactggaggagctgatcaccatcttcagagaggaggccaccaaggccaaccagaccagcgtgggctgcacccagctggtgctggtggagggcctgagcaagagaagcgccaccgacctgtgcggcagaaacgacggcaacctgaaggtgatcttccccgacgccgagatggaggacgtgaacaaccccggcctgagagtgagagcccagcccggcgactacgtgctggtgaagatcaccagcgccagcagccagaccctgagaggccacgtgctgtgcagaaccaccctgagagacagcagcgcctactgctag

SEQ ID NO: 9992 - DNA, 1764 bp, synthetic construct
  misc_feature 1..1764: note = Description of Artificial Sequence: Synthetic coding sequence
  source 1..1764: mol_type = other DNA
atgcaccccctgcagtgcgtgctgcaggtgcagagaagcctgggctggggccccctggccagcgtgagctggctgagcctgagaatgtgcagagcccacagcagcctgagcagcaccatgtgccccagccccgagagacaggaggacggcgccagaaaggacttcagcagcagactggccgccggccccaccttccagcacttcctgaagagcgccagcgccccccaggagaagctgagcagcgaggtggaggacccccccccctacctgatgatggacgagctgctgggcagacagagaaaggtgtacctggagacctacggctgccagatgaacgtgaacgacaccgagatcgcctggagcatcctgcagaagagcggctacctgagaaccagcaacctgcaggaggccgacgtgatcctgctggtgacctgcagcatcagagagaaggccgagcagaccatctggaacagactgcaccagctgaaggccctgaagaccagaagacccagaagcagagtgcccctgagaatcggcatcctgggctgcatggccgagagactgaaggaggagatcctgaacagagagaagatggtggacatcctggccggccccgacgcctacagagacctgcccagactgctggccgtggccgagagcggccagcaggccgccaacgtgctgctgagcctggacgagacctacgccgacgtgatgcccgtgcagaccagcgccagcgccaccagcgccttcgtgagcatcatgagaggctgcgacaacatgtgcagctactgcatcgtgcccttcaccagaggcagagagagaagcagacccatcgccagcatcctggaggaggtgaagaagctgagcgagcagggcctgaaggaggtgaccctgctgggccagaacgtgaacagcttcagagacaacagcgaggtgcagttcaacagcgccgtgcccaccaacctgagcagaggcttcaccaccaactacaagaccaagcagggcggcctgagattcgcccacctgctggaccaggtgagcagagtggaccccgagatgagaatcagattcaccagcccccaccccaaggacttccccgacgaggtgctgcagctgatccacgagagagacaacatctgcaagcagatccacctgcccgcccagagcggcagcagcagagtgctggaggccatgagaagaggctacagcagagaggcctacgtggagctggtgcaccacatcagagagagcatccccggcgtgagcctgagcagcgacttcatcgccggcttctgcggcgagaccgaggaggaccacgtgcagaccgtgagcctgctgagagaggtgcagtacaacatgggcttcctgttcgcctacagcatgagacagaagaccagagcctaccacagactgaaggacgacgtgcccgaggaggtgaagctgagaagactggaggagctgatcaccatcttcagagaggaggccaccaaggccaaccagaccagcgtgggctgcacccagctggtgctggtggagggcctgagcaagagaagcgccaccgacctgtgcggcagaaacgacggcaacctgaaggtgatcttccccgacgccgagatggaggacgtgaacaaccccggcctgagagtgagagcccagcccggcgactacgtgctggtgaagatcaccagcgccagcagccagaccctgagaggccacgtgctgtgcagaaccaccctgagagacagcagcgcctactgctag

SEQ ID NO: 9993 - DNA, 1806 bp, synthetic construct
  misc_feature 1..1806: note = Description of Artificial Sequence: Synthetic coding sequence
  source 1..1806: mol_type = other DNA
atgcaccccctgcagtgcgtgctgcaggtgcagagaagcctgggctggggccccctggccagcgtgagctggctgagcctgagaatgtgcagagcccacagcagcctgagcagcaccatgtgccccagccccgagagacaggaggacggcgccagaaaggacttcagcagcagactggccgccggccccaccttccagcacttcctgaagagcgccagcgccccccaggagaagctgagcagcgaggtggaggacccccccccctacctgatgatggacgagctgctgggcagacagagaaaggtgtacctggagacctacggctgccagatgaacgtgaacgacaccgagatcgcctggagcatcctgcagaagagcggctacctgagaaccagcaacctgcaggaggccgacgtgatcctgctggtgacctgcagcatcagagagaaggccgagcagaccatctggaacagactgcaccagctgaaggccctgaagaccagaagacccagaagcagagtgcccctgagaatcggcatcctgggctgcatggccgagagactgaaggaggagatcctgaacagagagaagatggtggacatcctggccggccccgacgcctacagagacctgcccagactgctggccgtggccgagagcggccagcaggccgccaacgtgctgctgagcctggacgagacctacgccgacgtgatgcccgtgcagaccagcgccagcgccaccagcgccttcgtgagcatcatgagaggctgcgacaacatgtgcagctactgcatcgtgcccttcaccagaggcagagagagaagcagacccatcgccagcatcctggaggaggtgaagaagctgagcgagcaggtgttcctgccccccagaccccccaaggtgctgggcctgcagggcctgaaggaggtgaccctgctgggccagaacgtgaacagcttcagagacaacagcgaggtgcagttcaacagcgccgtgcccaccaacctgagcagaggcttcaccaccaactacaagaccaagcagggcggcctgagattcgcccacctgctggaccaggtgagcagagtggaccccgagatgagaatcagattcaccagcccccaccccaaggacttccccgacgaggtgctgcagctgatccacgagagagacaacatctgcaagcagatccacctgcccgcccagagcggcagcagcagagtgctggaggccatgagaagaggctacagcagagaggcctacgtggagctggtgcaccacatcagagagagcatccccggcgtgagcctgagcagcgacttcatcgccggcttctgcggcgagaccgaggaggaccacgtgcagaccgtgagcctgctgagagaggtgcagtacaacatgggcttcctgttcgcctacagcatgagacagaagaccagagcctaccacagactgaaggacgacgtgcccgaggaggtgaagctgagaagactggaggagctgatcaccatcttcagagaggaggccaccaaggccaaccagaccagcgtgggctgcacccagctggtgctggtggagggcctgagcaagagaagcgccaccgacctgtgcggcagaaacgacggcaacctgaaggtgatcttccccgacgccgagatggaggacgtgaacaaccccggcctgagagtgagagcccagcccggcgactacgtgctggtgaagatcaccagcgccagcagccagaccctgagaggccacgtgctgtgcagaaccaccctgagagacagcagcgcctactgctag

SEQ ID NO: 9994 - DNA, 984 bp, synthetic construct
  misc_feature 1..984: note = Description of Artificial Sequence: Synthetic coding sequence
  source 1..984: mol_type = other DNA
atgaacgtgaacgacaccgagatcgcctggagcatcctgcagaagagcggctacctgagaaccagcaacctgcaggaggccgacgtgatcctgctggtgacctgcagcatcagagagaaggccgagcagaccatctggaacagactgcaccagctgaaggccctgaagaccagaagacccagaagcagagtgcccctgagaatcggcatcctgggctgcatggccgagagactgaaggaggagatcctgaacagagagaagatggtggacatcctggccggccccgacgcctacagagacctgcccagactgctggccgtggccgagagcggccagcaggccgccaacgtgctgctgagcctggacgagacctacgccgacgtgatgcccgtgcagaccagcgccagcgccaccagcgccttcgtgtacagcagagaggcctacgtggagctggtgcaccacatcagagagagcatccccggcgtgagcctgagcagcgacttcatcgccggcttctgcggcgagaccgaggaggaccacgtgcagaccgtgagcctgctgagagaggtgcagtacaacatgggcttcctgttcgcctacagcatgagacagaagaccagagcctaccacagactgaaggacgacgtgcccgaggaggtgaagctgagaagactggaggagctgatcaccatcttcagagaggaggccaccaaggccaaccagaccagcgtgggctgcacccagctggtgctggtggagggcctgagcaagagaagcgccaccgacctgtgcggcagaaacgacggcaacctgaaggtgatcttccccgacgccgagatggaggacgtgaacaaccccggcctgagagtgagagcccagcccggcgactacgtgctggtgaagatcaccagcgccagcagccagaccctgagaggccacgtgctgtgcagaaccaccctgagagacagcagcgcctactgctag

SEQ ID NO: 9995 - DNA, 1494 bp, synthetic construct
  misc_feature 1..1494: note = Description of Artificial Sequence: Synthetic coding sequence
  source 1..1494: mol_type = other DNA
atgatggacgagctgctgggcagacagagaaaggtgtacctggagacctacggctgccagatgaacgtgaacgacaccgagatcgcctggagcatcctgcagaagagcggctacctgagaaccagcaacctgcaggaggccgacgtgatcctgctggtgacctgcagcatcagagagaaggccgagcagaccatctggaacagactgcaccagctgaaggccctgaagaccagaagacccagaagcagagtgcccctgagaatcggcatcctgggctgcatggccgagagactgaaggaggagatcctgaacagagagaagatggtggacatcctggccggccccgacgcctacagagacctgcccagactgctggccgtggccgagagcggccagcaggccgccaacgtgctgctgagcctggacgagacctacgccgacgtgatgcccgtgcagaccagcgccagcgccaccagcgccttcgtgagcatcatgagaggctgcgacaacatgtgcagctactgcatcgtgcccttcaccagaggcagagagagaagcagacccatcgccagcatcctggaggaggtgaagaagctgagcgagcagggcctgaaggaggtgaccctgctgggccagaacgtgaacagcttcagagacaacagcgaggtgcagttcaacagcgccgtgcccaccaacctgagcagaggcttcaccaccaactacaagaccaagcagggcggcctgagattcgcccacctgctggaccaggtgagcagagtggaccccgagatgagaatcagattcaccagcccccaccccaaggacttccccgacgaggtgctgcagctgatccacgagagagacaacatctgcaagcagatccacctgcccgcccagagcggcagcagcagagtgctggaggccatgagaagaggctacagcagagaggcctacgtggagctggtgcaccacatcagagagagcatccccggcgtgagcctgagcagcgacttcatcgccggcttctgcggcgagaccgaggaggaccacgtgcagaccgtgagcctgctgagagaggtgcagtacaacatgggcttcctgttcgcctacagcatgagacagaagaccagagcctaccacagactgaaggacgacgtgcccgaggaggtgaagctgagaagactggaggagctgatcaccatcttcagagaggaggccaccaaggccaaccagaccagcgtgggctgcacccagctggtgctggtggagggcctgagcaagagaagcgccaccgacctgtgcggcagaaacgacggcaacctgaaggtgatcttccccgacgccgagatggaggacgtgaacaaccccggcctgagagtgagagcccagcccggcgactacgtgctggtgaagatcaccagcgccagcagccagaccctgagaggccacgtgctgtgcagaaccaccctgagagacagcagcgcctactgctag

SEQ ID NO: 9996 - DNA, 1281 bp, synthetic construct
  misc_feature 1..1281: note = Description of Artificial Sequence: Synthetic coding sequence
  source 1..1281: mol_type = other DNA
atgcaccccctgcagtgcgtgctgcaggtgcagagaagcctgggctggggccccctggccagcgtgagctggctgagcctgagaatgtgcagagcccacagcagcctgagcagcaccatgtgccccagccccgagagacaggaggacggcgccagaaaggacttcagcagcagactggccgccggccccaccttccagcacttcctgaagagcgccagcgccccccaggagaagctgagcagcgaggtggaggacccccccccctacctgatgatggacgagctgctgggcagacagagaaaggtgtacctggagacctacggctgccagatgaacgtgaacgacaccgagatcgcctggagcatcctgcagaagagcggctacctgagaaccagcaacctgcaggaggccgacgtgatcctgctggtgacctgcagcatcagagagaaggccgagcagaccatctggaacagactgcaccagctgaaggccctgaagaccagaagacccagaagcagagtgcccctgagaatcggcatcctgggctgcatggccgagagactgaaggaggagatcctgaacagagagaagatggtggacatcctggccggccccgacgcctacagagacctgcccagactgctggccgtggccgagagcggccagcaggccgccaacgtgctgctgagcctggacgagacctacgccgacgtgatgcccgtgcagaccagcgccagcgccaccagcgccttcgtgagcatcatgagaggctgcgacaacatgtgcagctactgcatcgtgcccttcaccagaggcagagagagaagcagacccatcgccagcatcctggaggaggtgaagaagctgagcgagcagggcctgaaggaggtgaccctgctgggccagaacgtgaacagcttcagagacaacagcgaggtgcagttcaacagcgccgtgcccaccaacctgagcagaggcttcaccaccaactacaagaccaagcagggcggcctgagattcgcccacctgctggaccaggtgagcagagtggaccccgagatgagaatcagattcaccagcccccaccccaaggacttccccgacgaggtgctgcagctgatccacgagagagacaacatctgcaagcagatccacctgcccgcccagagcggcagcagcagagtgctggaggccatgagaagaggctacagcagagaggcctacgtggagctggtgcaccacatcagagagagcatccccgaggacaccggcatcagctag

SEQ ID NO: 9997 - DNA, 1122 bp, synthetic construct
  misc_feature 1..1122: note = Description of Artificial Sequence: Synthetic coding sequence
  source 1..1122: mol_type = other DNA
ggcgacggccagaacctgttcaccaaggacgtgaccgtgatcgagggcgaggtggccaccatcagctgccaggtgaacaagagcgacgacagcgtgatccagctgctgaaccccaacagacagaccatctacttcagagacttcagacccctgaaggacagcagattccagctgctgaacttcagcagcagcgagctgaaggtgagcctgaccaacgtgagcatcagcgacgagggcagatacttctgccagctgtacaccgaccccccccaggagagctacaccaccatcaccgtgctggtgccccccagaaacctgatgatcgacatccagaaggacaccgccgtggagggcgaggagatcgaggtgaactgcaccgccatggccagcaagcccgccaccaccatcagatggttcaagggcaacaccgagctgaagggcaagagcgaggtggaggagtggagcgacatgtacaccgtgaccagccagctgatgctgaaggtgcacaaggaggacgacggcgtgcccgtgatctgccaggtggagcaccccgccgtgaccggcaacctgcagacccagagatacctggaggtgcagtacaagccccaggtgcacatccagatgacctaccccctgcagggcctgaccagagagggcgacgccctggagctgacctgcgaggccatcggcaagccccagcccgtgatggtgacctgggtgagagtggacgacgagatgccccagcacgccgtgctgagcggccccaacctgttcatcaacaacctgaacaagaccgacaacggcacctacagatgcgaggccagcaacatcgtgggcaaggcccacagcgactacatgctgtacgtgtacgacagcagagccggcgaggagggcagcatcagagccgtggaccacgccgtgatcggcggcgtggtggccgtggtggtgttcgccatgctgtgcctgctgatcatcctgggcagatacttcgccagacacaagggcacctacttcacccacgaggccaagggcgccgacgacgccgccgacgccgacaccgccatcatcaacgccgagggcggccagaacaacagcgaggagaagaaggagtacttcatctag

SEQ ID NO: 9998 - DNA, 1329 bp, synthetic construct
  misc_feature 1..1329: note = Description of Artificial Sequence: Synthetic coding sequence
  source 1..1329: mol_type = other DNA
atggccagcgtggtgctgcccagcggcagccagtgcgccgccgccgccgccgccgccgccccccccggcctgagactgagactgctgctgctgctgttcagcgccgccgccctgatccccaccggcgacggccagaacctgttcaccaaggacgtgaccgtgatcgagggcgaggtggccaccatcagctgccaggtgaacaagagcgacgacagcgtgatccagctgctgaaccccaacagacagaccatctacttcagagacttcagacccctgaaggacagcagattccagctgctgaacttcagcagcagcgagctgaaggtgagcctgaccaacgtgagcatcagcgacgagggcagatacttctgccagctgtacaccgaccccccccaggagagctacaccaccatcaccgtgctggtgccccccagaaacctgatgatcgacatccagaaggacaccgccgtggagggcgaggagatcgaggtgaactgcaccgccatggccagcaagcccgccaccaccatcagatggttcaagggcaacaccgagctgaagggcaagagcgaggtggaggagtggagcgacatgtacaccgtgaccagccagctgatgctgaaggtgcacaaggaggacgacggcgtgcccgtgatctgccaggtggagcaccccgccgtgaccggcaacctgcagacccagagatacctggaggtgcagtacaagccccaggtgcacatccagatgacctaccccctgcagggcctgaccagagagggcgacgccctggagctgacctgcgaggccatcggcaagccccagcccgtgatggtgacctgggtgagagtggacgacgagatgccccagcacgccgtgctgagcggccccaacctgttcatcaacaacctgaacaagaccgacaacggcacctacagatgcgaggccagcaacatcgtgggcaaggcccacagcgactacatgctgtacgtgtacgacccccccaccaccatccccccccccaccaccaccaccaccaccaccaccaccaccaccaccaccatcctgaccatcatcaccgacagcagagccggcgaggagggcagcatcagagccgtggaccacgccgtgatcggcggcgtggtggccgtggtggtgttcgccatgctgtgcctgctgatcatcctgggcagatacttcgccagacacaagggcacctacttcacccacgaggccaagggcgccgacgacgccgccgacgccgacaccgccatcatcaacgccgagggcggccagaacaacagcgaggagaagaaggagtacttcatctag

SEQ ID NO: 9999 - DNA, 384 bp, synthetic construct
  misc_feature 1..384: note = Description of Artificial Sequence: Synthetic coding sequence
  source 1..384: mol_type = other DNA
atgctgtacgtgtacgacccccccaccaccatccccccccccaccaccaccaccaccaccaccaccaccaccaccaccaccatcctgaccatcatcaccgacaccaccgccaccaccgagcccgccgtgcacgacagcagagccggcgaggagggcagcatcagagccgtggaccacgccgtgatcggcggcgtggtggccgtggtggtgttcgccatgctgtgcctgctgatcatcctgggcagatacttcgccagacacaagggcacctacttcacccacgaggccaagggcgccgacgacgccgccgacgccgacaccgccatcatcaacgccgagggcggccagaacaacagcgaggagaagaaggagtacttcatctag

SEQ ID NO: 10000 - DNA, 1245 bp, synthetic construct
  misc_feature 1..1245: note = Description of Artificial Sequence: Synthetic coding sequence
  source 1..1245: mol_type = other DNA
atggccagcgtggtgctgcccagcggcagccagtgcgccgccgccgccgccgccgccgccccccccggcctgagactgagactgctgctgctgctgttcagcgccgccgccctgatccccaccggcgacggccagaacctgttcaccaaggacgtgaccgtgatcgagggcgaggtggccaccatcagctgccaggtgaacaagagcgacgacagcgtgatccagctgctgaaccccaacagacagaccatctacttcagagacttcagacccctgaaggacagcagattccagctgctgaacttcagcagcagcgagctgaaggtgagcctgaccaacgtgagcatcagcgacgagggcagatacttctgccagctgtacaccgaccccccccaggagagctacaccaccatcaccgtgctggtgccccccagaaacctgatgatcgacatccagaaggacaccgccgtggagggcgaggagatcgaggtgaactgcaccgccatggccagcaagcccgccaccaccatcagatggttcaagggcaacaccgagctgaagggcaagagcgaggtggaggagtggagcgacatgtacaccgtgaccagccagctgatgctgaaggtgcacaaggaggacgacggcgtgcccgtgatctgccaggtggagcaccccgccgtgaccggcaacctgcagacccagagatacctggaggtgcagtacaagccccaggtgcacatccagatgacctaccccctgcagggcctgaccagagagggcgacgccctggagctgacctgcgaggccatcggcaagccccagcccgtgatggtgacctgggtgagagtggacgacgagatgccccagcacgccgtgctgagcggccccaacctgttcatcaacaacctgaacaagaccgacaacggcacctacagatgcgaggccagcaacatcgtgggcaaggcccacagcgactacatgctgtacgtgtacgacagcagagccggcgaggagggcagcatcagagccgtggaccacgccgtgatcggcggcgtggtggccgtggtggtgttcgccatgctgtgcctgctgatcatcctgggcagatacttcgccagacacaagggcacctacttcacccacgaggccaagggcgccgacgacgccgccgacgccgacaccgccatcatcaacgccgagggcggccagaacaacagcgaggagaagaaggagtacttcatctag

SEQ ID NO: 10001 - DNA, 5346 bp, synthetic construct
  misc_feature 1..5346: note = Description of Artificial Sequence: Synthetic coding sequence
  source 1..5346: mol_type = other DNA
atgaccacctacagagccatccccagcgacggcgtggacctggccgccagctgcggcgccagagtgggcgacgtgctgcccggcccccacaccggcgactacgcccccctgggcttctgggcccagaacggcagcatgagccagcccctgggcgagagccccgccaccgccaccgccaccgccaccgccaccaccagacccagccccaccacccccgccatgcccaagatgggcgtgagagccagagtggccgactggccccccaagagagaggccctgagagagcacagcaaccccagccccagccaggacaccgacggcaccaaggccaccaagatggcccacagcatgagaagcatccagaacggccagccccccaccagcacccccgccagcagcggcagcaaggccttccacagactgagcagaagaagaagcaaggacgtggagttccaggacggctggcccagaagccccggcagagccttcctgcccctgagacacagaagcagcagcgagatcaccctgagcgagtgcgacgccgaggacgccggcgagcccagaggcgccagacacaccggcgccctgcccctgttcagagagtacggcagcaccagcagcatcgacgtgcagggcatgcccgagcagagcttcttcgacatcctgaacgagttcagaagcgagcagcccgacgccagaggctgccaggccctgaccgagctgctgagagccgaccccggcccccacctgatgggcggcggcggcggcgccaagggcgacagccacaacggccagcccgccaaggacagcctgctgcccctgcagcccaccaaggagaaggagaaggccagaaagaagcccgccagaggcctgggcggcggcgacaccgtggacagcagcatcttcagaaagctgagaagcagcaagcccgagggcgaggccggcagaagccccggcgaggccgacgagggcagaagcccccccgaggccagcagaccctgggtgtgccagaagagcttcgcccacttcgacgtgcagagcatgctgttcgacctgaacgaggccgccgccaacagagtgagcgtgagccagagaagaaacaccaccaccggcgccagcgccgccagcgccgccagcgccatggccagcctgaccgccagcagagcccacagcctgggcggcctggaccccgccttcaccagcaccgaggacctgaactgcaaggagaacctggagcaggacctgggcgacgacaacagcaacgacctgctgctgagctgcccccacttcagaaacgagatcggcggcgagtgcgagagaaacgtgagcttcagcagagccagcgtgggcagccccagcagcggcgagggccacctggccgagcccgccctgagcgcctacagaaccaacgccagcatcagcgtgctggaggtgcccaaggagcagcagagaacccagagcagacccagacagtacagcatcgagcacgtggacctgggcgccagatactaccaggactacttcgtgggcaaggagcacgccaactacttcggcgtggacgagaagctgggccccgtggccgtgagcatcaagagagagaagctggaggaccacaaggagcacggcccccagtaccagtacagaatcatcttcagaaccagagagctgatcaccctgagaggcagcatcctggaggacgccacccccaccgccaccaagcacggcaccggcagaggcctgcccctgaaggacgccctggagtacgtgatccccgagctgaacatccactgcctgagactggccctgaacacccccaaggtgaccgagcagctgctgaagctggacgagcagggcctgtgcagaaagcacaaggtgggcatcctgtactgcaaggccggccagagcagcgaggaggagatgtacaacaacgaggaggccggccccgccttcgaggagttcctgagcctgatcggcgagaaggtgtgcctgaagggcttcaccaagtacgccgcccagctggacgtgaagaccgacagcaccggcacccacagcctgtacaccatgtaccaggactacgagatcatgttccacgtgagcaccctgctgccctacacccccaacaacagacagcagctgctgagaaagagacacatcggcaacgacatcgtgaccatcatcttccaggagcccggcgccctgcccttcacccccaagaacatcagaagccacttccagcacgtgttcatcatcgtgagagtgcacaacccctgcaccgacaacgtgtgctacagcatggccgtgaccagaagcaaggacgccccccccttcggcccccccatccccagcggcaccaccttcagaaagagcgacgtgttcagagacttcctgctggccaaggtgatcaacgccgagaacgccgcccacaagagcgacaagttccacaccatggccaccagaaccagacaggagtacctgaaggacctggccgagaactgcgtgagcaacacccccatcgacagcaccggcaagttcaacctgatcagcctgaccagcaagaagaaggagaagaccaaggccagagccggcgccgagcagcacagcgccggcgccatcgcctggagagtggtggcccaggactacgcccagggcgtggagatcgactgcatcctgggcatcagcaacgagttcgtggtgctgctggacctgagaaccaaggaggtggtgttcaactgctactgcggcgacgtgatcggctggacccccgacagcagcaccctgaagatcttctacggcagaggcgaccacatcttcctgcaggccaccgagggcagcgtggaggacatcagagagatcgtgcagagactgaaggtgatgaccagcggctgggagaccgtggacatgaccctgagaagaaacggcctgggccagctgggcttccacgtgaagtacgacggcaccgtggccgaggtggaggactacggcttcgcctggcaggccggcctgagacagggcagcagactggtggagatctgcaaggtggccgtggtgaccctgacccacgaccagatgatcgacctgctgagaaccagcgtgaccgtgaaggtggtgatcatcccccccttcgaggacggcacccccagaagaggctggcccgagacctacgacatgaacaccagcgagcccaagaccgagcaggagagcatcacccccggcggcagacccccctacagaagcaacgccccctggcagtggagcggccccgccagccacaacagcctgcccgccagcaagtgggccacccccaccacccccggccacgcccagagcctgagcagacccctgaagcagacccccatcgtgcccttcagagagagccagcccctgcacagcaagagacccgtgagcttccccgagaccccctacaccgtgagccccgccggcgccgacagagtgcccccctacagacagcccagcggcagcttcagcacccccggcagcgccacctacgtgagatacaagcccagccccgagagatacaccgccgccccccaccccctgctgagcctggacccccacttcagccacgacggcaccagcagcggcgacagcagcagcggcggcctgaccagccaggagagcaccatggagagacagaagcccgagcccctgtggcacgtgcccgcccaggccagactgagcgccatcgccggcagcagcggcaacaagcaccccagcagacaggacgccgccggcaaggacagccccaacagacacagcaagggcgagccccagtacagcagccacagcagcagcaacaccctgagcagcaacgccagcagcagccacagcgacgacagatggttcgaccccctggaccccctggagcccgagcaggaccccctgagcaagggcggcagcagcgacagcggcatcgacaccaccctgtacaccagcagccccagctgcatgagcctggccaaggcccccagacccgccaagccccacaagccccccggcagcatgggcctgtgcggcggcggcagagaggccgccggcagaagccaccacgccgacagaagaagagaggtgagccccgcccccgccgtggccggccagagcaagggctacagacccaagctgtacagcagcggcagcagcacccccaccggcctggccggcggcagcagagacccccccagacagcccagcgacatgggcagcagagtgggctaccccgcccaggtgtacaagaccgccagcgccgagacccccagacccagccagctggcccagcccagccccttccagctgagcgccagcgtgcccaagagcttcttcagcaagcagcccgtgagaaacaagcaccccaccggctggaagagaaccgaggagcccccccccagacccctgcccttcagcgaccccaagaagcaggtggacaccaacaccaagaacgtgttcggccagcccagactgagagccagcctgagagacctgagaagccccagaaagaactacaagagcaccatcgaggacgacctgaagaagctgatcatcatggacaacctgggccccgagcaggagagagacaccggccagagcccccagaagggcctgcagagaaccctgagcgacgagagcctgtgcagcggcagaagagagcccagcttcgccagccccgccggcctggagcccggcctgcccagcgacgtgctgttcaccagcacctgcgccttccccagcagcaccctgcccgccagaagacagcaccagcacccccacccccccgtgggccccggcgccacccccgccgccggcagcggcttccccgagaagaagagcaccatcagcgccagcgagctgagcctggccgacggcagagacagacccctgagaagactggaccccggcctgatgcccctgcccgacaccgccgccggcctggagtggagcagcctggtgaacgccgccaaggcctacgaggtgcagagagccgtgagcctgttcagcctgaacgaccccgccctgagccccgacatcccccccgcccacagccccgtgcacagccacctgagcctggagagaggcccccccacccccagaaccacccccaccatgagcgaggagccccccctggacctgaccggcaaggtgtaccagctggaggtgatgctgaagcagctgcacaccgacctgcagaaggagaagcaggacaaggtggtgctgcagagcgaggtggccagcctgagacagaacaaccagagactgcaggaggagagccaggccgccagcgagcagctgagaaagttcgccgagatcttctgcagagagaagaaggagctgtag

SEQ ID NO: 10002 - DNA, 660 bp, synthetic construct
  misc_feature 1..660: note = Description of Artificial Sequence: Synthetic coding sequence
  source 1..660: mol_type = other DNA
atggaggccgccagagactacgccggcgccctgatcagacccctgaccttcatgggcagccagaccaagagagtgctgttcacccccctgatgcaccccgccagacccttcagagtgagcaaccacgacagaagcagcagaagaggcgtgatggccagcagcctgcaggagctgatcagcaagaccctggacgccctggtgatcgccaccggcctggtgaccctggtgctggaggaggacggcaccgtggtggacaccgaggagttcttccagaccctgggcgacaacacccacttcatgatcctggagaagggccagaagtggatgcccggcagccagcacgtgcccacctgcagcccccccaagagaagcggcatcgccagagtgaccttcgacctgtacagactgaaccccaaggacttcatcggctgcctgaacgtgaaggccaccatgtacgagatgtacagcgtgagctacgacatcagatgcaccggcctgaagggcctgctgagaagcctgctgagattcctgagctacagcgcccaggtgaccggccagttcctgatctacctgggcacctacatgctgagagtgctggacgacaaggaggagagacccagcctgagaagccaggccaagggcagattcacctgcggctag

SEQ ID NO: 10003 - DNA, 660 bp, synthetic construct
  misc_feature 1..660: note = Description of Artificial Sequence: Synthetic coding sequence
  source 1..660: mol_type = other DNA
atggagtacctgagcgccctgaaccccagcgacctgctgagaagcgtgagcaacatcagcagcgagttcggcagaagagtgtggaccagcgccccccccccccagagacccttcagagtgtgcgaccacaagagaaccatcagaaagggcctgaccgccgccaccagacaggagctgctggccaaggccctggagaccctgctgctgaacggcgtgctgaccctggtgctggaggaggacggcaccgccgtggacagcgaggacttcttccagctgctggaggacgacacctgcctgatggtgctgcagagcggccagagctggagccccaccagaagcggcgtgctgagctacggcctgggcagagagagacccaagcacagcaaggacatcgccagattcaccttcgacgtgtacaagcagaaccccagagacctgttcggcagcctgaacgtgaaggccaccttctacggcctgtacagcatgagctgcgacttccagggcctgggccccaagaaggtgctgagagagctgctgagatggaccagcaccctgctgcagggcctgggccacatgctgctgggcatcagcagcaccctgagacacgccgtggagggcgccgagcagtggcagcagaagggcagactgcacagctactag

SEQ ID NO: 10004 - DNA, 660 bp, synthetic construct; identical to SEQ ID NO: 10003
  misc_feature 1..660: note = Description of Artificial Sequence: Synthetic coding sequence
  source 1..660: mol_type = other DNA

SEQ ID NO: 10005 - DNA, 660 bp, synthetic construct; identical to SEQ ID NO: 10003
  misc_feature 1..660: note = Description of Artificial Sequence: Synthetic coding sequence
  source 1..660: mol_type = other DNA

SEQ ID NO: 10006 - DNA, 660 bp, synthetic construct; identical to SEQ ID NO: 10003
  misc_feature 1..660: note = Description of Artificial Sequence: Synthetic coding sequence
  source 1..660: mol_type = other DNA

SEQ ID NO: 10007 - DNA, 1860 bp, synthetic construct
  misc_feature 1..1860: note = Description of Artificial Sequence: Synthetic coding sequence
  source 1..1860: mol_type = other DNA
atgaacctggagagactgagaaagagagtgagacagtacctggaccagcagcagtaccagagcgccctgttctgggccgacaaggtggccagcctgagcagagagccccaggacatctactggctggcccagtgcctgtacctgaccgcccagtaccacagagccgcccacgccctgagaagcagaaagctggacaagctgtacgaggcctgcagatacctggccgccagatgccactacgccgccaaggagcaccagcaggccctggacgtgctggacatggaggagcccatcaacaagagactgttcgagaagtacctgaaggacgagagcggcttcaaggaccccagcagcgactgggagatgagccagagcagcatcaagagcagcatctgcctgctgagaggcaagatctacgacgccctggacaacagaaccctggccacctacagctacaaggaggccctgaagctggacgtgtactgcttcgaggccttcgacctgctgaccagccaccacatgctgaccgcccaggaggagaaggagctgctggagagcctgcccctgagcaagctgtgcaacgaggagcaggagctgctgagattcctgttcgagaacaagctgaagaagtacaacaagcccagcgagaccgtgatccccgagagcgtggacggcctgcaggagaacctggacgtggtggtgagcctggccgagagacactactacaactgcgacttcaagatgtgctacaagctgaccagcgtggtgatggagaaggaccccttccacgccagctgcctgcccgtgcacatcggcaccctggtggagctgaacaaggccaacgagctgttctacctgagccacaagctggtggacctgtaccccagcaaccccgtgagctggttcgccgtgggctgctactacctgatggtgggccacaagaacgagcacgccagaagatacctgagcaaggccaccaccctggagaagacctacggccccgcctggatcgcctacggccacagcttcgccgtggagagcgagcacgaccaggccatggccgcctacttcaccgccgcccagctgatgaagggctgccacctgcccatgctgtacatcggcctggagtacggcctgaccaacaacagcaagctggccgagagattcttcagccaggccctgagcatcgcccccgaggaccccttcgtgatgcacgaggtgggcgtggtggccttccagaacggcgagtggaagaccgccgagaagtggttcctggacgccctggagaagatcaaggccatcggcaacgaggtgaccgtggacaagtgggagcccctgctgaacaacctgggccacgtgtgcagaaagctgaagaagtacgccgaggccctggactaccacagacaggccctggtgctgatcccccagaacgccagcacctacagcgccatcggctacatccacagcctgatgggcaacttcgagaacgccgtggactacttccacaccgccctgggcctgagaagagacgacaccttcagcgtgaccatgctgggccactgcatcgagatgtacatcggcgacagcgaggcctacatcggcgccgacatcaaggacaagctgaagtgctacgacttcgacgtgcacaccatgaagaccctgaagaacatcatcagccccccctgggacttcagagagttcgaggtggagaagcagaccgccgaggagaccggcctgacccccctggagaccagcagaaagacccccgacagcagacccagcctggaggagaccttcgagatcgagatgaacgagagcgacatgatgctggagaccagcatgagcgaccacagcacctag

SEQ ID NO: 10008 - DNA, 1428 bp, synthetic construct
  misc_feature 1..1428: note = Description of Artificial Sequence: Synthetic coding sequence
  source 1..1428: mol_type = other DNA
atggaggagcccatcaacaagagactgttcgagaagtacctgaaggacgagagcggcttcaaggaccccagcagcgactgggagatgagccagagcagcatcaagagcagcatctgcctgctgagaggcaagatctacgacgccctggacaacagaaccctggccacctacagctacaaggaggccctgaagctggacgtgtactgcttcgaggccttcgacctgctgaccagccaccacatgctgaccgcccaggaggagaaggagctgctggagagcctgcccctgagcaagctgtgcaacgaggagcaggagctgctgagattcctgttcgagaacaagctgaagaagtacaacaagcccagcgagaccgtgatccccgagagcgtggacggcctgcaggagaacctggacgtggtggtgagcctggccgagagacactactacaactgcgacttcaagatgtgctacaagctgaccagcgtggtgatggagaaggaccccttccacgccagctgcctgcccgtgcacatcggcaccctggtggagctgaacaaggccaacgagctgttctacctgagccacaagctggtggacctgtaccccagcaaccccgtgagctggttcgccgtgggctgctactacctgatggtgggccacaagaacgagcacgccagaagatacctgagcaaggccaccaccctggagaagacctacggccccgcctggatcgcctacggccacagcttcgccgtggagagcgagcacgaccaggccatggccgcctacttcaccgccgcccagctgatgaagggctggaagaccgccgagaagtggttcctggacgccctggagaagatcaaggccatcggcaacgaggtgaccgtggacaagtgggagcccctgctgaacaacctgggccacgtgtgcagaaagctgaagaagtacgccgaggccctggactaccacagacaggccctggtgctgatcccccagaacgccagcacctacagcgccatcggctacatccacagcctgatgggcaacttcgagaacgccgtggactacttccacaccgccctgggcctgagaagagacgacaccttcagcgtgaccatgctgggccactgcatcgagatgtacatcggcgacagcgaggcctacatcggcgccgacatcaaggacaagctgaagtgctacgacttcgacgtgcacaccatgaagaccctgaagaacatcatcagccccccctgggacttcagagagttcgaggtggagaagcagaccgccgaggagaccggcctgacccccctggagaccagcagaaagacccccgacagcagacccagcctggaggagaccttcgagatcgagatgaacgagagcgacatgatgctggagaccagcatgagcgaccacagcacctag

SEQ ID NO: 10009 - DNA, 1863 bp, synthetic construct
  misc_feature 1..1863: note = Description of Artificial Sequence: Synthetic coding sequence
  source 1..1863: mol_type = other DNA
atgaacctggagagactgagaaagagagtgagacagtacctggaccagcagcagtaccagagcgccctgttctgggccgacaaggtggccagcctgagcagagaggagccccaggacatctactggctggcccagtgcctgtacctgaccgcccagtaccacagagccgcccacgccctgagaagcagaaagctggacaagctgtacgaggcctgcagatacctggccgccagatgccactacgccgccaaggagcaccagcaggccctggacgtgctggacatggaggagcccatcaacaagagactgttcgagaagtacctgaaggacgagagcggcttcaaggaccccagcagcgactgggagatgagccagagcagcatcaagagcagcatctgcctgctgagaggcaagatctacgacgccctggacaacagaaccctggccacctacagctacaaggaggccctgaagctggacgtgtactgcttcgaggccttcgacctgctgaccagccaccacatgctgaccgcccaggaggagaaggagctgctggagagcctgcccctgagcaagctgtgcaacgaggagcaggagctgctgagattcctgttcgagaacaagctgaagaagtacaacaagcccagcgagaccgtgatccccgagagcgtggacggcctgcaggagaacctggacgtggtggtgagcctggccgagagacactactacaactgcgacttcaagatgtgctacaagctgaccagcgtggtgatggagaaggaccccttccacgccagctgcctgcccgtgcacatcggcaccctggtggagctgaacaaggccaacgagctgttctacctgagccacaagctggtggacctgtaccccagcaaccccgtgagctggttcgccgtgggctgctactacctgatggtgggccacaagaacgagcacgccagaagatacctgagcaaggccaccaccctggagaagacctacggccccgcctggatcgcctacggccacagcttcgccgtggagagcgagcacgaccaggccatggccgcctacttcaccgccgcccagctgatgaagggctgccacctgcccatgctgtacatcggcctggagtacggcctgaccaacaacagcaagctggccgagagattcttcagccaggccctgagcatcgcccccgaggaccccttcgtgatgcacgaggtgggcgtggtggccttccagaacggcgagtggaagaccgccgagaagtggttcctggacgccctggagaagatcaaggccatcggcaacgaggtgaccgtggacaagtgggagcccctgctgaacaacctgggccacgtgtgcagaaagctgaagaagtacgccgaggccctggactaccacagacaggccctggtgctgatcccccagaacgccagcacctacagcgccatcggctacatccacagcctgatgggcaacttcgagaacgccgtggactacttccacaccgccctgggcctgagaagagacgacaccttcagcgtgaccatgctgggccactgcatcgagatgtacatcggcgacagcgaggcctacatcggcgccgacatcaaggacaagctgaagtgctacgacttcgacgtgcacaccatgaagaccctgaagaacatcatcagccccccctgggacttcagagagttcgaggtggagaagcagaccgccgaggagaccggcctgacccccctggagaccagcagaaagacccccgacagcagacccagcctggaggagaccttcgagatcgagatgaacgagagcgacatgatgctggagaccagcatgagcgaccacagcacctag

SEQ ID NO: 10010 - DNA, 1863 bp, synthetic construct; identical to SEQ ID NO: 10009
  misc_feature 1..1863: note = Description of Artificial Sequence: Synthetic coding sequence
  source 1..1863: mol_type = other DNA

SEQ ID NO: 10011 - DNA, 1581 bp, synthetic construct
  misc_feature 1..1581: note = Description of Artificial Sequence: Synthetic coding sequence
  source 1..1581: mol_type = other DNA
atggaggagcccatcaacaagagactgttcgagaagtacctgaaggacgagagcggcttcaaggaccccagcagcgactgggagatgagccagagcagcatcaagagcagcatctgcctgctgagaggcaagatctacgacgccctggacaacagaaccctggccacctacagctacaaggaggccctgaagctggacgtgtactgcttcgaggccttcgacctgctgaccagccaccacatgctgaccgcccaggaggagaaggagctgctggagagcctgcccctgagcaagctgtgcaacgaggagcaggagctgctgagattcctgttcgagaacaagctgaagaagtacaacaagcccagcgagaccgtgatccccgagagcgtggacggcctgcaggagaacctggacgtggtggtgagcctggccgagagacactactacaactgcgacttcaagatgtgctacaagctgaccagcgtggtgatggagaaggaccccttccacgccagctgcctgcccgtgcacatcggcaccctggtggagctgaacaaggccaacgagctgttctacctgagccacaagctggtggacctgtaccccagcaaccccgtgagctggttcgccgtgggctgctactacctgatggtgggccacaagaacgagcacgccagaagatacctgagcaaggccaccaccctggagaagacctacggccccgcctggatcgcctacggccacagcttcgccgtggagagcgagcacgaccaggccatggccgcctacttcaccgccgcccagctgatgaagggctgccacctgcccatgctgtacatcggcctggagtacggcctgaccaacaacagcaagctggccgagagattcttcagccaggccctgagcatcgcccccgaggaccccttcgtgatgcacgaggtgggcgtggtggccttccagaacggcgagtggaagaccgccgagaagtggttcctggacgccctggagaagatcaaggccatcggcaacgaggtgaccgtggacaagtgggagcccctgctgaacaacctgggccacgtgtgcagaaagctgaagaagtacgccgaggccctggactaccacagacaggccctggtgctgatcccccagaacgccagcacctacagcgccatcggctacatccacagcctgatgggcaacttcgagaacgccgtggactacttccacaccgccctgggcctgagaagagacgacaccttcagcgtgaccatgctgggccactgcatcgagatgtacatcggcgacagcgaggcctacatcggcgccgacatcaaggacaagctgaagtgctacgacttcgacgtgcacaccatgaagaccctgaagaacatcatcagccccccctgggacttcagagagttcgaggtggagaagcagaccgccgaggagaccggcctgacccccctggagaccagcagaaagacccccgacagcagacccagcctggaggagaccttcgagatcgagatgaacgagagcgacatgatgctggagaccagcatgagcgaccacagcacctag

SEQ ID NO: 10012 - DNA, 1581 bp, synthetic construct; identical to SEQ ID NO: 10011
  misc_feature 1..1581: note = Description of Artificial Sequence: Synthetic coding sequence
  source 1..1581: mol_type = other DNA

SEQ ID NO: 10013 - DNA, 1428 bp, synthetic construct; identical to SEQ ID NO: 10008
  misc_feature 1..1428: note = Description of Artificial Sequence: Synthetic coding sequence
  source 1..1428: mol_type = other DNA

SEQ ID NO: 10014 - DNA, 1500 bp, synthetic construct
  misc_feature 1..1500: note = Description of Artificial Sequence: Synthetic coding sequence
  source 1..1500: mol_type = other DNA
atggcccagttcgccttcgagagcgacctgcacagcctgctgcagctggacgcccccatccccaacgccccccccgccagatggcagagaaaggccaaggaggccgccggccccgcccccagccccatgagagccgccaacagaagccacagcgccggcagaacccccggcagaacccccggcaagagcagcagcaaggtgcagaccacccccagcaagcccggcggcgacagatacatcccccacagaagcgccgcccagatggaggtggccagcttcctgctgagcaaggagaaccagcccgagaacagccagacccccaccaagaaggagcaccagaaggcctgggccctgaacctgaacggcttcgacgtggaggaggccaagatcctgagactgagcggcaagccccagaacgcccccgagggctaccagaacagactgaaggtgctgtacagccagaaggccacccccggcagcagcagaaagacctgcagatacatccccagcctgcccgacagaatcctggacgcccccgagatcagaaacgactactacctgaacctggtggactggagcagcggcaacgtgctggccgtggccctggacaacagcgtgtacctgtggagcgccagcagcggcgacatcctgcagctgctgcagatggagcagcccggcgagtacatcagcagcgtggcctggatcaaggagggcaactacctggccgtgggcaccagcagcgccgaggtgcagctgtgggacgtgcagcagcagaagagactgagaaacatgaccagccacagcgccagagtgggcagcctgagctggaacagctacatcctgagcagcggcagcagaagcggccacatccaccaccacgacgtgagagtggccgagcaccacgtggccaccctgagcggccacagccaggaggtgtgcggcctgagatgggcccccgacggcagacacctggccagcggcggcaacgacaacctggtgaacgtgtggcccagcgcccccggcgagggcggctgggtgcccctgcagaccttcacccagcaccagggcgccgtgaaggccgtggcctggtgcccctggcagagcaacgtgctggccaccggcggcggcaccagcgacagacacatcagaatctggaacgtgtgcagcggcgcctgcctgagcgccgtggacgcccacagccaggtgtgcagcatcctgtggagcccccactacaaggagctgatcagcggccacggcttcgcccagaaccagctggtgatctggaagtaccccaccatggccaaggtggccgagctgaagggccacaccagcagagtgctgagcctgaccatgagccccgacggcgccaccgtggccagcgccgccgccgacgagaccctgagactgtggagatgcttcgagctggaccccgccagaagaagagagagagagaaggccagcgccgccaagagcagcctgatccaccagggcatcagatag

SEQ ID NO: 10015 - DNA, 1500 bp, synthetic construct; identical to SEQ ID NO: 10014
  misc_feature 1..1500: note = Description of Artificial Sequence: Synthetic coding sequence
  source 1..1500: mol_type = other DNA

SEQ ID NO: 10016 - DNA, 1428 bp, synthetic construct
  misc_feature 1..1428: note = Description of Artificial Sequence: Synthetic coding sequence
  source 1..1428: mol_type = other DNA
atggcccagttcgccttcgagagcgacctgcacagcctgctgcagctggacgcccccatccccaacgccccccccgccagatggcagagaaaggccaaggaggccgccggccccgcccccagccccatgagagccgccaacagaagccacagcgccggcagaacccccggcagaacccccggcaagagcagcagcaaggtgcagaccacccccagcaaggagaaccagcccgagaacagccagacccccaccaagaaggagcaccagaaggcctgggccctgaacctgaacggcttcgacgtggaggaggccaagatcctgagactgagcggcaagccccagaacgcccccgagggctaccagaacagactgaaggtgctgtacagccagaaggccacccccggcagcagcagaaagacctgcagatacatccccagcctgcccgacagaatcctggacgcccccgagatcagaaacgactactacctgaacctggtggactggagcagcggcaacgtgctggccgtggccctggacaacagcgtgtacctgtggagcgccagcagcggcgacatcctgcagctgctgcagatggagcagcccggcgagtacatcagcagcgtggcctggatcaaggagggcaactacctggccgtgggcaccagcagcgccgaggtgcagctgtgggacgtgcagcagcagaagagactgagaaacatgaccagccacagcgccagagtgggcagcctgagctggaacagctacatcctgagcagcggcagcagaagcggccacatccaccaccacgacgtgagagtggccgagcaccacgtggccaccctgagcggccacagccaggaggtgtgcggcctgagatgggcccccgacggcagacacctggccagcggcggcaacgacaacctggtgaacgtgtggcccagcgcccccggcgagggcggctgggtgcccctgcagaccttcacccagcaccagggcgccgtgaaggccgtggcctggtgcccctggcagagcaacgtgctggccaccggcggcggcaccagcgacagacacatcagaatctggaacgtgtgcagcggcgcctgcctgagcgccgtggacgcccacagccaggtgtgcagcatcctgtggagcccccactacaaggagctgatcagcggccacggcttcgcccagaaccagctggtgatctggaagtaccccaccatggccaaggtggccgagctgaagggccacaccagcagagtgctgagcctgaccatgagccccgacggcgccaccgtggccagcgccgccgccgacgagaccctgagactgtggagatgcttcgagctggaccccgccagaagaagagagagagagaaggccagcgccgccaagagcagcctgatccaccagggcatcagatag

SEQ ID NO: 10017 - DNA, 1422 bp, synthetic construct
  misc_feature 1..1422: note = Description of Artificial Sequence: Synthetic coding sequence
  source 1..1422: mol_type = other DNA
atgagcaccgagctgttcagcagcaccagagaggagggcagcagcggcagcggccccagcttcagaagcaaccagagaaagatgctgaacctgctgctggagagagacaccagcttcaccgtgtgccccgacgtgcccagaacccccgtgggcaagttcctgggcgacagcgccaacctgagcatcctgagcggcggcacccccaagagatgcctggacctgagcaacctgagcagcggcgagatcaccgccacccagctgaccaccagcgccgacctggacgagaccggccacctggacagcagcggcctgcaggaggtgcacctggccggcatgaaccacgaccagcacctgatgaagtgcagccccgcccagctgctgtgcagcacccccaacggcctggacagaggccacagaaagagagacgccatgtgcagcagcagcgccaacaaggagaacgacaacggcaacctggtggacagcgagatgaagtacctgggcagccccatcaccaccgtgcccaagctggacaagaaccccaacctgggcgaggaccaggccgaggagatcagcgacgagctgatggagttcagcctgaaggaccaggaggccaaggtgagcagaagcggcctgtacagaagccccagcatgcccgagaacctgaacagacccagactgaagcaggtggagaagttcaaggacaacaccatccccgacaaggtgaagaagaagtacttcagcggccagggcaagctgagaaagggcctgtgcctgaagaagaccgtgagcctgtgcgacatcaccatcacccagatgctggaggaggacagcaaccagggccacctgatcggcgacttcagcaaggtgtgcgccctgcccaccgtgagcggcaagcaccaggacctgaagtacgtgaaccccgagaccgtggccgccctgctgagcggcaagttccagggcctgatcgagaagttctacgtgatcgactgcagatacccctacgagtacctgggcggccacatccagggcgccctgaacctgtacagccaggaggagctgttcaacttcttcctgaagaagcccatcgtgcccctggacacccagaagagaatcatcatcgtgttccactgcgagttcagcagcgagagaggccccagaatgtgcagatgcctgagagaggaggacagaagcctgaaccagtaccccgccctgtactaccccgagctgtacatcctgaagggcggctacagagacttcttccccgagtacatggagctgtgcgagccccagagctactgccccatgcaccaccaggaccacaagaccgagctgctgagatgcagaagccagagcaaggtgcaggagggcgagagacagctgagagagcagatcgccctgctggtgaaggacatgagcccctag

SEQ ID NO: 10018 - DNA, 1203 bp, synthetic construct
  misc_feature 1..1203: note = Description of Artificial Sequence: Synthetic coding sequence
  source 1..1203: mol_type = other DNA
atgagcaccgagctgttcagcagcaccagagaggagggcagcagcggcagcggccccagcttcagaagcaaccagagaaagatgctgaacctgctgctggagagagacaccagcttcaccgtgtgccccgacgtgcccagaacccccgtgggcaagttcctgggcgacagcgccaacctgagcatcctgagcggcagccccggcttcttcagaaccagcggcagcgccttcagctgggacgacaacggcaacctggtggacagcgagatgaagtacctgggcagccccatcaccaccgtgcccaagctggacaagaaccccaacctgggcgaggaccaggccgaggagatcagcgacgagctgatggagttcagcctgaaggaccaggaggccaaggtgagcagaagcggcctgtacagaagccccagcatgcccgagaacctgaacagacccagactgaagcaggtggagaagttcaaggacaacaccatccccgacaaggtgaagaagaagtacttcagcggccagggcaagctgagaaagggcctgtgcctgaagaagaccgtgagcctgtgcgacatcaccatcacccagatgctggaggaggacagcaaccagggccacctgatcggcgacttcagcaaggtgtgcgccctgcccaccgtgagcggcaagcaccaggacctgaagtacgtgaaccccgagaccgtggccgccctgctgagcggcaagttccagggcctgatcgagaagttctacgtgatcgactgcagatacccctacgagtacctgggcggccacatccagggcgccctgaacctgtacagccaggaggagctgttcaacttcttcctgaagaagcccatcgtgcccctggacacccagaagagaatcatcatcgtgttccactgcgagttcagcagcgagagaggccccagaatgtgcagatgcctgagagaggaggacagaagcctgaaccagtaccccgccctgtactaccccgagctgtacatcctgaagggcggctacagagacttcttccccgagtacatggagctgtgcgagccccagagctactgccccatgcaccaccaggaccacaagaccgagctgctgagatgcagaagccagagcaaggtgcaggagggcgagagacagctgagagagcagatcgccctgctggtgaaggacatgagcccctag

SEQ ID NO: 10019 - DNA, 1332 bp, synthetic construct
  misc_feature 1..1332: note = Description of Artificial Sequence: Synthetic coding sequence
  source 1..1332: mol_type = other DNA
atgagcaccgagctgttcagcagcaccagagaggagggcagcagcggcagcggccccagcttcagaagcaaccagagaaagatgctgaacctgctgctggagagagacaccagcttcaccgtgtgccccgacgtgcccagaacccccgtgggcaagttcctgggcgacagcgccaacctgagcatcctgagcggcggcacccccaagagatgcctggacctgagcaacctgagcagcggcgagatcaccgccacccagctgaccaccagcgccgacctggacgagaccggccacctggacagcagcggcctgcaggaggtgcacctggccggcatgaaccacgaccagcacctgatgaagtgcagccccgacaacggcaacctggtggacagcgagatgaagtacctgggcagccccatcaccaccgtgcccaagctggacaagaaccccaacctgggcgaggaccaggccgaggagatcagcgacgagctgatggagttcagcctgaaggaccaggaggccaaggtgagcagaagcggcctgtacagaagccccagcatgcccgagaacctgaacagacccagactgaagcaggtggagaagttcaaggacaacaccatccccgacaaggtgaagaagaagtacttcagcggccagggcaagctgagaaagggcctgtgcctgaagaagaccgtgagcctgtgcgacatcaccatcacccagatgctggaggaggacagcaaccagggccacctgatcggcgacttcagcaaggtgtgcgccctgcccaccgtgagcggcaagcaccaggacctgaagtacgtgaaccccgagaccgtggccgccctgctgagcggcaagttccagggcctgatcgagaagttctacgtgatcgactgcagatacccctacgagtacctgggcggccacatccagggcgccctgaacctgtacagccaggaggagctgttcaacttcttcctgaagaagcccatcgtgcccctggacacccagaagagaatcatcatcgtgttccactgcgagttcagcagcgagagaggccccagaatgtgcagatgcctgagagaggaggacagaagcctgaaccagtaccccgccctgtactaccccgagctgtacatcctgaagggcggctacagagacttcttccccgagtacatggagctgtgcgagccccagagctactgccccatgcaccaccaggaccacaagaccgagctgctgagatgcagaagccagagcaaggtgcaggagggcgagagacagctgagagagcagatcgccctgctggtgaaggacatgagcccctag

SEQ ID NO: 10020 - DNA, 1293 bp, synthetic construct
  misc_feature 1..1293: note = Description of Artificial Sequence: Synthetic coding sequence
  source 1..1293: mol_type = other DNA
atgagcaccgagctgttcagcagcaccagagaggagggcagcagcggcagcggccccagcttcagaagcaaccagagaaagatgctgaacctgctgctggagagagacaccagcttcaccgtgtgccccgacgtgcccagaacccccgtgggcaagttcctgggcgacagcgccaacctgagcatcctgagcggcagccccggcttcttcagaaccagcggcagcgccttcagctgggacgcccagctgctgtgcagcacccccaacggcctggacagaggccacagaaagagagacgccatgtgcagcagcagcgccaacaaggagaacgacaacggcaacctggtggacagcgagatgaagtacctgggcagccccatcaccaccgtgcccaagctggacaagaaccccaacctgggcgaggaccaggccgaggagatcagcgacgagctgatggagttcagcctgaaggaccaggaggccaaggtgagcagaagcggcctgtacagaagccccagcatgcccgagaacctgaacagacccagactgaagcaggtggagaagttcaaggacaacaccatccccgacaaggtgaagaagaagtacttcagcggccagggcaagctgagaaagggcctgtgcctgaagaagaccgtgagcctgtgcgacatcaccatcacccagatgctggaggaggacagcaaccagggccacctgatcggcgacttcagcaaggtgtgcgccctgcccaccgtgagcggcaagcaccaggacctgaagtacgtgaaccccgagaccgtggccgccctgctgagcggcaagttccagggcctgatcgagaagttctacgtgatcgactgcagatacccctacgagtacctgggcggccacatccagggcgccctgaacctgtacagccaggaggagctgttcaacttcttcctgaagaagcccatcgtgcccctggacacccagaagagaatcatcatcgtgttccactgcgagttcagcagcgagagaggccccagaatgtgcagatgcctgagagaggaggacagaagcctgaaccagtaccccgccctgtactaccccgagctgtacatcctgaagggcggctacagagacttcttccccgagtacatggagctgtgcgagccccagagctactgccccatgcaccaccaggaccacaagaccgagctgctgagatgcagaagccagagcaaggtgcaggagggcgagagacagctgagagagcagatcgccctgctggtgaaggacatgagcccctag

SEQ ID NO: 10021 - DNA, 1203 bp, synthetic construct; identical to SEQ ID NO: 10018
  misc_feature 1..1203: note = Description of Artificial Sequence: Synthetic coding sequence
  source 1..1203: mol_type = other DNA

SEQ ID NO: 10022 - DNA, 750 bp, synthetic construct
  misc_feature 1..750: note = Description of Artificial Sequence: Synthetic coding sequence
  source 1..750: mol_type = other DNA
atgagcaccgagctgttcagcagcaccagagaggagggcagcagcggcagcggccccagcttcagaagcaaccagagaaagatgctgaacctgctgctggagagagacaccagcttcaccgtgtgccccgacgtgcccagaacccccgtgggcaagttcctgggcgacagcgccaacctgagcatcctgagcggcggcacccccaagagatgcctggacctgagcaacctgagcagcggcgagatcaccgccacccagctgaccaccagcgccgacctggacgagaccggccacctggacagcagcggcctgcaggaggtgcacctggccggcatgaaccacgaccagcacctgatgaagtgcagccccgcccagctgctgtgcagcacccccaacggcctggacagaggccacagaaagagagacgccatgtgcagcagcagcgccaacaaggagaacgacaacggcaacctggtggacagcgagatgaagtacctgggcagccccatcaccaccgtgcccaagctggacaagaaccccaacctgggcgaggaccaggccgaggagatcagcgacgagctgatggagttcagcctgaaggaccaggaggccaaggtgagcagaagcggcctgtacagaagccccagcatgcccgagaacctgaacagacccagactgaagcaggtggagaagttcaaggacaacaccatccccgacaaggtgaagaagaagtacttcagcggccagtag

SEQ ID NO: 10023 - DNA, 1422 bp, synthetic construct; identical to SEQ ID NO: 10017
  misc_feature 1..1422: note = Description of Artificial Sequence: Synthetic coding sequence
  source 1..1422: mol_type = other DNA

SEQ ID NO: 10024 - DNA, 1473 bp, synthetic construct
  misc_feature 1..1473: note = Description of Artificial Sequence: Synthetic coding sequence
  source 1..1473: mol_type = other DNA
atgagcgaggaggccagattctgcttcagccccggcgagaacagcaagaccatgagcaccgagctgttcagcagcaccagagaggagggcagcagcggcagcggccccagcttcagaagcaaccagagaaagatgctgaacctgctgctggagagagacaccagcttcaccgtgtgccccgacgtgcccagaacccccgtgggcaagttcctgggcgacagcgccaacctgagcatcctgagcggcggcacccccaagagatgcctggacctgagcaacctgagcagcggcgagatcaccgccacccagctgaccaccagcgccgacctggacgagaccggccacctggacagcagcggcctgcaggaggtgcacctggccggcatgaaccacgaccagcacctgatgaagtgcagccccgcccagctgctgtgcagcacccccaacggcctggacagaggccacagaaagagagacgccatgtgcagcagcagcgccaacaaggagaacgacaacggcaacctggtggacagcgagatgaagtacctgggcagccccatcaccaccgtgcccaagctggacaagaaccccaacctgggcgaggaccaggccgaggagatcagcgacgagctgatggagttcagcctgaaggaccaggaggccaaggtgagcagaagcggcctgtacagaagccccagcatgcccgagaacctgaacagacccagactgaagcaggtggagaagttcaaggacaacaccatccccgacaaggtgaagaagaagtacttcagcggccagggcaagctgagaaagggcctgtgcctgaagaagaccgtgagcctgtgcgacatcaccatcacccagatgctggaggaggacagcaaccagggccacctgatcggcgacttcagcaaggtgtgcgccctgcccaccgtgagcggcaagcaccaggacctgaagtacgtgaaccccgagaccgtggccgccctgctgagcggcaagttccagggcctgatcgagaagttctacgtgatcgactgcagatacccctacgagtacctgggcggccacatccagggcgccctgaacctgtacagccaggaggagctgttcaacttcttcctgaagaagcccatcgtgcccctggacacccagaagagaatcatcatcgtgttccactgcgagttcagcagcgagagaggccccagaatgtgcagatgcctgagagaggaggacagaagcctgaaccagtaccccgccctgtactaccccgagctgtacatcctgaagggcggctacagagacttcttccccgagtacatggagctgtgcgagccccagagctactgccccatgcaccaccaggaccacaagaccgagctgctgagatgcagaagccagagcaaggtgcaggagggcgagagacagctgagagagcagatcgccctgctggtgaaggacatgagcccctag

SEQ ID NO: 10025 - DNA, 288 bp, synthetic construct
  misc_feature 1..288: note = Description of Artificial Sequence: Synthetic coding sequence
  source 1..288: mol_type = other DNA
atggagggcggcttcggcagcgacttcggcggcagcggcagcggcaagctggaccccggcctgatcatggagcaggtgaaggtgcagatcgccgtggccaacgcccaggagctgctgcagagaatgaccgacaagtgcttcagaaagtgcatcggcaagcccggcggcagcctggacaacagcgagcagaagtgcatcgccatgtgcatggacagatacatggacgcctggaacaccgtgagcagagcctacaacagcagactgcagagagagagagccaacatgtag

SEQ ID NO: 10026 - DNA, 576 bp, synthetic construct
  misc_feature 1..576: note = Description of Artificial Sequence: Synthetic coding sequence
  source 1..576: mol_type = other DNA
atgcagaccatcaagtgcgtggtggtgggcgacggcgccgtgggcaagacctgcctgctgatcagctacaccaccaacaagttccccagcgagtacgtgcccaccgtgttcgacaactacgccgtgaccgtgatgatcggcggcgagccctacaccctgggcctgttcgacaccgccggccaggaggactacgacagactgagacccctgagctacccccagaccgacgtgttcctggtgtgcttcagcgtggtgagccccagcagcttcgagaacgtgaaggagaagtgggtgcccgagatcacccaccactgccccaagacccccttcctgctggtgggcacccagatcgacctgagagacgaccccagcaccatcgagaagctggccaagaacaagcagaagcccatcacccccgagaccgccgagaagctggccagagacctgaaggccgtgaagtacgtggagtgcagcgccctgacccagagaggcctgaagaacgtgttcgacgaggccatcctggccgccctggagccccccgagacccagcccaagagaaagtgctgcatcttctag

SEQ ID NO: 10027 - DNA, 576 bp, synthetic construct
  misc_feature 1..576: note = Description of Artificial Sequence: Synthetic coding sequence
  source 1..576: mol_type = other DNA
atgcagaccatcaagtgcgtggtggtgggcgacggcgccgtgggcaagacctgcctgctgatcagctacaccaccaacaagttccccagcgagtacgtgcccaccgtgttcgacaactacgccgtgaccgtgatgatcggcggcgagccctacaccctgggcctgttcgacaccgccggccaggaggactacgacagactgagacccctgagctacccccagaccgacgtgttcctggtgtgcttcagcgtggtgagccccagcagcttcgagaacgtgaaggagaagtgggtgcccgagatcacccaccactgccccaagacccccttcctgctggtgggcacccagatcgacctgagagacgaccccagcaccatcgagaagctggccaagaacaagcagaagcccatcacccccgagaccgccgagaagctggccagagacctgaaggccgtgaagtacgtggagtgcagcgccctgacccagaagggcctgaagaacgtgttcgacgaggccatcctggccgccctggagccccccgagcccaagaagagcagaagatgcgtgctgctgtag

SEQ ID NO: 10028 - DNA, 576 bp, synthetic construct; identical to SEQ ID NO: 10027
  misc_feature 1..576: note = Description of Artificial Sequence: Synthetic coding sequence
  source 1..576: mol_type = other DNA

SEQ ID NO: 10029 - DNA, 411 bp, synthetic construct
  misc_feature 1..411: note = Description of Artificial Sequence: Synthetic coding sequence
  source 1..411: mol_type = other DNA
atgcagaccatcaagtgcgtggtggtgggcgacggcgccgtgggcaagacctgcctgctgatcagctacaccaccaacaagttccccagcgagtacgtgcccaccgtgttcgacaactacgccgtgaccgtgatgatcggcggcgagccctacaccctgggcctgttcgacaccgccggccaggaggactacgacagactgagacccctgagctacccccagaccgacgtgttcctggtgtgcttcagcgtggtgagccccagcagcttcgagaacgtgaaggagaagtgggtgcccgagatcacccaccactgccccaagacccccttcctgctggtgggcacccagatcgacctgagagacgaccccagcaccatcgagaagctggccaagaacaagcagaagccctag

SEQ ID NO: 10030 - DNA, 702 bp, synthetic construct
  misc_feature 1..702: note = Description of Artificial Sequence: Synthetic coding sequence
  source 1..702: mol_type = other DNA
atgagccccgacatcctgcacaacaagcagatcagcatcggcatctgcaccgactacctggacttcagctgggtgaactacatccacttcaagcagctgaagaaccagtggaaggtgagaagaggcgacaccggcttcgccagaagcgccggcagacagaacagcagcagacaggacagcaacgagtggtggagccagttcggcgaggtgtgccccaccagctggaacgaggtgttcgacaactacgccgtgaccgtgatgatcggcggcgagccctacaccctgggcctgttcgacaccgccggccaggaggactacgacagactgagacccctgagctacccccagaccgacgtgttcctggtgtgcttcagcgtggtgagccccagcagcttcgagaacgtgaaggagaagtgggtgcccgagatcacccaccactgccccaagacccccttcctgctggtgggcacccagatcgacctgagagacgaccccagcaccatcgagaagctggccaagaacaagcagaagcccatcacccccgagaccgccgagaagctggccagagacctgaaggccgtgaagtacgtggagtgcagcgccctgacccagaagggcctgaagaacgtgttcgacgaggccatcctggccgccctggagccccccgagcccaagaagagcagaagatgcgtgctgctgtag

SEQ ID NO: 10031 - DNA, 1269 bp, synthetic construct
  misc_feature 1..1269: note = Description of Artificial Sequence: Synthetic coding sequence
  source 1..1269: mol_type = other DNA
atgaacagcggccacagcttcagccagacccccagcgccagcttccacggcgccggcggcggctggggcagacccagaagcttccccagagcccccaccgtgcacggcggcgccggcggcgccagaatcagcctgagcttcaccaccagaagctgccccccccccggcggcagctggggcagcggcagaagcagccccctgctgggcggcaacggcaaggccaccatgcagaacctgaacgacagactggccagctacctggagaaggtgagagccctggaggaggccaacatgaagctggagagcagaatcctgaagtggcaccagcagagagaccccggcagcaagaaggactacagccagtacgaggagaacatcacccacctgcaggagcagatcgtggacggcaagatgaccaacgcccagatcatcctgctgatcgacaacgccagaatggccgtggacgacttcaacctgaagtacgagaacgagcacagcttcaagaaggacctggagatcgaggtggagggcctgagaagaaccctggacaacctgaccatcgtgaccaccgacctggagcaggaggtggagggcatgagaaaggagctgatcctgatgaagaagcaccacgagcaggagatggagaagcaccacgtgcccagcgacttcaacgtgaacgtgaaggtggacaccggccccagagaggacctgatcaaggtgctggaggacatgagacaggagtacgagctgatcatcaagaagaagcacagagacctggacacctggtacaaggagcagagcgccgccatgagccaggaggccgccagccccgccaccgtgcagagcagacagggcgacatccacgagctgaagagaaccttccaggccctggagatcgacctgcagacccagtacagcaccaagagcgccctggagaacatgctgagcgagacccagagcagatacagctgcaagctgcaggacatgcaggagatcatcagccactacgaggaggagctgacccagctgagacacgagctggagagacagaacaacgagtaccaggtgctgctgggcatcaagacccacctggagaaggagatcaccacctacagaagactgctggagggcgagagcgagggcaccagagaggagagcaagagcagcatgaaggtgagcgccacccccaagatcaaggccatcacccaggagaccatcaacggcagactggtgctgtgccaggtgaacgagatccagaagcacgcctag

SEQ ID NO: 10032 - DNA, 1596 bp, synthetic construct
  misc_feature 1..1596: note = Description of Artificial Sequence: Synthetic coding sequence
  source 1..1596: mol_type = other DNA
atggccgacgtgctgagcgtgctgagacagtacaacatccagaagaaggagatcgtggtgaagggcgacgaggtgatcttcggcgagttcagctggcccaagaacgtgaagaccaactacgtggtgtggggcaccggcaaggagggccagcccagagagtactacaccctggacagcatcctgttcctgctgaacaacgtgcacctgagccaccccgtgtacgtgagaagagccgccaccgagaacatccccgtggtgagaagacccgacagaaaggacctgctgggctacctgaacggcgaggccagcaccagcgccagcatcgacagaagcgcccccctggagatcggcctgcagagaagcacccaggtgaagagagccgccgacgaggtgctggccgaggccaagaagcccagaatcgaggacgaggagtgcgtgagactggacaaggagagactggccgccagactggagggccacaaggagggcatcgtgcagaccgagcagatcagaagcctgagcgaggccatgagcgtggagaagatcgccgccatcaaggccaagatcatggccaagaagagaagcaccatcaagaccgacctggacgacgacatcaccgccctgaagcagagaagcttcgtggacgccgaggtggacgtgaccagagacatcgtgagcagagagagagtgtggagaaccagaaccaccatcctgcagagcaccggcaagaacttcagcaagaacatcttcgccatcctgcagagcgtgaaggccagagaggagggcagagcccccgagcagagacccgcccccaacgccgcccccgtggaccccaccctgagaaccaagcagcccatccccgccgcctacaacagatacgaccaggagagattcaagggcaaggaggagaccgagggcttcaagatcgacaccatgggcacctaccacggcatgaccctgaagagcgtgaccgagggcgccagcgccagaaagacccagacccccgccgcccagcccgtgcccagacccgtgagccaggccagacccccccccaaccagaagaagggcagcagaacccccatcatcatcatccccgccgccaccaccagcctgatcaccatgctgaacgccaaggacctgctgcaggacctgaagttcgtgcccagcgacgagaagaagaagcagggctgccagagagagaacgagaccctgatccagagaagaaaggaccagatgcagcccggcggcaccgccatcagcgtgaccgtgccctacagagtggtggaccagcccctgaagctgatgccccaggactgggacagagtggtggccgtgttcgtgcagggccccgcctggcagttcaagggctggccctggctgctgcccgacggcagccccgtggacatcttcgccaagatcaaggccttccacctgaagtacgacgaggtgagactggaccccaacgtgcagaagtgggacgtgaccgtgctggagctgagctaccacaagagacacctggacagacccgtgttcctgagattctgggagaccctggacagatacatggtgaagcacaagagccacctgagattctag

SEQ ID NO: 10033 - DNA, 951 bp, synthetic construct
  misc_feature 1..951: note = Description of Artificial Sequence: Synthetic coding sequence
  source 1..951: mol_type = other DNA
atggccgacgtgctgagcgtgctgagacagtacaacatccagaagaaggagatcgtggtgaagggcgacgaggtgatcttcggcgagttcagctggcccaagaacgtgaagaccaactacgtggtgtggggcaccggcaaggagggccagcccagagagtactacaccctggacagcatcctgttcctgctgaacaacgtgcacctgagccaccccgtgtacgtgagaagagccgccaccgagaacatccccgtggtgagaagacccgacagaaaggacctgctgggctacctgaacggcgaggccagcaccagcgccagcatcgacagaagcgcccccctggagatcggcctgcagagaagcacccaggtgaagagagccgccgacgaggtgctggccgaggccaagaagcccagaatcgaggacgaggagtgcgtgagactggacaaggagagactggccgccagactggagggccacaaggagggcatcgtgcagaccgagcagatcagaagcctgagcgaggccatgagcgtggagaagatcgccgccatcaaggccaagatcatggccaagaagagaagcaccatcaagaccgacctggacgacgacatcaccgccctgaagcagagaagcttcgtggacgccgaggtggacgtgaccagagacatcgtgagcagagagagagtgtggagaaccagaaccaccatcctgcagagcaccggcaagaacttcagcaagaacatcttcgccatcctgcagagcgtgaaggccagagaggagggcagagcccccgagcagagacccgcccccaacgccgcccccgtggaccccaccctgagaaccaagcagcccatccccgccgcctacaacagatacgaccaggagagaatcagcaacacccactaccacaacagctgcagctaccacctgttcaacaaccacgcctag

SEQ ID NO: 10034 - DNA, 1317 bp, synthetic construct
  misc_feature 1..1317: note = Description of Artificial Sequence: Synthetic coding sequence
  source 1..1317: mol_type = other DNA
atgggcggctgcgccggcagcagaagaagattcagcgacagcgagggcgaggagaccgtgcccgagcccagactgcccctgctggaccaccagggcgcccactggaagaacgccgtgggcttctggctgctgggcctgtgcaacaacttcagctacgtggtgatgctgagcgccgcccacgacatcctgagccacaagagaaccagcggcaaccagagccacgtggaccccggccccacccccatcccccacaacagcagcagcagattcgactgcaacagcgtgagcaccgccgccgtgctgctggccgacatcctgcccaccctggtgatcaagctgctggcccccctgggcctgcacctgctgccctacagccccagagtgctggtgagcggcatctgcgccgccggcagcttcgtgctggtggccttcagccacagcgtgggcaccagcctgtgcggcgtggtgttcgccagcatcagcagcggcctgggcgaggtgaccttcctgagcctgaccgccttctaccccagagccgtgatcagctggtggagcagcggcaccggcggcgccggcctgctgggcgccctgagctacctgggcctgacccaggccggcctgagcccccagcagaccctgctgagcatgctgggcatccccgccctgctgctggccagctacttcctgctgctgaccagccccgaggcccaggaccccggcggcgaggaggaggccgagagcgccgccagacagcccctgatcagaaccgaggcccccgagagcaagcccggcagcagcagcagcctgagcctgagagagagatggaccgtgttcaagggcctgctgtggtacatcgtgcccctggtggtggtgtacttcgccgagtacttcatcaaccagggcctgttcgagctgctgttcttctggaacaccagcctgagccacgcccagcagtacagatggtaccagatgctgtaccaggccggcgtgttcgccagcagaagcagcctgagatgctgcagaatcagattcacctgggccctggccctgctgcagtgcctgaacctggtgttcctgctggccgacgtgtggttcggcttcctgcccagcatctacctggtgttcctgatcatcctgtacgagggcctgctgggcggcgccgcctacgtgaacaccttccacaacatcgccctggagaccagcgacgagcacagagagttcgccatggccgccacctgcatcagcgacaccctgggcatcagcctgagcggcctgctggccctgcccctgcacgacttcctgtgccagctgagctag

SEQ ID NO: 10035 - DNA, 504 bp, synthetic construct
  misc_feature 1..504: note = Description of Artificial Sequence: Synthetic coding sequence
  source 1..504: mol_type = other DNA
atgggcggctgcgccggcagcagaagaagattcagcgacagcgagggcgaggagaccgtgcccgagcccagactgcccctgctggaccaccagggcgcccactggaagaacgccgtgggcttctggctgctgggcctgtgcaacaacttcagctacgtggtgatgctgagcgccgcccacgacatcctgagccacaagagaaccagcggcaaccagagccacccccccggcagcagacagtgggacctgtgctgctggaagctgagacccggctgcctgttcagcttctgcggcgaccagcccgtgtgctacttcctgctgctgaccagccccgaggcccaggaccccggcggcgaggaggaggccgagagcgccgccagacagcccctgatcagaaccgaggcccccgagagcaagcccggcagcagcagcagcctgagcctgagagagagatggaccgtgttcaagggcctgctgtggtacatcgtgcccctggtggtgtag

SEQ ID NO: 10036 - DNA, 1266 bp, synthetic construct
  misc_feature 1..1266: note = Description of Artificial Sequence: Synthetic coding sequence
  source 1..1266: mol_type = other DNA
atgggcggctgcgccggcagcagaagaagattcagcgacagcgagggcgaggagaccgtgcccgagcccagactgcccctgctggaccaccagggcgcccactggaagaacgccgtgggcttctggctgctgggcctgtgcaacaacttcagctacgtggtgatgctgagcgccgcccacgacatcctgagccacaagagaaccagcggcaaccagagccacgtggaccccggccccacccccatcccccacaacagcagcagcagattcgactgcaacagcgtgagcaccgccgccgtgctgctggccgacatcctgcccaccctggtgatcaagctgctggcccccctgggcctgcacctgctgccctacagccccagagtgctggtgagcggcatctgcgccgccggcagcttcgtgctggtggccttcagccacagcgtgggcaccagcctgtgcggcgtggtgttcgccagcatcagcagcggcctgggcgaggtgaccttcctgagcctgaccgccttctaccccagagccgtgatcagctggtggagcagcggcaccggcggcgccggcctgctgggcgccctgagctacctgggcctgacccaggccggcctgagcccccagcagaccctgctgagcatgctgggcatccccgccctgctgctggccagctacttcctgctgctgaccagccccgaggcccaggaccccggcggcgaggaggaggccgagagcgccgccagacagcccctgatcagaaccgaggcccccgagagcaagcccggcagcagcagcagcctgagcctgagagagagatggaccgtgttcaaggtgagaatgatggccggcttcgagctgctgttcttctggaacaccagcctgagccacgcccagcagtacagatggtaccagatgctgtaccaggccggcgtgttcgccagcagaagcagcctgagatgctgcagaatcagattcacctgggccctggccctgctgcagtgcctgaacctggtgttcctgctggccgacgtgtggttcggcttcctgcccagcatctacctggtgttcctgatcatcctgtacgagggcctgctgggcggcgccgcctacgtgaacaccttccacaacatcgccctggagaccagcgacgagcacagagagttcgccatggccgccacctgcatcagcgacaccctgggcatcagcctgagcggcctgctggccctgcccctgcacgacttcctgtgccagctgagctag

SEQ ID NO: 10037 - DNA, 1173 bp, synthetic construct
  misc_feature 1..1173: note = Description of Artificial Sequence: Synthetic coding sequence
  source 1..1173: mol_type = other DNA
atgggcggctgcgccggcagcagaagaagattcagcgacagcgagggcgaggagaccgtgcccgagcccagactgcccctgctggaccaccagggcgcccactggaagaacgccgtgggcttctggctgctgggcctgtgcaacaacttcagctacgtggtgatgctgagcgccgcccacgacatcctgagccacaagagaaccagcggcaaccagagccacgtggaccccggccccacccccatcccccacaacagcagcagcagattcgactgcaacagcgtgagcaccgccgccgtgctgctggccgacatcctgcccaccctggtgatcaagctgctggcccccctgggcctgcacctgctgccctacagccccagagtgctggtgagcggcatctgcgccgccggcagcttcgtgctggtggccttcagccacagcgtgggcaccagcctgtgcggcgtggtgttcgccagcatcagcagcggcctgggcgaggtgaccttcctgagcctgaccgccttctaccccagctacttcctgctgctgaccagccccgaggcccaggaccccggcggcgaggaggaggccgagagcgccgccagacagcccctgatcagaaccgaggcccccgagagcaagcccggcagcagcagcagcctgagcctgagagagagatggaccgtgttcaagggcctgctgtggtacatcgtgcccctggtggtggtgtacttcgccgagtacttcatcaaccagggcctgttcgagctgctgttcttctggaacaccagcctgagccacgcccagcagtacagatggtaccagatgctgtaccaggccggcgtgttcgccagcagaagcagcctgagatgctgcagaatcagattcacctgggccctggccctgctgcagtgcctgaacctggtgttcctgctggccgacgtgtggttcggcttcctgcccagcatctacctggtgttcctgatcatcctgtacgagggcctgctgggcggcgccgcctacgtgaacaccttccacaacatcgccctggagaccagcgacgagcacagagagttcgccatggccgccacctgcatcagcgacaccctgggcatcagcctgagcggcctgctggccctgcccctgcacgacttcctgtgccagctgagctag

SEQ ID NO: 10038 - DNA, 762 bp, synthetic construct
  misc_feature 1..762: note = Description of Artificial Sequence: Synthetic coding sequence
  source 1..762: mol_type = other DNA
atgggcggctgcgccggcagcagaagaagattcagcgacagcgagggcgaggagaccgtgcccgagcccagactgcccctgctggaccaccagggcgcccactggaagaacgccgtgggcttctggctgctgggcctgtgcaacaacttcagctacgtggtgatgctgagcgccgcccacgacatcctgagccacaagagaaccagcggcaaccagagccacgtggaccccggccccacccccatcccccacaacagcagcagcagattcgactgcaacagcgtgagcaccgccgccgtgctgctggccgacatcctgcccaccctggtgatcaagctgctggcccccctgggcctgcacctgctgccctacagccccagagtgctggtgagcggcatctgcgccgccggcagcttcgtgctggtggccttcagccacagcgtgggcaccagcctgtgcggcagcagcagcagcctgagcctgagagagagatggaccgtgttcaagggcctgctgtggtacatcgtgcccctggtggtggtgtacttcgccgagtacttcatcaaccagggcctgttcgagctgctgttcttctggaacaccagcctgagccacgcccagcagtacagatggtaccagatgctgtaccaggccggcgtgttcgccagcagaagcagcctgagatgctgcagaatcagattcacctgggccctggccctgctgcagatggagagcagaagcgtggcccaggccggcatgtag

SEQ ID NO: 10039 - DNA, 1020 bp, synthetic construct
  misc_feature 1..1020: note = Description of Artificial Sequence: Synthetic coding sequence
  source 1..1020: mol_type = other DNA
atgggcggctgcgccggcagcagaagaagattcagcgacagcgagggcgaggagaccgtgcccgagcccagactgcccctgctggaccaccagggcgcccactggaagaacgccgtgggcttctggctgctgggcctgtgcaacaacttcagctacgtggtgatgctgagcgccgcccacgacatcctgagccacaagagaaccagcggcaaccagagccacgtggaccccggccccacccccatcccccacaacagcagcagcagattcgactgcaacagcgtgagcaccgccccccccggcagcagacagtgggacctgtgctgctggaagctgagacccggctgcctgttcagcttctgcggcgaccagcccgtgtgctacttcctgctgctgaccagccccgaggcccaggaccccggcggcgaggaggaggccgagagcgccgccagacagcccctgatcagaaccgaggcccccgagagcaagcccggcagcagcagcagcctgagcctgagagagagatggaccgtgttcaagggcctgctgtggtacatcgtgcccctggtggtggtgtacttcgccgagtacttcatcaaccagggcctgttcgagctgctgttcttctggaacaccagcctgagccacgcccagcagtacagatggtaccagatgctgtaccaggccggcgtgttcgccagcagaagcagcctgagatgctgcagaatcagattcacctgggccctggccctgctgcagtgcctgaacctggtgttcctgctggccgacgtgtggttcggcttcctgcccagcatctacctggtgttcctgatcatcctgtacgagggcctgctgggcggcgccgcctacgtgaacaccttccacaacatcgccctggagaccagcgacgagcacagagagttcgccatggccgccacctgcatcagcgacaccctgggcatcagcctgagcggcctgctggccctgcccctgcacgacttcctgtgccagctgagctag

SEQ ID NO: 10040 - DNA, 1155 bp, synthetic construct
  misc_feature 1..1155: note = Description of Artificial Sequence: Synthetic coding sequence
  source 1..1155: mol_type = other DNA
atgctgagcgccgcccacgacatcctgagccacaagagaaccagcggcaaccagagccacgtggaccccggccccacccccatcccccacaacagcagcagcagattcgactgcaacagcgtgagcaccgccgccgtgctgctggccgacatcctgcccaccctggtgatcaagctgctggcccccctgggcctgcacctgctgccctacagccccagagtgctggtgagcggcatctgcgccgccggcagcttcgtgctggtggccttcagccacagcgtgggcaccagcctgtgcggcgtggtgttcgccagcatcagcagcggcctgggcgaggtgaccttcctgagcctgaccgccttctaccccagagccgtgatcagctggtggagcagcggcaccggcggcgccggcctgctgggcgccctgagctacctgggcctgacccaggccggcctgagcccccagcagaccctgctgagcatgctgggcatccccgccctgctgctggccagctacttcctgctgctgaccagccccgaggcccaggaccccggcggcgaggaggaggccgagagcgccgccagacagcccctgatcagaaccgaggcccccgagagcaagcccggcagcagcagcagcctgagcctgagagagagatggaccgtgttcaagggcctgctgtggtacatcgtgcccctggtggtggtgtacttcgccgagtacttcatcaaccagggcctgttcgagctgctgttcttctggaacaccagcctgagccacgcccagcagtacagatggtaccagatgctgtaccaggccggcgtgttcgccagcagaagcagcctgagatgctgcagaatcagattcacctgggccctggccctgctgcagtgcctgaacctggtgttcctgctggccgacgtgtggttcggcttcctgcccagcatctacctggtgttcctgatcatcctgtacgagggcctgctgggcggcgccgcctacgtgaacaccttccacaacatcgccctggagaccagcgacgagcacagagagttcgccatggccgccacctgcatcagcgacaccctgggcatcagcctgagcggcctgctggccctgcccctgcacgacttcctgtgccagctgagctag

SEQ ID NO: 10041 - DNA, 1317 bp, synthetic construct; identical to SEQ ID NO: 10034
  misc_feature 1..1317: note = Description of Artificial Sequence: Synthetic coding sequence
  source 1..1317: mol_type = other DNA

SEQ ID NO: 10042 - DNA, 1317 bp, synthetic construct; identical to SEQ ID NO: 10034
  misc_feature 1..1317: note = Description of Artificial Sequence: Synthetic coding sequence
  source 1..1317: mol_type = other DNA

SEQ ID NO: 10043 - DNA, 1017 bp, synthetic construct
  misc_feature 1..1017: note = Description of Artificial Sequence: Synthetic coding sequence
  source 1..1017: mol_type = other DNA
atgtggacccaggcccagagaagaagccccaccaccgcccaccacgacctgaccgccaccctgagcctgagactgcccagagtgctggtgagcggcatctgcgccgccggcagcttcgtgctggtggccttcagccacagcgtgggcaccagcctgtgcggcgtggtgttcgccagcatcagcagcggcctgggcgaggtgaccttcctgagcctgaccgccttctaccccagagccgtgatcagctggtggagcagcggcaccggcggcgccggcctgctgggcgccctgagctacctgggcctgacccaggccggcctgagcccccagcagaccctgctgagcatgctgggcatccccgccctgctgctggccagctacttcctgctgctgaccagccccgaggcccaggaccccggcggcgaggaggaggccgagagcgccgccagacagcccctgatcagaaccgaggcccccgagagcaagcccggcagcagcagcagcctgagcctgagagagagatggaccgtgttcaagggcctgctgtggtacatcgtgcccctggtggtggtgtacttcgccgagtacttcatcaaccagggcctgttcgagctgctgttcttctggaacaccagcctgagccacgcccagcagtacagatggtaccagatgctgtaccaggccggcgtgttcgccagcagaagcagcctgagatgctgcagaatcagattcacctgggccctggccctgctgcagtgcctgaacctggtgttcctgctggccgacgtgtggttcggcttcctgcccagcatctacctggtgttcctgatcatcctgtacgagggcctgctgggcggcgccgcctacgtgaacaccttccacaacatcgccctggagaccagcgacgagcacagagagttcgccatggccgccacctgcatcagcgacaccctgggcatcagcctgagcggcctgctggccctgcccctgcacgacttcctgtgccagctgagctag

SEQ ID NO: 10044 - DNA, 1083 bp, synthetic construct
  misc_feature 1..1083: note = Description of Artificial Sequence: Synthetic coding sequence
  source 1..1083: mol_type = other DNA
atgctgagcgccgcccacgacatcctgagccacaagagaaccagcggcaaccagagccacgccgtgctgctggccgacatcctgcccaccctggtgatcaagctgctggcccccctgggcctgcacctgctgccctacagccccagagtgctggtgagcggcatctgcgccgccggcagcttcgtgctggtggccttcagccacagcgtgggcaccagcctgtgcggcgtggtgttcgccagcatcagcagcggcctgggcgaggtgaccttcctgagcctgaccgccttctaccccagagccgtgatcagctggtggagcagcggcaccggcggcgccggcctgctgggcgccctgagctacctgggcctgacccaggccggcctgagcccccagcagaccctgctgagcatgctgggcatccccgccctgctgctggccagctacttcctgctgctgaccagccccgaggcccaggaccccggcggcgaggaggaggccgagagcgccgccagacagcccctgatcagaaccgaggcccccgagagcaagcccggcagcagcagcagcctgagcctgagagagagatggaccgtgttcaagggcctgctgtggtacatcgtgcccctggtggtggtgtacttcgccgagtacttcatcaaccagggcctgttcgagctgctgttcttctggaacaccagcctgagccacgcccagcagtacagatggtaccagatgctgtaccaggccggcgtgttcgccagcagaagcagcctgagatgctgcagaatcagattcacctgggccctggccctgctgcagtgcctgaacctggtgttcctgctggccgacgtgtggttcggcttcctgcccagcatctacctggtgttcctgatcatcctgtacgagggcctgctgggcggcgccgcctacgtgaacaccttccacaacatcgccctggagaccagcgacgagcacagagagttcgccatggccgccacctgcatcagcgacaccctgggcatcagcctgagcggcctgctggccctgcccctgcacgacttcctgtgccagctgagctag

SEQ ID NO: 10045 - DNA, 1299 bp, synthetic construct
  misc_feature 1..1299: note = Description of Artificial Sequence: Synthetic coding sequence
  source 1..1299: mol_type = other DNA
atggccgtgcccttcgtggaggactgggacctggtgcagaccctgggcgagggcgcctacggcgaggtgcagctggccgtgaacagagtgaccgaggaggccgtggccgtgaagatcgtggacatgaagagagccgtggactgccccgagaacatcaagaaggagatctgcatcaacaagatgctgaaccacgagaacgtggtgaagttctacggccacagaagagagggcaacatccagtacctgttcctggagtactgcagcggcggcgagctgttcgacagaatcgagcccgacatcggcatgcccgagcccgacgcccagagattcttccaccagctgatggccggcgtggtgtacctgcacggcatcggcatcacccacagagacatcaagcccgagaacctgctgctggacgagagagacaacctgaagatcagcgacttcggcctggccaccgtgttcagatacaacaacagagagagactgctgaacaagatgtgcggcaccctgccctacgtggcccccgagctgctgaagagaagagagttccacgccgagcccgtggacgtgtggagctgcggcatcgtgctgaccgccatgctggccggcgagctgccctgggaccagcccagcgacagctgccaggagtacagcgactggaaggagaagaagacctacctgaacccctggaagaagatcgacagcgcccccctggccctgctgcacaagatcctggtggagaaccccagcgccagaatcaccatccccgacatcaagaaggacagatggtacaacaagcccctgaagaagggcgccaagagacccagagtgaccagcggcggcgtgagcgagagccccagcggcttcagcaagcacatccagagcaacctggacttcagccccgtgaacagcgccagcagcgaggagaacgtgaagtacagcagcagccagcccgagcccagaaccggcctgagcctgtgggacaccagccccagctacatcgacaagctggtgcagggcatcagcttcagccagcccacctgccccgaccacatgctgctgaacagccagctgctgggcacccccggcagcagccaggtgaccatcagcaccaccgacagaagaaacaacaagctgatcttcaaggtgaacctgctggagatggacgacaagatcctggtggacttcagactgagcaagggcgacggcctggagttcaagagacacttcctgaagatcaagggcaagctgatcgacatcgtgagcagccagaagatctggctgcccgccacctag

SEQ ID NO: 10046 - DNA, 1431 bp, synthetic construct
  misc_feature 1..1431: note = Description of Artificial Sequence: Synthetic coding sequence
  source 1..1431: mol_type = other DNA
atggccgtgcccttcgtggaggactgggacctggtgcagaccctgggcgagggcgcctacggcgaggtgcagctggccgtgaacagagtgaccgaggaggccgtggccgtgaagatcgtggacatgaagagagccgtggactgccccgagaacatcaagaaggagatctgcatcaacaagatgctgaaccacgagaacgtggtgaagttctacggccacagaagagagggcaacatccagtacctgttcctggagtactgcagcggcggcgagctgttcgacagaatcgagcccgacatcggcatgcccgagcccgacgcccagagattcttccaccagctgatggccggcgtggtgtacctgcacggcatcggcatcacccacagagacatcaagcccgagaacctgctgctggacgagagagacaacctgaagatcagcgacttcggcctggccaccgtgttcagatacaacaacagagagagactgctgaacaagatgtgcggcaccctgccctacgtggcccccgagctgctgaagagaagagagttccacgccgagcccgtggacgtgtggagctgcggcatcgtgctgaccgccatgctggccggcgagctgccctgggaccagcccagcgacagctgccaggagtacagcgactggaaggagaagaagacctacctgaacccctggaagaagatcgacagcgcccccctggccctgctgcacaagatcctggtggagaaccccagcgccagaatcaccatccccgacatcaagaaggacagatggtacaacaagcccctgaagaagggcgccaagagacccagagtgaccagcggcggcgtgagcgagagccccagcggcttcagcaagcacatccagagcaacctggacttcagccccgtgaacagcgccagcagcgaggagaacgtgaagtacagcagcagccagcccgagcccagaaccggcctgagcctgtgggacaccagccccagctacatcgacaagctggtgcagggcatcagcttcagccagcccacctgccccgaccacatgctgctgaacagccagctgctgggcacccccggcagcagccagaacccctggcagagactggtgaagagaatgaccagattcttcaccaagctggacgccgacaagagctaccagtgcctgaaggagacctgcgagaagctgggctaccagtggaagaagagctgcatgaaccaggtgaccatcagcaccaccgacagaagaaacaacaagctgatcttcaaggtgaacctgctggagatggacgacaagatcctggtggacttcagactgagcaagggcgacggcctggagttcaagagacacttcctgaagatcaagggcaagctgatcgacatcgtgagcagccagaagatctggctgcccgccacctag

SEQ ID NO: 10047 - DNA, 1431 bp, synthetic construct; identical to SEQ ID NO: 10046
  misc_feature 1..1431: note = Description of Artificial Sequence: Synthetic coding sequence
  source 1..1431: mol_type = other DNA

SEQ ID NO: 10048 - DNA, 1431 bp, synthetic construct; identical to SEQ ID NO: 10046
  misc_feature 1..1431: note = Description of Artificial Sequence: Synthetic coding sequence
  source 1..1431: mol_type = other DNA

SEQ ID NO: 10049 - DNA, 402 bp, synthetic construct
  misc_feature 1..402: note = Description of Artificial Sequence: Synthetic coding sequence
  source 1..402: mol_type = other DNA
atggccgtgcccttcgtggaggactgggacctggtgcagaccctgggcgagggcgcctacggcgaggtgcagctggccgtgaacagagtgaccgaggaggccgtggccgtgaagatcgtggacatgaagagagccgtggactgccccgagaacatcaagaaggagatctgcatcaacaagatgctgaaccacgagaacgtggtgaagttctacggccacagaagagagggcaacatccagtacctgttcctggagtactgcagcggcggcgagctgttcgacagaatcgagcccgacatcggcatgcccgagcccgacgcccagagattcttccaccagctgatggccggcgtggtgtacctgcacggcatcggcatcacccacagagacatcaagccctag

SEQ ID NO: 10050 - DNA, 513 bp, synthetic construct
  misc_feature 1..513: note = Description of Artificial Sequence: Synthetic coding sequence
  source 1..513: mol_type = other DNA
atggccgtgcccttcgtggaggactgggacctggtgcagaccctgggcgagggcgcctacggcgaggtgcagctggccgtgaacagagtgaccgaggaggccgtggccgtgaagatcgtggacatgaagagagccgtggactgccccgagaacatcaagaaggagatctgcatcaacaagatgctgaaccacgagaacgtggtgaagttctacggccacagaagagagggcaacatccagtacctgttcctggagtactgcagcggcggcgagctgttcgacagaatcgagcccgacatcggcatgcccgagcccgacgcccagagattcttccaccagctgatggccggcgtggtgtacctgcacggcatcggcatcacccacagagacatcaagcccgagaacctgctgctggacgagagagacaacctgaagatcagcgacttcggcctggccaccgtgttcagatacaacaacagagagagactgctgaacaagatgtgcggcacctag

SEQ ID NO: 10051 - DNA, 615 bp, synthetic construct
  misc_feature 1..615: note = Description of Artificial Sequence: Synthetic coding sequence
  source 1..615: mol_type = other DNA
atggccgtgcccttcgtggaggactgggacctggtgcagaccctgggcgagggcgcctacggcgaggtgcagctggccgtgaacagagtgaccgaggaggccgtggccgtgaagatcgtggacatgaagagagccgtggactgccccgagaacatcaagaaggagatctgcatcaacaagatgctgaaccacgagaacgtggtgaagttctacggccacagaagagagggcaacatccagtacctgttcctggagtactgcagcggcggcgagctgttcgacagaatcgagcccgacatcggcatgcccgagcccgacgcccagagattcttccaccagctgatggccggcgtggtgtacctgcacggcatcggcatcacccacagagacatcaagcccgagaacctgctgctggacgagagagacaacctgaagatcagcgacttcggcctggccaccgtgttcagatacaacaacagagagagactgctgaacaagatgtgcggcaccctgccctacgtggcccccgagctgctgaagagaagagagttccacgccgagcccgtggacgtgtggagctgcggcatcgtgctgaccgccatgctggccggctag

SEQ ID NO: 10052 - DNA, 129 bp, synthetic construct
  misc_feature 1..129: note = Description of Artificial Sequence: Synthetic coding sequence
  source 1..129: mol_type = other DNA
atggccgtgcccttcgtggaggactgggacctggtgcagaccctgggcgagggcgcctacggcgaggtgcagctggccgtgaacagagtgaccgaggaggccgtggccgtgaagatcgtggacatgtag

SEQ ID NO: 10053 - DNA, 1431 bp, synthetic construct; identical to SEQ ID NO: 10046
  misc_feature 1..1431: note = Description of Artificial Sequence: Synthetic coding sequence
  source 1..1431: mol_type = other DNA

SEQ ID NO: 10054 - DNA, 384 bp, synthetic construct
  misc_feature 1..384: note = Description of Artificial Sequence: Synthetic coding sequence
  source 1..384: mol_type = other DNA
atggccgtgcccttcgtggaggactgggacctggtgcagaccctgggcgagggcgcctacggcgaggtgcagctggccgtgaacagagtgaccgaggaggccgtggccgtgaagatcgtggacatgaagagagccgtggactgccccgagaacatcaagaaggagatctgcatcaacaagatgctgaaccacgagaacgtggtgaagttctacggccacagaagagagggcaacatccagtacctgttcctggagtactgcagcggcggcgagctgttcgacagaatcgagcccgacatcggcatgcccgagcccgacgcccagagattcttccaccagctgatggccggcgtggtgtacctgcacggcatcggcatcacctag

SEQ ID NO: 10055 - DNA, 1329 bp, synthetic construct
  misc_feature 1..1329: note = Description of Artificial Sequence: Synthetic coding sequence
  source 1..1329: mol_type = other DNA
atggccgtgcccttcgtggaggactgggacctggtgcagaccctgggcgagggcgcctacggcgaggtgcagctggccgtgaacagagtgaccgaggaggccgtggccgtgaagatcgtggacatgaagagagccgtggactgccccgagaacatcaagaaggagatctgcatcaacaagatgctgaaccacgagaacgtggtgaagttctacggccacagaagagagggcaacatccagtacctgttcctggagtactgcagcggcggcgagctgttcgacagaatcgagcccgacatcggcatgcccgagcccgacgcccagagattcttccaccagctgatggccggcgtggtgtacctgcacggcatcggcatcacccacagagacatcaagcccgagaacctgctgctggacgagagagacaacctgaagatcagcgacttcggcctggccaccgtgttcagatacaacaacagagagagactgctgaacaagatgtgcggcaccctgccctacgtggcccccgagctgctgaagagaagagagttccacgccgagcccgtggacgtgtggagctgcggcatcgtgctgaccgccatgctggccggcgagctgccctgggaccagcccagcgacagctgccaggagtacagcgactggaaggagaagaagacctacctgaacccctggaagaagatcgacagcgcccccctggccctgctgcacaagatcctggtggagaaccccagcgccagaatcaccatccccgacatcaagaaggacagatggtacaacaagcccctgaagaagggcgccaagagacccagagtgaccagcggcggcgtgagcgagagccccagcggcttcagcaagcacatccagagcaacctggacttcagccccgtgaacagcgccagcagcgaggagaacgtgaagtacagcagcagccagcccgagcccagaaccggcctgagcctgtgggacaccagccccagctacatcgacaagctggtgcagggcatcagcttcagccagcccacctgccccgaccacatgctgctgaacagccagctgctgggcacccccggcagcagccagaacccctggcagagactggtgaagagaatgaccagattcttcaccaagctggacgccgacaagagctaccagtgcctgaaggagacctgcgagaagctgggctaccagtggaagaagagctgcatgaaccagggcgacggcctggagttcaagagacacttcctgaagatcaagggcaagctgatcgacatcgtgagcagccagaagatctggctgcccgccacctag

SEQ ID NO: 10056 - DNA, 1632 bp, synthetic construct
  misc_feature 1..1632: note = Description of Artificial Sequence: Synthetic coding sequence
  source 1..1632: mol_type = other DNA
atgagcagagagagcgacgtggaggcccagcagagccacggcagcagcgcctgcagccagccccacggcagcgtgacccagagccagggcagcagcagccagagccagggcatcagcagcagcagcaccagcaccatgcccaacagcagccagagcagccacagcagcagcggcaccctgagcagcctggagaccgtgagcacccaggagctgtacagcatccccgaggaccaggagcccgaggaccaggagcccgaggagcccacccccgccccctgggccagactgtgggccctgcaggacggcttcgccaacctggagtgcgtgaacgacaactactggttcggcagagacaagagctgcgagtactgcttcgacgagcccctgctgaagagaaccgacaagtacagaacctacagcaagaagcacttcagaatcttcagagaggtgggccccaagaacagctacatcgcctacatcgaggaccacagcggcaacggcaccttcgtgaacaccgagctggtgggcaagggcaagagaagacccctgaacaacaacagcgagatcgccctgagcctgagcagaaacaaggtgttcgtgttcttcgacctgaccgtggacgaccagagcgtgtaccccaaggccctgagagacgagtacatcatgagcaagaccctgggcagcggcgcctgcggcgaggtgaagctggccttcgagagaaagacctgcaagaaggtggccatcaagatcatcagcaagagaaagttcgccatcggcagcgccagagaggccgaccccgccctgaacgtggagaccgagatcgagatcctgaagaagctgaaccacccctgcatcatcaagatcaagaacttcttcgacgccgaggactactacatcgtgctggagctgatggagggcggcgagctgttcgacaaggtggtgggcaacaagagactgaaggaggccacctgcaagctgtacttctaccagatgctgctggccgtgcagtacctgcacgagaacggcatcatccacagagacctgaagcccgagaacgtgctgctgagcagccaggaggaggactgcctgatcaagatcaccgacttcggccacagcaagatcctgggcgagaccagcctgatgagaaccctgtgcggcacccccacctacctggcccccgaggtgctggtgagcgtgggcaccgccggctacaacagagccgtggactgctggagcctgggcgtgatcctgttcatctgcctgagcggctacccccccttcagcgagcacagaacccaggtgagcctgaaggaccagatcaccagcggcaagtacaacttcatccccgaggtgtgggccgaggtgagcgagaaggccctggacctggtgaagaagctgctggtggtggaccccaaggccagattcaccaccgaggaggccctgagacacccctggctgcaggacgaggacatgaagagaaagttccaggacctgctgagcgaggagaacgagagcaccgccctgccccaggtgctggcccagcccagcaccagcagaaagagacccagagagggcgaggccgagggcgccgagaccaccaagagacccgccgtgtgcgccgccgtgctgtag

SEQ ID NO: 10057 - DNA, 1545 bp, synthetic construct
  misc_feature 1..1545: note = Description of Artificial Sequence: Synthetic coding sequence
  source 1..1545: mol_type = other DNA
atgagcagagagagcgacgtggaggcccagcagagccacggcagcagcgcctgcagccagccccacggcagcgtgacccagagccagggcagcagcagccagagccagggcatcagcagcagcagcaccagcaccatgcccaacagcagccagagcagccacagcagcagcggcaccctgagcagcctggagaccgtgagcacccaggagctgtacagcatccccgaggaccaggagcccgaggaccaggagcccgaggagcccacccccgccccctgggccagactgtgggccctgcaggacggcttcgccaacctggagtgcgtgaacgacaactactggttcggcagagacaagagctgcgagtactgcttcgacgagcccctgctgaagagaaccgacaagtacagaacctacagcaagaagcacttcagaatcttcagagaggtgggccccaagaacagctacatcgcctacatcgaggaccacagcggcaacggcaccttcgtgaacaccgagctggtgggcaagggcaagagaagacccctgaacaacaacagcgagatcgccctgagcctgagcagaaacaaggtgttcgtgttcttcgacctgaccgtggacgaccagagcgtgtaccccaaggccctgagagacgagtacatcatgagcaagaccctgggcagcggcgcctgcggcgaggtgaagctggccttcgagagaaagacctgcaagaaggtggccatcaagatcatcagcaagagaaagttcgccatcggcagcgccagagaggccgaccccgccctgaacgtggagaccgagatcgagatcctgaagaagctgaaccacccctgcatcatcaagatcaagaacttcttcgacgccgaggactactacatcgtgctggagctgatggagggcggcgagctgttcgacaaggtggtgggcaacaagagactgaaggaggccacctgcaagctgtacttctaccagatgctgctggccgtgcagatcaccgacttcggccacagcaagatcctgggcgagaccagcctgatgagaaccctgtgcggcacccccacctacctggcccccgaggtgctggtgagcgtgggcaccgccggctacaacagagccgtggactgctggagcctgggcgtgatcctgttcatctgcctgagcggctacccccccttcagcgagcacagaacccaggtgagcctgaaggaccagatcaccagcggcaagtacaacttcatccccgaggtgtgggccgaggtgagcgagaaggccctggacctggtgaagaagctgctggtggtggaccccaaggccagattcaccaccgaggaggccctgagacacccctggctgcaggacgaggacatgaagagaaagttccaggacctgctgagcgaggagaacgagagcaccgccctgccccaggtgctggcccagcccagcaccagcagaaagagacccagagagggcgaggccgagggcgccgagaccaccaagagacccgccgtgtgcgccgccgtgctgtag

SEQ ID NO: 10058 - DNA, 681 bp, synthetic construct
  misc_feature 1..681: note = Description of Artificial Sequence: Synthetic coding sequence
  source 1..681: mol_type = other DNA
atgagcagagagagcgacgtggaggcccagcagagccacggcagcagcgcctgcagccagccccacggcagcgtgacccagagccagggcagcagcagccagagccagggcatcagcagcagcagcaccagcaccatgcccaacagcagccagagcagccacagcagcagcggcaccctgagcagcctggagaccgtgagcacccaggagctgtacagcatcccccccgaggtgctggtgagcgtgggcaccgccggctacaacagagccgtggactgctggagcctgggcgtgatcctgttcatctgcctgagcggctacccccccttcagcgagcacagaacccaggtgagcctgaaggaccagatcaccagcggcaagtacaacttcatccccgaggtgtgggccgaggtgagcgagaaggccctggacctggtgaagaagctgctggtggtggaccccaaggccagattcaccaccgaggaggccctgagacacccctggctgcaggacgaggacatgaagagaaagttccaggacctgctgagcgaggagaacgagagcaccgccctgccccaggtgctggcccagcccagcaccagcagaaagagacccagagagggcgaggccgagggcgccgagaccaccaagagacccgccgtgtgcgccgccgtgctgtag

SEQ ID NO: 10059 - DNA, 492 bp, synthetic construct
  misc_feature 1..492: note = Description of Artificial Sequence: Synthetic coding sequence
  source 1..492: mol_type = other DNA
atgagcagagagagcgacgtggaggcccagcagagccacggcagcagcgcctgcagccagccccacggcagcgtgacccagagccagggcagcagcagccagagccagggcatcagcagcagcagcaccagcaccatgcccaacagcagccagagcagccacagcagcagcggcaccctgagcagcctggagaccgtgagcacccaggagctgtacagcatccccgaggaccaggagcccgaggaccaggagcccgaggagcccacccccgccccctgggccagactgtgggccctgcaggacggcttcgccaacctgggcgacgaggacatgaagagaaagttccaggacctgctgagcgaggagaacgagagcaccgccctgccccaggtgctggcccagcccagcaccagcagaaagagacccagagagggcgaggccgagggcgccgagaccaccaagagacccgccgtgtgcgccgccgtgctgtag

SEQ ID NO: 10060 - DNA, 870 bp, synthetic construct
  misc_feature 1..870: note = Description of Artificial Sequence: Synthetic coding sequence
  source 1..870: mol_type = other DNA
atgagcagagagagcgacgtggaggcccagcagagccacggcagcagcgcctgcagccagccccacggcagcgtgacccagagccagggcagcagcagccagagccagggcatcagcagcagcagcaccagcaccatgcccaacagcagccagagcagccacagcagcagcggcaccctgagcagcctggagaccgtgagcacccaggagctgtacagcatccccgaggaccaggagcccgaggaccaggagcccgaggagcccacccccgccccctgggccagactgtgggccctgcaggacggcttcgccaacctggagtgcgtgaacgacaactactggttcggcagagacaagagctgcgagtactgcttcgacgagcccctgctgaagagaaccgacaagtacagaacctacagcaagaagcacttcagaatcttcagagaggtgggccccaagaacagctacatcgcctacatcgaggaccacagcggcaacggcaccttcgtgaacaccgagctggtgggcaagggcaagagaagacccctgaacaacaacagcgagatcgccctgagcctgagcagaaacaaggtgttcgtgttcttcgacctgaccgtggacgaccagagcgtgtaccccaaggccctgagagacgagtacatcatgagcaagaccctgggcagcggcgcctgcggcgaggtgaagctggccttcgagagaaagacctgcaagaaggtggccatcaagatcatcagcaagagaaagttcgccatcggcagcgccagagaggccgaccccgccctgaacgtggagaccgagatcgagatcctgaagaagctgaaccacgacggcagaggcagagccgtgtag

SEQ ID NO: 10061 - DNA, 1359 bp, synthetic construct
  misc_feature 1..1359: note = Description of Artificial Sequence: Synthetic coding sequence
  source 1..1359: mol_type = other DNA
atgagcagagagagcgacgtggaggcccagcagagccacggcagcagcgcctgcagccagccccacggcagcgtgacccagagccagggcagcagcagccagagccagggcatcagcagcagcagcaccagcaccatgcccaacagcagccagagcagccacagcagcagcggcaccctgagcagcctggagaccgtgagcacccaggagctgtacagcatccccgaggaccaggagcccgaggaccaggagcccgaggagcccacccccgccccctgggccagactgtgggccctgcaggacggcttcgccaacctggtgttcgtgttcttcgacctgaccgtggacgaccagagcgtgtaccccaaggccctgagagacgagtacatcatgagcaagaccctgggcagcggcgcctgcggcgaggtgaagctggccttcgagagaaagacctgcaagaaggtggccatcaagatcatcagcaagagaaagttcgccatcggcagcgccagagaggccgaccccgccctgaacgtggagaccgagatcgagatcctgaagaagctgaaccacccctgcatcatcaagatcaagaacttcttcgacgccgaggactactacatcgtgctggagctgatggagggcggcgagctgttcgacaaggtggtgggcaacaagagactgaaggaggccacctgcaagctgtacttctaccagatgctgctggccgtgcagtacctgcacgagaacggcatcatccacagagacctgaagcccgagaacgtgctgctgagcagccaggaggaggactgcctgatcaagatcaccgacttcggccacagcaagatcctgggcgagaccagcctgatgagaaccctgtgcggcacccccacctacctggcccccgaggtgctggtgagcgtgggcaccgccggctacaacagagccgtggactgctggagcctgggcgtgatcctgttcatctgcctgagcggctacccccccttcagcgagcacagaacccaggtgagcctgaaggaccagatcaccagcggcaagtacaacttcatccccgaggtgtgggccgaggtgagcgagaaggccctggacctggtgaagaagctgctggtggtggaccccaaggccagattcaccaccgaggaggccctgagacacccctggctgcaggacgaggacatgaagagaaagttccaggacctgctgagcgaggagaacgagagcaccgccctgccccaggtgctggcccagcccagcaccagcagaaagagacccagagagggcgaggccgagggcgccgagaccaccaagagacccgccgtgtgcgccgccgtgctgtag

SEQ ID NO: 10062 - DNA, 1761 bp, synthetic construct
  misc_feature 1..1761: note = Description of Artificial Sequence: Synthetic coding sequence
  source 1..1761: mol_type = other DNA
atgagcagagagagcgacgtggaggcccagcagagccacggcagcagcgcctgcagccagccccacggcagcgtgacccagagccagggcagcagcagccagagccagggcatcagcagcagcagcaccagcaccatgcccaacagcagccagagcagccacagcagcagcggcaccctgagcagcctggagaccgtgagcacccaggagctgtacagcatccccgaggaccaggagcccgaggaccaggagcccgaggagcccacccccgccccctgggccagactgtgggccctgcaggacggcttcgccaacctggagaccgagagcggccacgtgacccagagcgacctggagctgctgctgagcagcgacccccccgccagcgccagccagagcgccggcatcagaggcgtgagacaccaccccagacccgtgtgcagcctgaagtgcgtgaacgacaactactggttcggcagagacaagagctgcgagtactgcttcgacgagcccctgctgaagagaaccgacaagtacagaacctacagcaagaagcacttcagaatcttcagagaggtgggccccaagaacagctacatcgcctacatcgaggaccacagcggcaacggcaccttcgtgaacaccgagctggtgggcaagggcaagagaagacccctgaacaacaacagcgagatcgccctgagcctgagcagaaacaaggtgttcgtgttcttcgacctgaccgtggacgaccagagcgtgtaccccaaggccctgagagacgagtacatcatgagcaagaccctgggcagcggcgcctgcggcgaggtgaagctggccttcgagagaaagacctgcaagaaggtggccatcaagatcatcagcaagagaaagttcgccatcggcagcgccagagaggccgaccccgccctgaacgtggagaccgagatcgagatcctgaagaagctgaaccacccctgcatcatcaagatcaagaacttcttcgacgccgaggactactacatcgtgctggagctgatggagggcggcgagctgttcgacaaggtggtgggcaacaagagactgaaggaggccacctgcaagctgtacttctaccagatgctgctggccgtgcagtacctgcacgagaacggcatcatccacagagacctgaagcccgagaacgtgctgctgagcagccaggaggaggactgcctgatcaagatcaccgacttcggccacagcaagatcctgggcgagaccagcctgatgagaaccctgtgcggcacccccacctacctggcccccgaggtgctggtgagcgtgggcaccgccggctacaacagagccgtggactgctggagcctgggcgtgatcctgttcatctgcctgagcggctacccccccttcagcgagcacagaacccaggtgagcctgaaggaccagatcaccagcggcaagtacaacttcatccccgaggtgtgggccgaggtgagcgagaaggccctggacctggtgaagaagctgctggtggtggaccccaaggccagattcaccaccgaggaggccctgagacacccctggctgcaggacgaggacatgaagagaaagttccaggacctgctgagcgaggagaacgagagcaccgccctgccccaggtgctggcccagcccagcaccagcagaaagagacccagagagggcgaggccgagggcgccgagaccaccaagagacccgccgtgtgcgccgccgtgctgtag

SEQ ID NO: 10063 - DNA, 1545 bp, synthetic construct; identical to SEQ ID NO: 10057
  misc_feature 1..1545: note = Description of Artificial Sequence: Synthetic coding sequence
  source 1..1545: mol_type = other DNA

SEQ ID NO: 10064 - DNA, 1359 bp, synthetic construct; identical to SEQ ID NO: 10061
  misc_feature 1..1359: note = Description of Artificial Sequence: Synthetic coding sequence
  source 1..1359: mol_type = other DNA

SEQ ID NO: 10065 - DNA, 1632 bp, synthetic construct; identical to SEQ ID NO: 10056
  misc_feature 1..1632: note = Description of Artificial Sequence: Synthetic coding sequence
  source 1..1632: mol_type = other DNA

SEQ ID NO: 10066 - DNA, 1632 bp, synthetic construct; identical to SEQ ID NO: 10056
  misc_feature 1..1632: note = Description of Artificial Sequence: Synthetic coding sequence
  source 1..1632: mol_type = other DNA

SEQ ID NO: 10067 - DNA, 969 bp, synthetic construct
  misc_feature 1..969: note = Description of Artificial Sequence: Synthetic coding sequence
  source 1..969: mol_type = other DNA
atgagcaagaccctgggcagcggcgcctgcggcgaggtgaagctggccttcgagagaaagacctgcaagaaggtggccatcaagatcatcagcaagagaaagttcgccatcggcagcgccagagaggccgaccccgccctgaacgtggagaccgagatcgagatcctgaagaagctgaaccacccctgcatcatcaagatcaagaacttcttcgacgccgaggactactacatcgtgctggagctgatggagggcggcgagctgttcgacaaggtggtgggcaacaagagactgaaggaggccacctgcaagctgtacttctaccagatgctgctggccgtgcagtacctgcacgagaacggcatcatccacagagacctgaagcccgagaacgtgctgctgagcagccaggaggaggactgcctgatcaagatcaccgacttcggccacagcaagatcctgggcgagaccagcctgatgagaaccctgtgcggcacccccacctacctggcccccgaggtgctggtgagcgtgggcaccgccggctacaacagagccgtggactgctggagcctgggcgtgatcctgttcatctgcctgagcggctacccccccttcagcgagcacagaacccaggtgagcctgaaggaccagatcaccagcggcaagtacaacttcatccccgaggtgtgggccgaggtgagcgagaaggccctggacctggtgaagaagctgctggtggtggaccccaaggccagattcaccaccgaggaggccctgagacacccctggctgcaggacgaggacatgaagagaaagttccaggacctgctgagcgaggagaacgagagcaccgccctgccccaggtgctggcccagcccagcaccagcagaaagagacccagagagggcgaggccgagggcgccgagaccaccaagagacccgccgtgtgcgccgccgtgctgtag

SEQ ID NO: 10068 - DNA, 624 bp, synthetic construct
  misc_feature 1..624: note = Description of Artificial Sequence: Synthetic coding sequence
  source 1..624: mol_type = other DNA
atgagcagagagagcgacgtggaggcccagcagagccacggcagcagcgcctgcagccagccccacggcagcgtgacccagagccagggcagcagcagccagagccagggcatcagcagcagcagcaccagcaccatgcccaacagcagccagagcagccacagcagcagcggcaccctgagcagcctggagaccgtgagcacccaggagctgtacagcatccccgaggaccaggagcccgaggaccaggagcccgaggagcccacccccgccccctgggccagactgtgggccctgcaggacggcttcgccaacctggagtgcgtgaacgacaactactggttcggcagagacaagagctgcgagtactgcttcgacgagcccctgctgaagagaaccgacaagtacagaacctacagcaagaagcacttcagaatcttcagagaggtgggccccaagaacagctacatcgcctacatcgaggaccacagcggcaacggcaccttcgtgaacaccgagctggtgggcaagggcaagagaagacccctgaacaacaacagcgagatcgccctgagcctgagcagaaacaaggagaagatcctgaagatctacagcctgagctag

SEQ ID NO: 10069 - DNA, 294 bp, synthetic construct
  misc_feature 1..294: note = Description of Artificial Sequence: Synthetic coding sequence
  source 1..294: mol_type = other DNA
atgaaggtgagcgccgccctgctgtggctgctgctgatcgccgccgccttcagcccccagggcctggccggccccgccagcgtgcccaccacctgctgcttcaacctggccaacagaaagatccccctgcagagactggagagctacagaagaatcaccagcggcaagtgcccccagaaggccgtgatcttcaagaccaagctggccaaggacatctgcgccgaccccaagaagaagtgggtgcaggacagcatgaagtacctggaccagaagagccccacccccaagccctag

SEQ ID NO: 10070 - DNA, 1692 bp, synthetic construct
  misc_feature 1..1692: note = Description of Artificial Sequence: Synthetic coding sequence
  source 1..1692: mol_type = other DNA
atgagcagaatcggcggcgccggcctgcccgccgccgccctgaccggccccggcagattcagaatggccagagaggagcccgcccccgccgccctggccgccgccggccagcccggcggcggcagaggcggcgagagagccctgcagggccccggcgtggccagaagaggcagacccagcctgagcagagccaagctgcacggcctgagacacatgtgcgccggcagaaccgccgccggcggcagcttccagagaagagccctgtgggtgctggccttctgcaccagcttcggcctgctgctgagctggagcagcaacagactgctgtactggctgagcttccccagccacaccagagtgcacagagagtggagcagacagctgcccttccccgccgtgaccgtgtgcaacaacaaccccctgagattccccagactgagcaagggcgacctgtactacgccggccactggctgggcctgctgctgcccaacagaaccgccagacccctggtgagcgagctgctgagaggcgacgagcccagaagacagtggttcagaaagctggccgacttcagactgttcctgccccccagacacttcgagggcatcagcgccgccttcatggacagactgggccaccagctggaggacatgctgctgagctgcaagtacagaggcgagctgtgcggcccccacaacttcagcagcgtgttcaccaagtacggcaagtgctacatgttcaacagcggcgaggacggcaagcccctgctgaccaccgtgaagggcggcaccggcaacggcctggagatcatgctggacatccagcaggacgagtacctgcccatctggggcgagaccgaggagaccaccttcgaggccggcgtgaaggtgcagatccacagccagagcgagccccccttcatccaggagctgggcttcggcgtggcccccggcttccagaccttcgtggccacccaggagcagagactgacctacctgccccccccctggggcgagtgcagaagcagcgagatgggcctggacttcttccccgtgtacagcatcaccgcctgcagaatcgactgcgagaccagatacatcgtggagaactgcaactgcagaatggtgcacatgcccggcgacgcccccttctgcacccccgagcagcacaaggagtgcgccgagcccgccctgggcctgctggccgagaaggacagcaactactgcctgtgcagaaccccctgcaacctgaccagatacaacaaggagctgagcatggtgaagatccccagcaagaccagcgccaagtacctggagaagaagttcaacaagagcgagaagtacatcagcgagaacatcctggtgctggacatcttcttcgaggccctgaactacgagaccatcgagcagaagaaggcctacgaggtggccgccctgctgggcgacatcggcggccagatgggcctgttcatcggcgccagcatcctgaccatcctggagctgttcgactacatctacgagctgatcaaggagaagctgctggacctgctgggcaaggaggaggacgagggcagccacgacgagaacgtgagcacctgcgacaccatgcccaaccacagcgagaccatcagccacaccgtgaacgtgcccctgcagaccaccctgggcaccctggaggagatcgcctgctag

SEQ ID NO: 10071 - DNA, 2328 bp, synthetic construct
  misc_feature 1..2328: note = Description of Artificial Sequence: Synthetic coding sequence
  source 1..2328: mol_type = other DNA
atggtgggccccgaggacgccggcgcctgcagcggcagaaaccccaagctgctgcccgtgcccgcccccgaccccgtgggccaggacagaaaggtgatcagagccaccggcggcttcggcggcggcgtgggcgccgtggagccccccgaggaggccgacgaggaggaggaggccgacgaggaggaggagaccccccccagacagctgctgcagagatacctggccgccgccggcgagcagctggagcccggcctgtgctactgccccctgcccgccggccaggccggcgcccccccccccagcgccgcccccagaagcgacgcctgcctgctgggcagcggcagcaagcacagaggcgccgaggtggccgacggcagagcccccagacacgagggcatgaccaacggcgacagcggcttcctgcccggcagagactgcagagacctggaggaggccagaggcctggccagagccggcggcagagagagcagaagaagaagaccctacggcagactgagactggagggccccggcgacgaggacgccgacggcgccggcagccccagcgactgggccagccccctggaggaccccctgagaagctgctgcctggtggccgccgacgcccaggagcccgagggcgccggcagcgacagcggcgacagccccgccagcagctgcagcagcagcgaggacagcgagcagagaggcgtgggcgccggcggccccgaggagggcgccccccccgccaccagcgccgagagaaccaacggcggcgccgagcccagactgggcttcagcgacatccacttcaacagcagaaacaccttccaggtgagcagaggccagagcgccagagaccacctgccccccgccggcccccccgtgcccctgcccgccgccgagcagggccccgccggcgccagcgccagagccagaagaagcggcggcttcgccgacttcttcaccagaaacctgttccccaagagaaccaaggagctgaagagcgtggtgcacagcgcccccggctggaagctgttcggcaaggtgccccccagagagaacctgcagaagaccagcaagatcatccagcaggagtacgaggccagaaccggcagaacctgcaagccccccccccagagcagcagaagaaagaacttcgagttcgagcccctgagcaccaccgccctgatcctggaggacagacccagcaacctgcccgccaagagcgtggaggaggccctgagacacagacaggagtacgacgagatggtggccgaggccaagaagagagagatcaaggaggcccacaagagaaagagaatcatgaaggagagattcaagcaggaggagaacatcgccagcgccatggtgatctggatcaacgagatcctgcccaactgggaggtgatgagaagcaccagaagagtgagagagctgtggtggcagggcctgccccccagcgtgagaggcaaggtgtggagcctggccgtgggcaacgagctgaacatcacccccgagctgtacgagatcttcctgagcagagccaaggagagatggaagagcttcagcgagaccagcagcgagaacgacaccgagggcgtgagcgtggccgacagagaggccagcctggagctgatcaagctggacatcagcagaaccttccccagcctgtacatcttccagaagggcggcccctaccacgacgtgctgcacagcatcctgggcgcctacacctgctacagacccgacgtgggctacgtgcagggcatgagcttcatcgccgccgtgctgatcctgaacctggaggaggccgacgccttcatcgccttcgccaacctgctgaacaagccctgccagctggccttcttcagagtggaccacagcatgatgctgaagtacttcgccaccttcgaggtgttcttcgaggagaacctgagcaagctgttcctgcacttcaagagctacagcctgacccccgacatctacctgatcgactggatcttcaccctgtacagcaagagcctgcccctggacctggcctgcagagtgtgggacgtgttctgcagagacggcgaggagttcctgttcagaaccggcctgggcatcctgagactgtacgaggacatcctgctgcagatggacttcatccacatcgcccagttcctgaccaagctgcccgaggacatcaccagcgagaagctgttcagctgcatcgccgccatccagatgcagaacagcaccaagaagtggacccaggtgttcgccagcgtgatgaaggacatcaaggagggcgacaagaacagcagccccgccctgaagagctag

SEQ ID NO: 10072 - DNA, 276 bp, synthetic construct
  misc_feature 1..276: note = Description of Artificial Sequence: Synthetic coding sequence
  source 1..276: mol_type = other DNA
atgaaggtgagcgccgccgccctggccgtgatcctgatcgccaccgccctgtgcgcccccgccagcgccagcccctacagcagcgacaccaccccctgctgcttcgcctacatcgccagacccctgcccagagcccacatcaaggagtacttctacaccagcggcaagtgcagcaaccccgccgtggtgttcgtgaccagaaagaacagacaggtgtgcgccaaccccgagaagaagtgggtgagagagtacatcaacagcctggagatgagctag

SEQ ID NO: 10073 - DNA, 276 bp, synthetic construct; identical to SEQ ID NO: 10072
  misc_feature 1..276: note = Description of Artificial Sequence: Synthetic coding sequence
  source 1..276: mol_type = other DNA

SEQ ID NO: 10074 - DNA, 300 bp, synthetic construct
  misc_feature 1..300: note = Description of Artificial Sequence: Synthetic coding sequence
  source 1..300: mol_type = other DNA
atgaaggccagcgccgccctgctgtgcctgctgctgaccgccgccgccttcagcccccagggcctggcccagcccgtgggcatcaacaccagcaccacctgctgctacagattcatcaacaagaagatccccaagcagagactggagagctacagaagaaccaccagcagccactgccccagagaggccgtgatcttcaagaccaagctggacaaggagatctgcgccgaccccacccagaagtgggtgcaggacttcatgaagcacctggacaagaagacccagacccccaagctgtag

SEQ ID NO: 10075 - DNA, 330 bp, synthetic construct
  misc_feature 1..330: note = Description of Artificial Sequence: Synthetic coding sequence
  source 1..330: mol_type = other DNA
atgtggaagcccatgcccagccccagcaacatgaaggccagcgccgccctgctgtgcctgctgctgaccgccgccgccttcagcccccagggcctggcccagcccgtgggcatcaacaccagcaccacctgctgctacagattcatcaacaagaagatccccaagcagagactggagagctacagaagaaccaccagcagccactgccccagagaggccgtgatcttcaagaccaagctggacaaggagatctgcgccgaccccacccagaagtgggtgcaggacttcatgaagcacctggacaagaagacccagacccccaagctgtag

SEQ ID NO: 10076 - DNA, 276 bp, synthetic construct
  misc_feature 1..276: note = Description of Artificial Sequence: Synthetic coding sequence
  source 1..276: mol_type = other DNA
atgtggaagcccatgcccagccccagcaacatgaaggccagcgccgccctgctgtgcctgctgctgaccgccgccgccttcagcccccagggcctggcccagcccgagagacccagaacccacccccagtggaccttcctgctggtggtgagcctgcagctgggcctgatcctgcagctgcccgccgccaccgacctgagcatcagaaagagcctgagcagaggctggagagccaccgagggcccccccgtggccaccgtgcccggcaagctgtag

SEQ ID NO: 10077 - DNA, 174 bp, synthetic construct
  misc_feature 1..174: note = Description of Artificial Sequence: Synthetic coding sequence
  source 1..174: mol_type = other DNA
atgtggaagcccatgcccagccccagcaacatgaaggccagcgccgccctgctgtgcctgctgctgaccgccgccgccttcagcccccagggcctggcccagcccgccagcagacccaactggaccagaagaagcgtgctgaccccccacagaagcggcagcagaaccctgtag

SEQ ID NO: 10078 - DNA, 297 bp, synthetic construct
  misc_feature 1..297: note = Description of Artificial Sequence: Synthetic coding sequence
  source 1..297: mol_type = other DNA
atgaaccagaccgccatcctgatctgctgcctgatcttcctgaccctgagcggcatccagggcgtgcccctgagcagaaccgtgagatgcacctgcatcagcatcagcaaccagcccgtgaaccccagaagcctggagaagctggagatcatccccgccagccagttctgccccagagtggagatcatcgccaccatgaagaagaagggcgagaagagatgcctgaaccccgagagcaaggccatcaagaacctgctgaaggccgtgagcaaggagagaagcaagagaagcccctag

SEQ ID NO: 10079 - DNA, 270 bp, synthetic construct
  misc_feature 1..270: note = Description of Artificial Sequence: Synthetic coding sequence
  source 1..270: mol_type = other DNA
atgaacgccaaggtggtggtggtgctggtgctggtgctgaccgccctgtgcctgagcgacggcaagcccgtgagcctgagctacagatgcccctgcagattcttcgagagccacgtggccagagccaacgtgaagcacctgaagatcctgaacacccccaactgcgccctgcagatcgtggccagactgaagaacaacaacagacaggtgtgcatcgaccccaagctgaagtggatccaggagtacctggagaaggccctgaacaagtag

SEQ ID NO: 10080 - DNA, 360 bp, synthetic construct
  misc_feature 1..360: note = Description of Artificial Sequence: Synthetic coding sequence
  source 1..360: mol_type = other DNA
atgaacgccaaggtggtggtggtgctggtgctggtgctgaccgccctgtgcctgagcgacggcaagcccgtgagcctgagctacagatgcccctgcagattcttcgagagccacgtggccagagccaacgtgaagcacctgaagatcctgaacacccccaactgcgccctgcagatcgtggccagactgaagaacaacaacagacaggtgtgcatcgaccccaagctgaagtggatccaggagtacctggagaaggccctgaacaagggcagaagagaggagaaggtgggcaagaaggagaagatcggcaagaagaagagacagaagaagagaaaggccgcccagaagagaaagaactag

SEQ ID NO: 10081 - DNA, 282 bp, synthetic construct
  misc_feature 1..282: note = Description of Artificial Sequence: Synthetic coding sequence
  source 1..282: mol_type = other DNA
atgaacgccaaggtggtggtggtgctggtgctggtgctgaccgccctgtgcctgagcgacggcaagcccgtgagcctgagctacagatgcccctgcagattcttcgagagccacgtggccagagccaacgtgaagcacctgaagatcctgaacacccccaactgcgccctgcagatcgtggccagactgaagaacaacaacagacaggtgtgcatcgaccccaagctgaagtggatccaggagtacctggagaaggccctgaacaagagattcaagatgtag

SEQ ID NO: 10082 - DNA, 423 bp, synthetic construct
  misc_feature 1..423: note = Description of Artificial Sequence: Synthetic coding sequence
  source 1..423: mol_type = other DNA
atgaacgccaaggtggtggtggtgctggtgctggtgctgaccgccctgtgcctgagcgacggcaagcccgtgagcctgagctacagatgcccctgcagattcttcgagagccacgtggccagagccaacgtgaagcacctgaagatcctgaacacccccaactgcgccctgcagatcgtggccagactgaagaacaacaacagacaggtgtgcatcgaccccaagctgaagtggatccaggagtacctggagaaggccctgaacaacctgatcagcgccgcccccgccggcaagagagtgatcgccggcgccagagccctgcaccccagcccccccagagcctgccccaccgccagagccctgtgcgagatcagactgtggcccccccccgagtggagctggcccagccccggcgacgtgtag

SEQ ID NO: 10083 - DNA, 273 bp, synthetic construct
  misc_feature 1..273: note = Description of Artificial Sequence: Synthetic coding sequence
  source 1..273: mol_type = other DNA
atgaacgccaaggtggtggtggtgctggtgctggtgctgaccgccctgtgcctgagcgacggcaagcccgtgagcctgagctacagatgcccctgcagattcttcgagagccacgtggccagagccaacgtgaagcacctgaagatcctgaacacccccaactgcgccctgcagatcgtggccagactgaagaacaacaacagacaggtgtgcatcgaccccaagctgaagtggatccaggagtacctggagaaggccctgaacaactgctag

SEQ ID NO: 10084 - DNA, 330 bp, synthetic construct
  misc_feature 1..330: note = Description of Artificial Sequence: Synthetic coding sequence
  source 1..330: mol_type = other DNA
atgaagttcatcagcaccagcctgctgctgatgctgctggtgagcagcctgagccccgtgcagggcgtgctggaggtgtactacaccagcctgagatgcagatgcgtgcaggagagcagcgtgttcatccccagaagattcatcgacagaatccagatcctgcccagaggcaacggctgccccagaaaggagatcatcgtgtggaagaagaacaagagcatcgtgtgcgtggacccccaggccgagtggatccagagaatgatggaggtgctgagaaagagaagcagcagcaccctgcccgtgcccgtgttcaagagaaagatcccctag

SEQ ID NO: 10085 - DNA, 1560 bp, synthetic construct
  misc_feature 1..1560: note = Description of Artificial Sequence: Synthetic coding sequence
  source 1..1560: mol_type = other DNA
atgttcctgctgcccctgcccgccgccggcagagtggtggtgagaagactggccgtgagaagattcggcagcagaagcctgagcaccgccgacatgaccaagggcctggtgctgggcatctacagcaaggagaaggaggacgacgtgccccagttcaccagcgccggcgagaacttcgacaagctgctggccggcaagctgagagagaccctgaacatcagcggcccccccctgaaggccggcaagaccagaaccttctacggcctgcaccaggacttccccagcgtggtgctggtgggcctgggcaagaaggccgccggcatcgacgagcaggagaactggcacgagggcaaggagaacatcagagccgccgtggccgccggctgcagacagatccaggacctggagctgagcagcgtggaggtggacccctgcggcgacgcccaggccgccgccgagggcgccgtgctgggcctgtacgagtacgacgacctgaagcagaagaagaagatggccgtgagcgccaagctgtacggcagcggcgaccaggaggcctggcagaagggcgtgctgttcgccagcggccagaacctggccagacagctgatggagacccccgccaacgagatgacccccaccagattcgccgagatcatcgagaagaacctgaagagcgccagcagcaagaccgaggtgcacatcagacccaagagctggatcgaggagcaggccatgggcagcttcctgagcgtggccaagggcagcgacgagccccccgtgttcctggagatccactacaagggcagccccaacgccaacgagccccccctggtgttcgtgggcaagggcatcaccttcgacagcggcggcatcagcatcaaggccagcgccaacatggacctgatgagagccgacatgggcggcgccgccaccatctgcagcgccatcgtgagcgccgccaagctgaacctgcccatcaacatcatcggcctggcccccctgtgcgagaacatgcccagcggcaaggccaacaagcccggcgacgtggtgagagccaagaacggcaagaccatccaggtggacaacaccgacgccgagggcagactgatcctggccgacgccctgtgctacgcccacaccttcaaccccaaggtgatcctgaacgccgccaccctgaccggcgccatggacgtggccctgggcagcggcgccaccggcgtgttcaccaacagcagctggctgtggaacaagctgttcgaggccagcatcgagaccggcgacagagtgtggagaatgcccctgttcgagcactacaccagacaggtggtggactgccagctggccgacgtgaacaacatcggcaagtacagaagcgccggcgcctgcaccgccgccgccttcctgaaggagttcgtgacccaccccaagtgggcccacctggacatcgccggcgtgatgaccaacaaggacgaggtgccctacctgagaaagggcatgaccggcagacccaccagaaccctgatcgagttcctgctgagattcagccaggacaacgcctag

SEQ ID NO: 10086 - DNA, 378 bp, synthetic construct
  misc_feature 1..378: note = Description of Artificial Sequence: Synthetic coding sequence
  source 1..378: mol_type = other DNA
atgaagaagagcggcgtgctgttcctgctgggcatcatcctgctggtgctgatcggcgtgcagggcacccccgtggtgagaaagggcagatgcagctgcatcagcaccaaccagggcaccatccacctgcagagcctgaaggacctgaagcagttcgcccccagccccagctgcgagaagatcgagatcatcgccaccctgaagaacggcgtgcagacctgcctgaaccccgacagcgccgacgtgaaggagctgatcaagaagtgggagaagcaggtgagccagaagaagaagcagaagaacggcaagaagcaccagaagaagaaggtgctgaaggtgagaaagagccagagaagcagacagaagaagaccacctag

SEQ ID NO: 10087 - DNA, 1083 bp, synthetic construct
  misc_feature 1..1083: note = Description of Artificial Sequence: Synthetic coding sequence
  source 1..1083: mol_type = other DNA
atggaggacttcaacatggagagcgacagcttcgaggacttctggaagggcgaggacctgagcaactacagctacagcagcaccctgccccccttcctgctggacgccgccccctgcgagcccgagagcctggagatcaacaagtacttcgtggtgatcatctacgccctggtgttcctgctgagcctgctgggcaacagcctggtgatgctggtgatcctgtacagcagagtgggcagaagcgtgaccgacgtgtacctgctgaacctggccctggccgacctgctgttcgccctgaccctgcccatctgggccgccagcaaggtgaacggctggatcttcggcaccttcctgtgcaaggtggtgagcctgctgaaggaggtgaacttctacagcggcatcctgctgctggcctgcatcagcgtggacagatacctggccatcgtgcacgccaccagaaccctgacccagaagagatacctggtgaagttcatctgcctgagcatctggggcctgagcctgctgctggccctgcccgtgctgctgttcagaagaaccgtgtacagcagcaacgtgagccccgcctgctacgaggacatgggcaacaacaccgccaactggagaatgctgctgagaatcctgccccagagcttcggcttcatcgtgcccctgctgatcatgctgttctgctacggcttcaccctgagaaccctgttcaaggcccacatgggccagaagcacagagccatgagagtgatcttcgccgtggtgctgatcttcctgctgtgctggctgccctacaacctggtgctgctggccgacaccctgatgagaacccaggtgatccaggagacctgcgagagaagaaaccacatcgacagagccctggacgccaccgagatcctgggcatcctgcacagctgcctgaaccccctgatctacgccttcatcggccagaagttcagacacggcctgctgaagatcctggccatccacggcctgatcagcaaggacagcctgcccaaggacagcagacccagcttcgtgggcagcagcagcggccacaccagcaccaccctgtag

SEQ ID NO: 10088 - DNA, 417 bp, synthetic construct
  misc_feature 1..417: note = Description of Artificial Sequence: Synthetic coding sequence
  source 1..417: mol_type = other DNA
atggaggacttcaacatggagagcgacagcttcgaggacttctggaagggcgaggacctgagcaactacagctacagcagcaccctgccccccttcctgctggacgccgccccctgcgagcccgagagcctggagatcaacaagtacttcgtggtgatcatctacgccctggtgttcctgctgagcctgctgggcaacagcctggtgatgctggtgatcctgtacagcagagtgggcagaagcgtgaccgacgtgtacctgctgaacctggccctggccgacctgctgttcgccctgaccctgcccatctgggccgccagcaaggtgaacggctggatcttcggcaccttcctgtgcaaggtggtgagcctgctgaaggaggtgaacttctacagcggcatcctgctgctggcctag

SEQ ID NO: 10089 - DNA, 48 bp, synthetic construct
  misc_feature 1..48: note = Description of Artificial Sequence: Synthetic coding sequence
  source 1..48: mol_type = other DNA
atggaggacttcaacatggagagcgacagcttcgaggacttctggtag

SEQ ID NO: 10090 - DNA, 519 bp, synthetic construct
  misc_feature 1..519: note = Description of Artificial Sequence: Synthetic coding sequence
  source 1..519: mol_type = other DNA
atggaggacttcaacatggagagcgacagcttcgaggacttctggaagggcgaggacctgagcaactacagctacagcagcaccctgccccccttcctgctggacgccgccccctgcgagcccgagagcctggagatcaacaagtacttcgtggtgatcatctacgccctggtgttcctgctgagcctgctgggcaacagcctggtgatgctggtgatcctgtacagcagagtgggcagaagcgtgaccgacgtgtacctgctgaacctggccctggccgacctgctgttcgccctgaccctgcccatctgggccgccagcaaggtgaacggctggatcttcggcaccttcctgtgcaaggtggtgagcctgctgaaggaggtgaacttctacagcggcatcctgctgctggcctgcatcagcgtggacagatacctggccatcgtgcacgccaccagaaccctgacccagaagagatacctggtgaagttcatctgcctgagcatctggggcctgtag

SEQ ID NO: 10091 - DNA, 48 bp, synthetic construct; identical to SEQ ID NO: 10089
  misc_feature 1..48: note = Description of Artificial Sequence: Synthetic coding sequence
  source 1..48: mol_type = other DNA

SEQ ID NO: 10092 - DNA, 606 bp, synthetic construct
  misc_feature 1..606: note = Description of Artificial Sequence: Synthetic coding sequence
  source 1..606: mol_type = other DNA
atggaggacttcaacatggagagcgacagcttcgaggacttctggaagggcgaggacctgagcaactacagctacagcagcaccctgccccccttcctgctggacgccgccccctgcgagcccgagagcctggagatcaacaagtacttcgtggtgatcatctacgccctggtgttcctgctgagcctgctgggcaacagcctggtgatgctggtgatcctgtacagcagagtgggcagaagcgtgaccgacgtgtacctgctgaacctggccctggccgacctgctgttcgccctgaccctgcccatctgggccgccagcaaggtgaacggctggatcttcggcaccttcctgtgcaaggtggtgagcctgctgaaggaggtgaacttctacagcggcatcctgctgctggcctgcatcagcgtggacagatacctggccatcgtgcacgccaccagaaccctgacccagaagagatacctggtgaagttcatctgcctgagcatctggggcctgagcctgctgctggccctgcccgtgctgctgttcagaagaaccgtgtacagcagcaacgtgagccccgcctgctacgaggacatgggctag

SEQ ID NO: 10093 - DNA, 411 bp, synthetic construct
  misc_feature 1..411: note = Description of Artificial Sequence: Synthetic coding sequence
  source 1..411: mol_type = other DNA
atggaggacttcaacatggagagcgacagcttcgaggacttctggaagggcgaggacctgagcaactacagctacagcagcaccctgccccccttcctgctggacgccgccccctgcgagcccgagagcctggagatcaacaagtacttcgtggtgatcatctacgccctggtgttcctgctgagcctgctgggcaacagcctggtgatgctggtgatcctgtacagcagagtgggcagaagcgtgaccgacgtgtacctgctgaacctggccctggccgacctgctgttcgccctgaccctgcccatctgggccgccagcaaggtgaacggctggatcttcggcaccttcctgtgcaaggtggtgagcctgctgaaggaggtgaacttctacagcggcatcctgctgtag

SEQ ID NO: 10094 - DNA, 1059 bp, synthetic construct
  misc_feature 1..1059: note = Description of Artificial Sequence: Synthetic coding sequence
  source 1..1059: mol_type = other DNA
atggagggcatcagcatctacaccagcgacaactacaccgaggagatgggcagcggcgactacgacagcatgaaggagccctgcttcagagaggagaacgccaacttcaacaagatcttcctgcccaccatctacagcatcatcttcctgaccggcatcgtgggcaacggcctggtgatcctggtgatgggctaccagaagaagctgagaagcatgaccgacaagtacagactgcacctgagcgtggccgacctgctgttcgtgatcaccctgcccttctgggccgtggacgccgtggccaactggtacttcggcaacttcctgtgcaaggccgtgcacgtgatctacaccgtgaacctgtacagcagcgtgctgatcctggccttcatcagcctggacagatacctggccatcgtgcacgccaccaacagccagagacccagaaagctgctggccgagaaggtggtgtacgtgggcgtgtggatccccgccctgctgctgaccatccccgacttcatcttcgccaacgtgagcgaggccgacgacagatacatctgcgacagattctaccccaacgacctgtgggtggtggtgttccagttccagcacatcatggtgggcctgatcctgcccggcatcgtgatcctgagctgctactgcatcatcatcagcaagctgagccacagcaagggccaccagaagagaaaggccctgaagaccaccgtgatcctgatcctggccttcttcgcctgctggctgccctactacatcggcatcagcatcgacagcttcatcctgctggagatcatcaagcagggctgcgagttcgagaacaccgtgcacaagtggatcagcatcaccgaggccctggccttcttccactgctgcctgaaccccatcctgtacgccttcctgggcgccaagttcaagaccagcgcccagcacgccctgaccagcgtgagcagaggcagcagcctgaagatcctgagcaagggcaagagaggcggccacagcagcgtgagcaccgagagcgagagcagcagcttccacagcagctag

SEQ ID NO: 10095 - DNA, 1071 bp, synthetic construct
  misc_feature 1..1071: note = Description of Artificial Sequence: Synthetic coding sequence
  source 1..1071: mol_type = other DNA
atgagcatccccctgcccctgctgcagatctacaccagcgacaactacaccgaggagatgggcagcggcgactacgacagcatgaaggagccctgcttcagagaggagaacgccaacttcaacaagatcttcctgcccaccatctacagcatcatcttcctgaccggcatcgtgggcaacggcctggtgatcctggtgatgggctaccagaagaagctgagaagcatgaccgacaagtacagactgcacctgagcgtggccgacctgctgttcgtgatcaccctgcccttctgggccgtggacgccgtggccaactggtacttcggcaacttcctgtgcaaggccgtgcacgtgatctacaccgtgaacctgtacagcagcgtgctgatcctggccttcatcagcctggacagatacctggccatcgtgcacgccaccaacagccagagacccagaaagctgctggccgagaaggtggtgtacgtgggcgtgtggatccccgccctgctgctgaccatccccgacttcatcttcgccaacgtgagcgaggccgacgacagatacatctgcgacagattctaccccaacgacctgtgggtggtggtgttccagttccagcacatcatggtgggcctgatcctgcccggcatcgtgatcctgagctgctactgcatcatcatcagcaagctgagccacagcaagggccaccagaagagaaaggccctgaagaccaccgtgatcctgatcctggccttcttcgcctgctggctgccctactacatcggcatcagcatcgacagcttcatcctgctggagatcatcaagcagggctgcgagttcgagaacaccgtgcacaagtggatcagcatcaccgaggccctggccttcttccactgctgcctgaaccccatcctgtacgccttcctgggcgccaagttcaagaccagcgcccagcacgccctgaccagcgtgagcagaggcagcagcctgaagatcctgagcaagggcaagagaggcggccacagcagcgtgagcaccgagagcgagagcagcagcttccacagcagctag

SEQ ID NO: 10096 - DNA, 669 bp, synthetic construct
  misc_feature 1..669: note = Description of Artificial Sequence: Synthetic coding sequence
  source 1..669: mol_type = other DNA
atgccctggcagaccggcaccctgggcaccagctacgccagacagagcatgagcagcacccagagcaccagcaccgccgtgagcagcagctggatccccgccctgctgctgaccatccccgacttcatcttcgccaacgtgagcgaggccgacgacagatacatctgcgacagattctaccccaacgacctgtgggtggtggtgttccagttccagcacatcatggtgggcctgatcctgcccggcatcgtgatcctgagctgctactgcatcatcatcagcaagctgagccacagcaagggccaccagaagagaaaggccctgaagaccaccgtgatcctgatcctggccttcttcgcctgctggctgccctactacatcggcatcagcatcgacagcttcatcctgctggagatcatcaagcagggctgcgagttcgagaacaccgtgcacaagtggatcagcatcaccgaggccctggccttcttccactgctgcctgaaccccatcctgtacgccttcctgggcgccaagttcaagaccagcgcccagcacgccctgaccagcgtgagcagaggcagcagcctgaagatcctgagcaagggcaagagaggcggccacagcagcgtgagcaccgagagcgagagcagcagcttccacagcagctag

SEQ ID NO: 10097 - DNA, 2832 bp, synthetic construct
  misc_feature 1..2832: note = Description of Artificial Sequence: Synthetic coding sequence
  source 1..2832: mol_type = other DNA
atgacccagagaagcatcgccggccccatctgcaacctgaagttcgtgaccctgctggtggccctgagcagcgagctgcccttcctgggcgccggcgtgcagctgcaggacaacggctacaacggcctgctgatcgccatcaacccccaggtgcccgagaaccagaacctgatcagcaacatcaaggagatgatcaccgaggccagcttctacctgttcaacgccaccaagagaagagtgttcttcagaaacatcaagatcctgatccccgccacctggaaggccaacaacaacagcaagatcaagcaggagagctacgagaaggccaacgtgatcgtgaccgactggtacggcgcccacggcgacgacccctacaccctgcagtacagaggctgcggcaaggagggcaagtacatccacttcacccccaacttcctgctgaacgacaacctgaccgccggctacggcagcagaggcagagtgttcgtgcacgagtgggcccacctgagatggggcgtgttcgacgagtacaacaacgacaagcccttctacatcaacggccagaaccagatcaaggtgaccagatgcagcagcgacatcaccggcatcttcgtgtgcgagaagggcccctgcccccaggagaactgcatcatcagcaagctgttcaaggagggctgcaccttcatctacaacagcacccagaacgccaccgccagcatcatgttcatgcagagcctgagcagcgtggtggagttctgcaacgccagcacccacaaccaggaggcccccaacctgcagaaccagatgtgcagcctgagaagcgcctgggacgtgatcaccgacagcgccgacttccaccacagcttccccatgaacggcaccgagctgccccccccccccaccttcagcctggtgcaggccggcgacaaggtggtgtgcctggtgctggacgtgagcagcaagatggccgaggccgacagactgctgcagctgcagcaggccgccgagttctacctgatgcagatcgtggagatccacaccttcgtgggcatcgccagcttcgacagcaagggcgagatcagagcccagctgcaccagatcaacagcaacgacgacagaaagctgctggtgagctacctgcccaccaccgtgagcgccaagaccgacatcagcatctgcagcggcctgaagaagggcttcgaggtggtggagaagctgaacggcaaggcctacggcagcgtgatgatcctggtgaccagcggcgacgacaagctgctgggcaactgcctgcccaccgtgctgagcagcggcagcaccatccacagcatcgccctgggcagcagcgccgcccccaacctggaggagctgagcagactgaccggcggcctgaagttcttcgtgcccgacatcagcaacagcaacagcatgatcgacgccttcagcagaatcagcagcggcaccggcgacatcttccagcagcacatccagctggagagcaccggcgagaacgtgaagccccaccaccagctgaagaacaccgtgaccgtggacaacaccgtgggcaacgacaccatgttcctggtgacctggcaggccagcggcccccccgagatcatcctgttcgaccccgacggcagaaagtactacaccaacaacttcatcaccaacctgaccttcagaaccgccagcctgtggatccccggcaccgccaagcccggccactggacctacaccctgaacaacacccaccacagcctgcaggccctgaaggtgaccgtgaccagcagagccagcaacagcgccgtgccccccgccaccgtggaggccttcgtggagagagacagcctgcacttcccccaccccgtgatgatctacgccaacgtgaagcagggcttctaccccatcctgaacgccaccgtgaccgccaccgtggagcccgagaccggcgaccccgtgaccctgagactgctggacgacggcgccggcgccgacgtgatcaagaacgacggcatctacagcagatacttcttcagcttcgccgccaacggcagatacagcctgaaggtgcacgtgaaccacagccccagcatcagcacccccgcccacagcatccccggcagccacgccatgtacgtgcccggctacaccgccaacggcaacatccagatgaacgcccccagaaagagcgtgggcagaaacgaggaggagagaaagtggggcttcagcagagtgagcagcggcggcagcttcagcgtgctgggcgtgcccgccggcccccaccccgacgtgttccccccctgcaagatcatcgacctggaggccgtgaaggtggaggaggagctgaccctgagctggaccgcccccggcgaggacttcgaccagggccaggccaccagctacgagatcagaatgagcaagagcctgcagaacatccaggacgacttcaacaacgccatcctggtgaacaccagcaagagaaacccccagcaggccggcatcagagagatcttcaccttcagcccccagatcagcaccaacggccccgagcaccagcccaacggcgagacccacgagagccacagaatctacgtggccatcagagccatggacagaaacagcctgcagagcgccgtgagcaacatcgcccaggcccccctgttcatcccccccaacagcgaccccgtgcccgccagagactacctgatcctgaagggcgtgctgaccgccatgggcctgatcggcatcatctgcctgatcatcgtggtgacccaccacaccctgagcagaaagaagagagccgacaagaaggagaacggcaccaagctgctgtag

SEQ ID NO: 10098 - DNA, 423 bp, synthetic construct
  misc_feature 1..423: note = Description of Artificial Sequence: Synthetic coding sequence
  source 1..423: mol_type = other DNA
atgacccagagaagcatcgccggccccatctgcaacctgaagttcgtgaccctgctggtggccctgagcagcgagctgcccttcctgggcgccggcgtgcagctgcaggacaacggctacaacggcctgctgatcgccatcaacccccaggtgcccgagaaccagaacctgatcagcaacatcaaggagatgatcaccgaggccagcttctacctgttcaacgccaccaagagaagagtgttcttcagaaacatcaagatcctgatccccgccacctggaaggccaacaacaacagcaagatcaagcaggagagctacgagaaggccaacgtgatcgtgaccgactggtacggcgcccacggcgacgaccagggcgtggagaagagagagaacaccttcatcagccacctgatcagctactag

SEQ ID NO: 10099 - DNA, 1233 bp, synthetic construct
  misc_feature 1..1233: note = Description of Artificial Sequence: Synthetic coding sequence
  source 1..1233: mol_type = other DNA
atgaacgacgaggactacagcaccatctacgacaccatccagaacgagagaacctacgaggtgcccgaccagcccgaggagaacgagagcccccactacgacgacgtgcacgagtacctgagacccgagaacgacctgtacgccacccagctgaacacccacgagtacgacttcgtgagcgtgtacaccatcaagggcgaggagaccagcctggccagcgtgcagagcgaggacagaggctacctgctgcccgacgagatctacagcgagctgcaggaggcccaccccggcgagccccaggaggacagaggcatcagcatggagggcctgtacagcagcacccaggaccagcagctgtgcgccgccgagctgcaggagaacggcagcgtgatgaaggaggacctgcccagccccagcagcttcaccatccagcacagcaaggccttcagcaccaccaagtacagctgctacagcgacgccgagggcctggaggagaaggagggcgcccacatgaaccccgagatctacctgttcgtgaaggccggcatcgacggcgagagcatcggcaactgccccttcagccagagactgttcatgatcctgtggctgaagggcgtggtgttcaacgtgaccaccgtggacctgaagagaaagcccgccgacctgcacaacctggcccccggcacccacccccccttcctgaccttcaacggcgacgtgaagaccgacgtgaacaagatcgaggagttcctggaggagaccctgacccccgagaagtaccccaagctggccgccaagcacagagagagcaacaccgccggcatcgacatcttcagcaagttcagcgcctacatcaagaacaccaagcagcagaacaacgccgccctggagagaggcctgaccaaggccctgaagaagctggacgactacctgaacacccccctgcccgaggagatcgacgccaacacctgcggcgaggacaagggcagcagaagaaagttcctggacggcgacgagctgaccctggccgactgcaacctgctgcccaagctgcacgtggtgaagatcgtggccaagaagtacagaaactacgacatccccgccgagatgaccggcctgtggagatacctgaagaacgcctacgccagagacgagttcaccaacacctgcgccgccgacagcgagatcgagctggcctacgccgacgtggccaagagactgagcagaagctag

SEQ ID NO: 10100 - DNA, 756 bp, synthetic construct
  misc_feature 1..756: note = Description of Artificial Sequence: Synthetic coding sequence
  source 1..756: mol_type = other DNA
atgaccgacagcgccaccgccaacggcgacgacagagaccccgagatcgagctgttcgtgaaggccggcatcgacggcgagagcatcggcaactgccccttcagccagagactgttcatgatcctgtggctgaagggcgtggtgttcaacgtgaccaccgtggacctgaagagaaagcccgccgacctgcacaacctggcccccggcacccacccccccttcctgaccttcaacggcgacgtgaagaccgacgtgaacaagatcgaggagttcctggaggagaccctgacccccgagaagtaccccaagctggccgccaagcacagagagagcaacaccgccggcatcgacatcttcagcaagttcagcgcctacatcaagaacaccaagcagcagaacaacgccgccctggagagaggcctgaccaaggccctgaagaagctggacgactacctgaacacccccctgcccgaggagatcgacgccaacacctgcggcgaggacaagggcagcagaagaaagttcctggacggcgacgagctgaccctggccgactgcaacctgctgcccaagctgcacgtggtgaagatcgtggccaagaagtacagaaactacgacatccccgccgagatgaccggcctgtggagatacctgaagaacgcctacgccagagacgagttcaccaacacctgcgccgccgacagcgagatcgagctggcctacgccgacgtggccaagagactgagcagaagctag

SEQ ID NO: 10101 - DNA, 618 bp, synthetic construct
  misc_feature 1..618: note = Description of Artificial Sequence: Synthetic coding sequence
  source 1..618: mol_type = other DNA
atgaccgacagcgccaccgccaacggcgacgacagagaccccgagatcgagctgttcgtgaaggccggcatcgacggcgagagcatcggcaactgccccttcagccagagactgttcatgatcctgtggctgaagggcgtggtgttcaacgtgaccaccgtggacctgaagagaaagcccgccgacctgcacaacctggcccccggcacccacccccccttcctgaccttcaacggcgacgtgaagaccgacgtgaacaagatcgaggagttcctggaggagaccctgacccccgagaagtaccccaagctggccgccaagcacagagagagcaacaccgccggcatcgacatcttcagcaagttcagcgcctacatcaagaacaccaagcagcagaacaacgccgccctggagagaggcctgaccaaggccctgaagaagctggacgactacctgaacacccccctgcccgaggagatcgacgccaacacctgcggcgaggacaagggcagcagaagaaagttcctggacggcgacgagctgaccctggccgactgcaacctgctgcccaagctgcacgtggtgaaggagcaggtgcccctgaagggcatgatctag

SEQ ID NO: 10102 - DNA, 5823 bp, synthetic construct
  misc_feature 1..5823: note = Description of Artificial Sequence: Synthetic coding sequence
  source 1..5823: mol_type = other DNA
atggccagcggcctgggcagccccagcccctgcagcgccggcagcgaggaggaggacatggacgccctgctgaacaacagcctgccccccccccaccccgagaacgaggaggaccccgaggaggacctgagcgagaccgagacccccaagctgaagaagaagaagaagcccaagaagcccagagaccccaagatccccaagagcaagagacagaagaaggagagaatgctgctgtgcagacagctgggcgacagcagcggcgagggccccgagttcgtggaggaggaggaggaggtggccctgagaagcgacagcgagggcagcgactacacccccggcaagaagaagaagaagaagctgggccccaagaaggagaagaagagcaagagcaagagaaaggaggaggaggaggaggaggacgacgacgacgacagcaaggagcccaagagcagcgcccagctgctggaggactggggcatggaggacatcgaccacgtgttcagcgaggaggactacagaaccctgaccaactacaaggccttcagccagttcgtgagacccctgatcgccgccaagaaccccaagatcgccgtgagcaagatgatgatggtgctgggcgccaagtggagagagttcagcaccaacaaccccttcaagggcagcagcggcgccagcgtggccgccgccgccgccgccgccgtggccgtggtggagagcatggtgaccgccaccgaggtggcccccccccccccccccgtggaggtgcccatcagaaaggccaagaccaaggagggcaagggccccaacgccagaagaaagcccaagggcagccccagagtgcccgacgccaagaagcccaagcccaagaaggtggcccccctgaagatcaagctgggcggcttcggcagcaagagaaagagaagcagcagcgaggacgacgacctggacgtggagagcgacttcgacgacgccagcatcaacagctacagcgtgagcgacggcagcaccagcagaagcagcagaagcagaaagaagctgagaaccaccaagaagaagaagaagggcgaggaggaggtgaccgccgtggacggctacgagaccgaccaccaggactactgcgaggtgtgccagcagggcggcgagatcatcctgtgcgacacctgccccagagcctaccacatggtgtgcctggaccccgacatggagaaggcccccgagggcaagtggagctgcccccactgcgagaaggagggcatccagtgggaggccaaggaggacaacagcgagggcgaggagatcctggaggaggtgggcggcgacctggaggaggaggacgaccaccacatggagttctgcagagtgtgcaaggacggcggcgagctgctgtgctgcgacacctgccccagcagctaccacatccactgcctgaacccccccctgcccgagatccccaacggcgagtggctgtgccccagatgcacctgccccgccctgaagggcaaggtgcagaagatcctgatctggaagtggggccagccccccagccccacccccgtgcccagaccccccgacgccgaccccaacacccccagccccaagcccctggagggcagacccgagagacagttcttcgtgaagtggcagggcatgagctactggcactgcagctgggtgagcgagctgcagctggagctgcactgccaggtgatgttcagaaactaccagagaaagaacgacatggacgagccccccagcggcgacttcggcggcgacgaggagaagagcagaaagagaaagaacaaggaccccaagttcgccgagatggaggagagattctacagatacggcatcaagcccgagtggatgatgatccacagaatcctgaaccacagcgtggacaagaagggccacgtgcactacctgatcaagtggagagacctgccctacgaccaggccagctgggagagcgaggacgtggagatccaggactacgacctgttcaagcagagctactggaaccacagagagctgatgagaggcgaggagggcagacccggcaagaagctgaagaaggtgaagctgagaaagctggagagaccccccgagacccccaccgtggaccccaccgtgaagtacgagagacagcccgagtacctggacgccaccggcggcaccctgcacccctaccagatggagggcctgaactggctgagattcagctgggcccagggcaccgacaccatcctggccgacgagatgggcctgggcaagaccgtgcagaccgccgtgttcctgtacagcctgtacaaggagggccacagcaagggccccttcctggtgagcgcccccctgagcaccatcatcaactgggagagagagttcgagatgtgggcccccgacatgtacgtggtgacctacgtgggcgacaaggacagcagagccatcatcagagagaacgagttcagcttcgaggacaacgccatcagaggcggcaagaaggccagcagaatgaagaaggaggccagcgtgaagttccacgtgctgctgaccagctacgagctgatcaccatcgacatggccatcctgggcagcatcgactgggcctgcctgatcgtggacgaggcccacagactgaagaacaaccagagcaagttcttcagagtgctgaacggctacagcctgcagcacaagctgctgctgaccggcacccccctgcagaacaacctggaggagctgttccacctgctgaacttcctgacccccgagagattccacaacctggagggcttcctggaggagttcgccgacatcgccaaggaggaccagatcaagaagctgcacgacatgctgggcccccacatgctgagaagactgaaggccgacgtgttcaagaacatgcccagcaagaccgagctgatcgtgagagtggagctgagccccatgcagaagaagtactacaagtacatcctgaccagaaacttcgaggccctgaacgccagaggcggcggcaaccaggtgagcctgctgaacgtggtgatggacctgaagaagtgctgcaaccacccctacctgttccccgtggccgccatggaggcccccaagatgcccaacggcatgtacgacggcagcgccctgatcagagccagcggcaagctgctgctgctgcagaagatgctgaagaacctgaaggagggcggccacagagtgctgatcttcagccagatgaccaagatgctggacctgctggaggacttcctggagcacgagggctacaagtacgagagaatcgacggcggcatcaccggcaacatgagacaggaggccatcgacagattcaacgcccccggcgcccagcagttctgcttcctgctgagcaccagagccggcggcctgggcatcaacctggccaccgccgacaccgtgatcatctacgacagcgactggaacccccacaacgacatccaggccttcagcagagcccacagaatcggccagaacaagaaggtgatgatctacagattcgtgaccagagccagcgtggaggagagaatcacccaggtggccaagaagaagatgatgctgacccacctggtggtgagacccggcctgggcagcaagaccggcagcatgagcaagcaggagctggacgacatcctgaagttcggcaccgaggagctgttcaaggacgaggccaccgacggcggcggcgacaacaaggagggcgaggacagcagcgtgatccactacgacgacaaggccatcgagagactgctggacagaaaccaggacgagaccgaggacaccgagctgcagggcatgaacgagtacctgagcagcttcaaggtggcccagtacgtggtgagagaggaggagatgggcgaggaggaggaggtggagagagagatcatcaagcaggaggagagcgtggaccccgactactgggagaagctgctgagacaccactacgagcagcagcaggaggacctggccagaaacctgggcaagggcaagagaatcagaaagcaggtgaactacaacgacggcagccaggaggacagaggcgtgtgcggcagacccagacccccccccatgggcagaagcaccagagccgtgggccccgcccacctgcccagcctgccccccgactggcaggacgaccagagcgacaaccagagcgactacagcgtggccagcgaggagggcgacgaggacttcgacgagagaagcgaggcccccagaagacccagcagaaagggcctgagaaacgacaaggacaagcccctgccccccctgctggccagagtgggcggcaacatcgaggtgctgggcttcaacgccagacagagaaaggccttcctgaacgccatcatgagatacggcatgcccccccaggacgccttcaccacccagtggctggtgagagacctgagaggcaagagcgagaaggagttcaaggcctacgtgagcctgttcatgagacacctgtgcgagcccggcgccgacggcgccgagaccttcgccgacggcgtgcccagagagggcctgagcagacagcacgtgctgaccagaatcggcgtgatgagcctgatcagaaagaaggtgcaggagttcgagcacgtgaacggcagatggagcatgcccgagctggccgaggtggaggagaacaagaagatgagccagcccggcagccccagccccaagacccccacccccagcacccccggcgacacccagcccaacacccccgcccccgtgccccccgccgaggacggcatcaagatcgaggagaacagcctgaaggaggaggagagcatcgagggcgagaaggaggtgaagagcaccgcccccgagaccgccatcgagtgcacccaggcccccgcccccgccagcgaggacgagaaggtggtggtggagccccccgagggcgaggagaaggtggagaaggccgaggtgaaggagagaaccgaggagcccatggagaccgagcccaagggcgccgccgacgtggagaaggtggaggagaagagcgccatcgacctgacccccatcgtggtggaggacaaggaggagaagaaggaggaggaggagaagaaggaggtgatgctgcagaacggcgagacccccaaggacctgaacgacgagaagcagaagaagaacatcaagcagagattcatgttcaacatcgccgacggcggcttcaccgagctgcacagcctgtggcagaacgaggagagagccgccaccgtgaccaagaagacctacgagatctggcacagaagacacgactactggctgctggccggcatcatcaaccacggctacgccagatggcaggacatccagaacgaccccagatacgccatcctgaacgagcccttcaagggcgagatgaacagaggcaacttcctggagatcaagaacaagttcctggccagaagattcaagctgctggagcaggccctggtgatcgaggagcagctgagaagagccgcctacctgaacatgagcgaggaccccagccaccccagcatggccctgaacaccagattcgccgaggtggagtgcctggccgagagccaccagcacctgagcaaggagagcatggccggcaacaagcccgccaacgccgtgctgcacaaggtgctgaagcagctggaggagctgctgagcgacatgaaggccgacgtgaccagactgcccgccaccatcgccagaatcccccccgtggccgtgagactgcagatgagcgagagaaacatcctgagcagactggccaacagagcccccgagcccaccccccagcaggtggcccagcagcagtag

SEQ ID NO: 10103 - DNA, 5739 bp, synthetic construct
  misc_feature 1..5739: note = Description of Artificial Sequence: Synthetic coding sequence
  source 1..5739: mol_type = other DNA
atggccagcggcctgggcagccccagcccctgcagcgccggcagcgaggaggaggacatggacgccctgctgaacaacagcctgccccccccccaccccgagaacgaggaggaccccgaggaggacctgagcgagaccgagacccccaagctgaagaagaagaagaagcccaagaagcccagagaccccaagatccccaagagcaagagacagaagaaggagagaatgctgctgtgcagacagctgggcgacagcagcggcgagggccccgagttcgtggaggaggaggaggaggtggccctgagaagcgacagcgagggcagcgactacacccccggcaagaagaagaagaagaagctgggccccaagaaggagaagaagagcaagagcaagagaaaggaggaggaggaggaggaggacgacgacgacgacagcaaggagcccaagagcagcgcccagctgctggaggactggggcatggaggacatcgaccacgtgttcagcgaggaggactacagaaccctgaccaactacaaggccttcagccagttcgtgagacccctgatcgccgccaagaaccccaagatcgccgtgagcaagatgatgatggtgctgggcgccaagtggagagagttcagcaccaacaaccccttcaagggcagcagcggcgccagcgtggccgccgccgccgccgccgccgtggccgtggtggagagcatggtgaccgccaccgaggtggcccccccccccccccccgtggaggtgcccatcagaaaggccaagaccaaggagggcaagggccccaacgccagaagaaagcccaagggcagccccagagtgcccgacgccaagaagcccaagcccaagaaggtggcccccctgaagatcaagctgggcggcttcggcagcaagagaaagagaagcagcagcgaggacgacgacctggacgtggagagcgacttcgacgacgccagcatcaacagctacagcgtgagcgacggcagcaccagcagaagcagcagaagcagaaagaagctgagaaccaccaagaagaagaagaagggcgaggaggaggtgaccgccgtggacggctacgagaccgaccaccaggactactgcgaggtgtgccagcagggcggcgagatcatcctgtgcgacacctgccccagagcctaccacatggtgtgcctggaccccgacatggagaaggcccccgagggcaagtggagctgcccccactgcgagaaggagggcatccagtgggaggccaaggaggacaacagcgagggcgaggagatcctggaggaggtgggcggcgacctggaggaggaggacgaccaccacatggagttctgcagagtgtgcaaggacggcggcgagctgctgtgctgcgacacctgccccagcagctaccacatccactgcctgaacccccccctgcccgagatccccaacggcgagtggctgtgccccagatgcacctgccccgccctgaagggcaaggtgcagaagatcctgatctggaagtggggccagccccccagccccacccccgtgcccagaccccccgacgccgaccccaacacccccagccccaagcccctggagggcagacccgagagacagttcttcgtgaagtggcagggcatgagctactggcactgcagctgggtgagcgagctgcagctggagctgcactgccaggtgatgttcagaaactaccagagaaagaacgacatggacgagccccccagcggcgacttcggcggcgacgaggagaagagcagaaagagaaagaacaaggaccccaagttcgccgagatggaggagagattctacagatacggcatcaagcccgagtggatgatgatccacagaatcctgaaccacagcgtggacaagaagggccacgtgcactacctgatcaagtggagagacctgccctacgaccaggccagctgggagagcgaggacgtggagatccaggactacgacctgttcaagcagagctactggaaccacagagagctgatgagaggcgaggagggcagacccggcaagaagctgaagaaggtgaagctgagaaagctggagagaccccccgagacccccaccgtggaccccaccgtgaagtacgagagacagcccgagtacctggacgccaccggcggcaccctgcacccctaccagatggagggcctgaactggctgagattcagctgggcccagggcaccgacaccatcctggccgacgagatgggcctgggcaagaccgtgcagaccgccgtgttcctgtacagcctgtacaaggagggccacagcaagggccccttcctggtgagcgcccccctgagcaccatcatcaactgggagagagagttcgagatgtgggcccccgacatgtacgtggtgacctacgtgggcgacaaggacagcagagccatcatcagagagaacgagttcagcttcgaggacaacgccatcagaggcggcaagaaggccagcagaatgaagaaggaggccagcgtgaagttccacgtgctgctgaccagctacgagctgatcaccatcgacatggccatcctgggcagcatcgactgggcctgcctgatcgtggacgaggcccacagactgaagaacaaccagagcaagttcttcagagtgctgaacggctacagcctgcagcacaagctgctgctgaccggcacccccctgcagaacaacctggaggagctgttccacctgctgaacttcctgacccccgagagattccacaacctggagggcttcctggaggagttcgccgacatcgccaaggaggaccagatcaagaagctgcacgacatgctgggcccccacatgctgagaagactgaaggccgacgtgttcaagaacatgcccagcaagaccgagctgatcgtgagagtggagctgagccccatgcagaagaagtactacaagtacatcctgaccagaaacttcgaggccctgaacgccagaggcggcggcaaccaggtgagcctgctgaacgtggtgatggacctgaagaagtgctgcaaccacccctacctgttccccgtggccgccatggaggcccccaagatgcccaacggcatgtacgacggcagcgccctgatcagagccagcggcaagctgctgctgctgcagaagatgctgaagaacctgaaggagggcggccacagagtgctgatcttcagccagatgaccaagatgctggacctgctggaggacttcctggagcacgagggctacaagtacgagagaatcgacggcggcatcaccggcaacatgagacaggaggccatcgacagattcaacgcccccggcgcccagcagttctgcttcctgctgagcaccagagccggcggcctgggcatcaacctggccaccgccgacaccgtgatcatctacgacagcgactggaacccccacaacgacatccaggccttcagcagagcccacagaatcggccagaacaagaaggtgatgatctacagattcgtgaccagagccagcgtggaggagagaatcacccaggtggccaagaagaagatgatgctgacccacctggtggtgagacccggcctgggcagcaagaccggcagcatgagcaagcaggagctggacgacatcctgaagttcggcaccgaggagctgttcaaggacgaggccaccgacggcggcggcgacaacaaggagggcgaggacagcagcgtgatccactacgacgacaaggccatcgagagactgctggacagaaaccaggacgagaccgaggacaccgagctgcagggcatgaacgagtacctgagcagcttcaaggtggcccagtacgtggtgagagaggaggagatgggcgaggaggaggaggtggagagagagatcatcaagcaggaggagagcgtggaccccgactactgggagaagctgctgagacaccactacgagcagcagcaggaggacctggccagaaacctgggcaagggcaagagaatcagaaagcaggtgaactacaacgacggcagccaggaggacagagactggcaggacgaccagagcgacaaccagagcgactacagcgtggccagcgaggagggcgacgaggacttcgacgagagaagcgaggcccccagaagacccagcagaaagggcctgagaaacgacaaggacaagcccctgccccccctgctggccagagtgggcggcaacatcgaggtgctgggcttcaacgccagacagagaaaggccttcctgaacgccatcatgagatacggcatgcccccccaggacgccttcaccacccagtggctggtgagagacctgagaggcaagagcgagaaggagttcaaggcctacgtgagcctgttcatgagacacctgtgcgagcccggcgccgacggcgccgagaccttcgccgacggcgtgcccagagagggcctgagcagacagcacgtgctgaccagaatcggcgtgatgagcctgatcagaaagaaggtgcaggagttcgagcacgtgaacggcagatggagcatgcccgagctggccgaggtggaggagaacaagaagatgagccagcccggcagccccagccccaagacccccacccccagcacccccggcgacacccagcccaacacccccgcccccgtgccccccgccgaggacggcatcaagatcgaggagaacagcctgaaggaggaggagagcatcgagggcgagaaggaggtgaagagcaccgcccccgagaccgccatcgagtgcacccaggcccccgcccccgccagcgaggacgagaaggtggtggtggagccccccgagggcgaggagaaggtggagaaggccgaggtgaaggagagaaccgaggagcccatggagaccgagcccaagggcgccgccgacgtggagaaggtggaggagaagagcgccatcgacctgacccccatcgtggtggaggacaaggaggagaagaaggaggaggaggagaagaaggaggtgatgctgcagaacggcgagacccccaaggacctgaacgacgagaagcagaagaagaacatcaagcagagattcatgttcaacatcgccgacggcggcttcaccgagctgcacagcctgtggcagaacgaggagagagccgccaccgtgaccaagaagacctacgagatctggcacagaagacacgactactggctgctggccggcatcatcaaccacggctacgccagatggcaggacatccagaacgaccccagatacgccatcctgaacgagcccttcaagggcgagatgaacagaggcaacttcctggagatcaagaacaagttcctggccagaagattcaagctgctggagcaggccctggtgatcgaggagcagctgagaagagccgcctacctgaacatgagcgaggaccccagccaccccagcatggccctgaacaccagattcgccgaggtggagtgcctggccgagagccaccagcacctgagcaaggagagcatggccggcaacaagcccgccaacgccgtgctgcacaaggtgctgaagcagctggaggagctgctgagcgacatgaaggccgacgtgaccagactgcccgccaccatcgccagaatcccccccgtggccgtgagactgcagatgagcgagagaaacatcctgagcagactggccaacagagcccccgagcccaccccccagcaggtggcccagcagcagtag

SEQ ID NO: 10104 - DNA, 5661 bp, synthetic construct
  misc_feature 1..5661: note = Description of Artificial Sequence: Synthetic coding sequence
  source 1..5661: mol_type = other DNA
atggacgccctgctgaacaacagcctgccccccccccaccccgagaacgaggaggaccccgaggaggacctgagcgagaccgagacccccaagctgaagaagaagaagaagcccaagaagcccagagaccccaagatccccaagagcaagagacagaagaaggagctgggcgacagcagcggcgagggccccgagttcgtggaggaggaggaggaggtggccctgagaagcgacagcgagggcagcgactacacccccggcaagaagaagaagaagaagctgggccccaagaaggagaagaagagcaagagcaagagaaaggaggaggaggaggaggaggacgacgacgacgacagcaaggagcccaagagcagcgcccagctgctggaggactggggcatggaggacatcgaccacgtgttcagcgaggaggactacagaaccctgaccaactacaaggccttcagccagttcgtgagacccctgatcgccgccaagaaccccaagatcgccgtgagcaagatgatgatggtgctgggcgccaagtggagagagttcagcaccaacaaccccttcaagggcagcagcggcgccagcgtggccgccgccgccgccgccgccgtggccgtggtggagagcatggtgaccgccaccgaggtggcccccccccccccccccgtggaggtgcccatcagaaaggccaagaccaaggagggcaagggccccaacgccagaagaaagcccaagggcagccccagagtgcccgacgccaagaagcccaagcccaagaaggtggcccccctgaagatcaagctgggcggcttcggcagcaagagaaagagaagcagcagcgaggacgacgacctggacgtggagagcgacttcgacgacgccagcatcaacagctacagcgtgagcgacggcagcaccagcagaagcagcagaagcagaaagaagctgagaaccaccaagaagaagaagaagggcgaggaggaggtgaccgccgtggacggctacgagaccgaccaccaggactactgcgaggtgtgccagcagggcggcgagatcatcctgtgcgacacctgccccagagcctaccacatggtgtgcctggaccccgacatggagaaggcccccgagggcaagtggagctgcccccactgcgagaaggagggcatccagtgggaggccaaggaggacaacagcgagggcgaggagatcctggaggaggtgggcggcgacctggaggaggaggacgaccaccacatggagttctgcagagtgtgcaaggacggcggcgagctgctgtgctgcgacacctgccccagcagctaccacatccactgcctgaacccccccctgcccgagatccccaacggcgagtggctgtgccccagatgcacctgccccgccctgaagggcaaggtgcagaagatcctgatctggaagtggggccagccccccagccccacccccgtgcccagaccccccgacgccgaccccaacacccccagccccaagcccctggagggcagacccgagagacagttcttcgtgaagtggcagggcatgagctactggcactgcagctgggtgagcgagctgcagctggagctgcactgccaggtgatgttcagaaactaccagagaaagaacgacatggacgagccccccagcggcgacttcggcggcgacgaggagaagagcagaaagagaaagaacaaggaccccaagttcgccgagatggaggagagattctacagatacggcatcaagcccgagtggatgatgatccacagaatcctgaaccacagcgtggacaagaagggccacgtgcactacctgatcaagtggagagacctgccctacgaccaggccagctgggagagcgaggacgtggagatccaggactacgacctgttcaagcagagctactggaaccacagagagctgatgagaggcgaggagggcagacccggcaagaagctgaagaaggtgaagctgagaaagctggagagaccccccgagacccccaccgtggaccccaccgtgaagtacgagagacagcccgagtacctggacgccaccggcggcaccctgcacccctaccagatggagggcctgaactggctgagattcagctgggcccagggcaccgacaccatcctggccgacgagatgggcctgggcaagaccgtgcagaccgccgtgttcctgtacagcctgtacaaggagggccacagcaagggccccttcctggtgagcgcccccctgagcaccatcatcaactgggagagagagttcgagatgtgggcccccgacatgtacgtggtgacctacgtgggcgacaaggacagcagagccatcatcagagagaacgagttcagcttcgaggacaacgccatcagaggcggcaagaaggccagcagaatgaagaaggaggccagcgtgaagttccacgtgctgctgaccagctacgagctgatcaccatcgacatggccatcctgggcagcatcgactgggcctgcctgatcgtggacgaggcccacagactgaagaacaaccagagcaagttcttcagagtgctgaacggctacagcctgcagcacaagctgctgctgaccggcacccccctgcagaacaacctggaggagctgttccacctgctgaacttcctgacccccgagagattccacaacctggagggcttcctggaggagttcgccgacatcgccaaggaggaccagatcaagaagctgcacgacatgctgggcccccacatgctgagaagactgaaggccgacgtgttcaagaacatgcccagcaagaccgagctgatcgtgagagtggagctgagccccatgcagaagaagtactacaagtacatcctgaccagaaacttcgaggccctgaacgccagaggcggcggcaaccaggtgagcctgctgaacgtggtgatggacctgaagaagtgctgcaaccacccctacctgttccccgtggccgccatggaggcccccaagatgcccaacggcatgtacgacggcagcgccctgatcagagccagcggcaagctgctgctgctgcagaagatgctgaagaacctgaaggagggcggccacagagtgctgatcttcagccagatgaccaagatgctggacctgctggaggacttcctggagcacgagggctacaagtacgagagaatcgacggcggcatcaccggcaacatgagacaggaggccatcgacagattcaacgcccccggcgcccagcagttctgcttcctgctgagcaccagagccggcggcctgggcatcaacctggccaccgccgacaccgtgatcatctacgacagcgactggaacccccacaacgacatccaggccttcagcagagcccacagaatcggccagaacaagaaggtgatgatctacagattcgtgaccagagccagcgtggaggagagaatcacccaggtggccaagaagaagatgatgctgacccacctggtggtgagacccggcctgggcagcaagaccggcagcatgagcaagcaggagctggacgacatcctgaagttcggcaccgaggagctgttcaaggacgaggccaccgacggcggcggcgacaacaaggagggcgaggacagcagcgtgatccactacgacgacaaggccatcgagagactgctggacagaaaccaggacgagaccgaggacaccgagctgcagggcatgaacgagtacctgagcagcttcaaggtggcccagtacgtggtgagagaggaggagatgggcgaggaggaggaggtggagagagagatcatcaagcaggaggagagcgtggaccccgactactgggagaagctgctgagacaccactacgagcagcagcaggaggacctggccagaaacctgggcaagggcaagagaatcagaaagcaggtgaactacaacgacggcagccaggaggacagagactggcaggacgaccagagcgacaaccagagcgactacagcgtggccagcgaggagggcgacgaggacttcgacgagagaagcgaggcccccagaagacccagcagaaagggcctgagaaacgacaaggacaagcccctgccccccctgctggccagagtgggcggcaacatcgaggtgctgggcttcaacgccagacagagaaaggccttcctgaacgccatcatgagatacggcatgcccccccaggacgccttcaccacccagtggctggtgagagacctgagaggcaagagcgagaaggagttcaaggcctacgtgagcctgttcatgagacacctgtgcgagcccggcgccgacggcgccgagaccttcgccgacggcgtgcccagagagggcctgagcagacagcacgtgctgaccagaatcggcgtgatgagcctgatcagaaagaaggtgcaggagttcgagcacgtgaacggcagatggagcatgcccgagctggccgaggtggaggagaacaagaagatgagccagcccggcagccccagccccaagacccccacccccagcacccccggcgacacccagcccaacacccccgcccccgtgccccccgccgaggacggcatcaagatcgaggagaacagcctgaaggaggaggagagcatcgagggcgagaaggaggtgaagagcaccgcccccgagaccgccatcgagtgcacccaggcccccgcccccgccagcgaggacgagaaggtggtggtggagccccccgagggcgaggagaaggtggagaaggccgaggtgaaggagagaaccgaggagcccatggagaccgagcccaagggcgccgccgacgtggagaaggtggaggagaagagcgccatcgacctgacccccatcgtggtggaggacaaggaggagaagaaggaggaggaggagaagaaggaggtgatgctgcagaacggcgagacccccaaggacctgaacgacgagaagcagaagaagaacatcaagcagagattcatgttcaacatcgccgacggcggcttcaccgagctgcacagcctgtggcagaacgaggagagagccgccaccgtgaccaagaagacctacgagatctggcacagaagacacgactactggctgctggccggcatcatcaaccacggctacgccagatggcaggacatccagaacgaccccagatacgccatcctgaacgagcccttcaagggcgagatgaacagaggcaacttcctggagatcaagaacaagttcctggccagaagattcaagctgctggagcaggccctggtgatcgaggagcagctgagaagagccgcctacctgaacatgagcgaggaccccagccaccccagcatggccctgaacaccagattcgccgaggtggagtgcctggccgagagccaccagcacctgagcaaggagagcatggccggcaacaagcccgccaacgccgtgctgcacaaggtgctgaagcagctggaggagctgctgagcgacatgaaggccgacgtgaccagactgcccgccaccatcgccagaatcccccccgtggccgtgagactgcagatgagcgagagaaacatcctgagcagactggccaacagagcccccgagcccaccccccagcaggtggcccagcagcagtag

SEQ ID NO: 10105 - DNA, 5718 bp, synthetic construct
  misc_feature 1..5718: note = Description of Artificial Sequence: Synthetic coding sequence
  source 1..5718: mol_type = other DNA
atggccagcggcctgggcagccccagcccctgcagcgccggcagcgaggaggaggacatggacgccctgctgaacaacagcctgccccccccccaccccgagaacgaggaggaccccgaggaggacctgagcgagaccgagacccccaagctgaagaagaagaagaagcccaagaagcccagagaccccaagatccccaagagcaagagacagaagaaggagctgggcgacagcagcggcgagggccccgagttcgtggaggaggaggaggaggtggccctgagaagcgacagcgagggcagcgactacacccccggcaagaagaagaagaagaagctgggccccaagaaggagaagaagagcaagagcaagagaaaggaggaggaggaggaggaggacgacgacgacgacagcaaggagcccaagagcagcgcccagctgctggaggactggggcatggaggacatcgaccacgtgttcagcgaggaggactacagaaccctgaccaactacaaggccttcagccagttcgtgagacccctgatcgccgccaagaaccccaagatcgccgtgagcaagatgatgatggtgctgggcgccaagtggagagagttcagcaccaacaaccccttcaagggcagcagcggcgccagcgtggccgccgccgccgccgccgccgtggccgtggtggagagcatggtgaccgccaccgaggtggcccccccccccccccccgtggaggtgcccatcagaaaggccaagaccaaggagggcaagggccccaacgccagaagaaagcccaagggcagccccagagtgcccgacgccaagaagcccaagcccaagaaggtggcccccctgaagatcaagctgggcggcttcggcagcaagagaaagagaagcagcagcgaggacgacgacctggacgtggagagcgacttcgacgacgccagcatcaacagctacagcgtgagcgacggcagcaccagcagaagcagcagaagcagaaagaagctgagaaccaccaagaagaagaagaagggcgaggaggaggtgaccgccgtggacggctacgagaccgaccaccaggactactgcgaggtgtgccagcagggcggcgagatcatcctgtgcgacacctgccccagagcctaccacatggtgtgcctggaccccgacatggagaaggcccccgagggcaagtggagctgcccccactgcgagaaggagggcatccagtgggaggccaaggaggacaacagcgagggcgaggagatcctggaggaggtgggcggcgacctggaggaggaggacgaccaccacatggagttctgcagagtgtgcaaggacggcggcgagctgctgtgctgcgacacctgccccagcagctaccacatccactgcctgaacccccccctgcccgagatccccaacggcgagtggctgtgccccagatgcacctgccccgccctgaagggcaaggtgcagaagatcctgatctggaagtggggccagccccccagccccacccccgtgcccagaccccccgacgccgaccccaacacccccagccccaagcccctggagggcagacccgagagacagttcttcgtgaagtggcagggcatgagctactggcactgcagctgggtgagcgagctgcagctggagctgcactgccaggtgatgttcagaaactaccagagaaagaacgacatggacgagccccccagcggcgacttcggcggcgacgaggagaagagcagaaagagaaagaacaaggaccccaagttcgccgagatggaggagagattctacagatacggcatcaagcccgagtggatgatgatccacagaatcctgaaccacagcgtggacaagaagggccacgtgcactacctgatcaagtggagagacctgccctacgaccaggccagctgggagagcgaggacgtggagatccaggactacgacctgttcaagcagagctactggaaccacagagagctgatgagaggcgaggagggcagacccggcaagaagctgaagaaggtgaagctgagaaagctggagagaccccccgagacccccaccgtggaccccaccgtgaagtacgagagacagcccgagtacctggacgccaccggcggcaccctgcacccctaccagatggagggcctgaactggctgagattcagctgggcccagggcaccgacaccatcctggccgacgagatgggcctgggcaagaccgtgcagaccgccgtgttcctgtacagcctgtacaaggagggccacagcaagggccccttcctggtgagcgcccccctgagcaccatcatcaactgggagagagagttcgagatgtgggcccccgacatgtacgtggtgacctacgtgggcgacaaggacagcagagccatcatcagagagaacgagttcagcttcgaggacaacgccatcagaggcggcaagaaggccagcagaatgaagaaggaggccagcgtgaagttccacgtgctgctgaccagctacgagctgatcaccatcgacatggccatcctgggcagcatcgactgggcctgcctgatcgtggacgaggcccacagactgaagaacaaccagagcaagttcttcagagtgctgaacggctacagcctgcagcacaagctgctgctgaccggcacccccctgcagaacaacctggaggagctgttccacctgctgaacttcctgacccccgagagattccacaacctggagggcttcctggaggagttcgccgacatcgccaaggaggaccagatcaagaagctgcacgacatgctgggcccccacatgctgagaagactgaaggccgacgtgttcaagaacatgcccagcaagaccgagctgatcgtgagagtggagctgagccccatgcagaagaagtactacaagtacatcctgaccagaaacttcgaggccctgaacgccagaggcggcggcaaccaggtgagcctgctgaacgtggtgatggacctgaagaagtgctgcaaccacccctacctgttccccgtggccgccatggaggcccccaagatgcccaacggcatgtacgacggcagcgccctgatcagagccagcggcaagctgctgctgctgcagaagatgctgaagaacctgaaggagggcggccacagagtgctgatcttcagccagatgaccaagatgctggacctgctggaggacttcctggagcacgagggctacaagtacgagagaatcgacggcggcatcaccggcaacatgagacaggaggccatcgacagattcaacgcccccggcgcccagcagttctgcttcctgctgagcaccagagccggcggcctgggcatcaacctggccaccgccgacaccgtgatcatctacgacagcgactggaacccccacaacgacatccaggccttcagcagagcccacagaatcggccagaacaagaaggtgatgatctacagattcgtgaccagagccagcgtggaggagagaatcacccaggtggccaagaagaagatgatgctgacccacctggtggtgagacccggcctgggcagcaagaccggcagcatgagcaagcaggagctggacgacatcctgaagttcggcaccgaggagctgttcaaggacgaggccaccgacggcggcggcgacaacaaggagggcgaggacagcagcgtgatccactacgacgacaaggccatcgagagactgctggacagaaaccaggacgagaccgaggacaccgagctgcagggcatgaacgagtacctgagcagcttcaaggtggcccagtacgtggtgagagaggaggagatgggcgaggaggaggaggtggagagagagatcatcaagcaggaggagagcgtggaccccgactactgggagaagctgctgagacaccactacgagcagcagcaggaggacctggccagaaacctgggcaagggcaagagaatcagaaagcaggtgaactacaacgacggcagccaggaggacagagactggcaggacgaccagagcgacaaccagagcgactacagcgtggccagcgaggagggcgacgaggacttcgacgagagaagcgaggcccccagaagacccagcagaaagggcctgagaaacgacaaggacaagcccctgccccccctgctggccagagtgggcggcaacatcgaggtgctgggcttcaacgccagacagagaaaggccttcctgaacgccatcatgagatacggcatgcccccccaggacgccttcaccacccagtggctggtgagagacctgagaggcaagagcgagaaggagttcaaggcctacgtgagcctgttcatgagacacctgtgcgagcccggcgccgacggcgccgagaccttcgccgacggcgtgcccagagagggcctgagcagacagcacgtgctgaccagaatcggcgtgatgagcctgatcagaaagaaggtgcaggagttcgagcacgtgaacggcagatggagcatgcccgagctggccgaggtggaggagaacaagaagatgagccagcccggcagccccagccccaagacccccacccccagcacccccggcgacacccagcccaacacccccgcccccgtgccccccgccgaggacggcatcaagatcgaggagaacagcctgaaggaggaggagagcatcgagggcgagaaggaggtgaagagcaccgcccccgagaccgccatcgagtgcacccaggcccccgcccccgccagcgaggacgagaaggtggtggtggagccccccgagggcgaggagaaggtggagaaggccgaggtgaaggagagaaccgaggagcccatggagaccgagcccaagggcgccgccgacgtggagaaggtggaggagaagagcgccatcgacctgacccccatcgtggtggaggacaaggaggagaagaaggaggaggaggagaagaaggaggtgatgctgcagaacggcgagacccccaaggacctgaacgacgagaagcagaagaagaacatcaagcagagattcatgttcaacatcgccgacggcggcttcaccgagctgcacagcctgtggcagaacgaggagagagccgccaccgtgaccaagaagacctacgagatctggcacagaagacacgactactggctgctggccggcatcatcaaccacggctacgccagatggcaggacatccagaacgaccccagatacgccatcctgaacgagcccttcaagggcgagatgaacagaggcaacttcctggagatcaagaacaagttcctggccagaagattcaagctgctggagcaggccctggtgatcgaggagcagctgagaagagccgcctacctgaacatgagcgaggaccccagccaccccagcatggccctgaacaccagattcgccgaggtggagtgcctggccgagagccaccagcacctgagcaaggagagcatggccggcaacaagcccgccaacgccgtgctgcacaaggtgctgaagcagctggaggagctgctgagcgacatgaaggccgacgtgaccagactgcccgccaccatcgccagaatcccccccgtggccgtgagactgcagatgagcgagagaaacatcctgagcagactggccaacagagcccccgagcccaccccccagcaggtggcccagcagcagtag

SEQ ID NO: 10106 - DNA, 5814 bp, synthetic construct
  misc_feature 1..5814: note = Description of Artificial Sequence: Synthetic coding sequence
  source 1..5814: mol_type = other DNA
atggccagcggcctgggcagccccagcccctgcagcgccggcagcgaggaggaggacatggacgccctgctgaacaacagcctgccccccccccaccccgaggaccccgaggaggacctgagcgagaccgagacccccaagctgaagaagaagaagaagcccaagaagcccagagaccccaagatccccaagagcaagagacagaagaaggagagaatgctgctgtgcagacagctgggcgacagcagcggcgagggccccgagttcgtggaggaggaggaggaggtggccctgagaagcgacagcgagggcagcgactacacccccggcaagaagaagaagaagaagctgggccccaagaaggagaagaagagcaagagcaagagaaaggaggaggaggaggaggaggacgacgacgacgacagcaaggagcccaagagcagcgcccagctgctggaggactggggcatggaggacatcgaccacgtgttcagcgaggaggactacagaaccctgaccaactacaaggccttcagccagttcgtgagacccctgatcgccgccaagaaccccaagatcgccgtgagcaagatgatgatggtgctgggcgccaagtggagagagttcagcaccaacaaccccttcaagggcagcagcggcgccagcgtggccgccgccgccgccgccgccgtggccgtggtggagagcatggtgaccgccaccgaggtggcccccccccccccccccgtggaggtgcccatcagaaaggccaagaccaaggagggcaagggccccaacgccagaagaaagcccaagggcagccccagagtgcccgacgccaagaagcccaagcccaagaaggtggcccccctgaagatcaagctgggcggcttcggcagcaagagaaagagaagcagcagcgaggacgacgacctggacgtggagagcgacttcgacgacgccagcatcaacagctacagcgtgagcgacggcagcaccagcagaagcagcagaagcagaaagaagctgagaaccaccaagaagaagaagaagggcgaggaggaggtgaccgccgtggacggctacgagaccgaccaccaggactactgcgaggtgtgccagcagggcggcgagatcatcctgtgcgacacctgccccagagcctaccacatggtgtgcctggaccccgacatggagaaggcccccgagggcaagtggagctgcccccactgcgagaaggagggcatccagtgggaggccaaggaggacaacagcgagggcgaggagatcctggaggaggtgggcggcgacctggaggaggaggacgaccaccacatggagttctgcagagtgtgcaaggacggcggcgagctgctgtgctgcgacacctgccccagcagctaccacatccactgcctgaacccccccctgcccgagatccccaacggcgagtggctgtgccccagatgcacctgccccgccctgaagggcaaggtgcagaagatcctgatctggaagtggggccagccccccagccccacccccgtgcccagaccccccgacgccgaccccaacacccccagccccaagcccctggagggcagacccgagagacagttcttcgtgaagtggcagggcatgagctactggcactgcagctgggtgagcgagctgcagctggagctgcactgccaggtgatgttcagaaactaccagagaaagaacgacatggacgagccccccagcggcgacttcggcggcgacgaggagaagagcagaaagagaaagaacaaggaccccaagttcgccgagatggaggagagattctacagatacggcatcaagcccgagtggatgatgatccacagaatcctgaaccacagcgtggacaagaagggccacgtgcactacctgatcaagtggagagacctgccctacgaccaggccagctgggagagcgaggacgtggagatccaggactacgacctgttcaagcagagctactggaaccacagagagctgatgagaggcgaggagggcagacccggcaagaagctgaagaaggtgaagctgagaaagctggagagaccccccgagacccccaccgtggaccccaccgtgaagtacgagagacagcccgagtacctggacgccaccggcggcaccctgcacccctaccagatggagggcctgaactggctgagattcagctgggcccagggcaccgacaccatcctggccgacgagatgggcctgggcaagaccgtgcagaccgccgtgttcctgtacagcctgtacaaggagggccacagcaagggccccttcctggtgagcgcccccctgagcaccatcatcaactgggagagagagttcgagatgtgggcccccgacatgtacgtggtgacctacgtgggcgacaaggacagcagagccatcatcagagagaacgagttcagcttcgaggacaacgccatcagaggcggcaagaaggccagcagaatgaagaaggaggccagcgtgaagttccacgtgctgctgaccagctacgagctgatcaccatcgacatggccatcctgggcagcatcgactgggcctgcctgatcgtggacgaggcccacagactgaagaacaaccagagcaagttcttcagagtgctgaacggctacagcctgcagcacaagctgctgctgaccggcacccccctgcagaacaacctggaggagctgttccacctgctgaacttcctgacccccgagagattccacaacctggagggcttcctggaggagttcgccgacatcgccaaggaggaccagatcaagaagctgcacgacatgctgggcccccacatgctgagaagactgaaggccgacgtgttcaagaacatgcccagcaagaccgagctgatcgtgagagtggagctgagccccatgcagaagaagtactacaagtacatcctgaccagaaacttcgaggccctgaacgccagaggcggcggcaaccaggtgagcctgctgaacgtggtgatggacctgaagaagtgctgcaaccacccctacctgttccccgtggccgccatggaggcccccaagatgcccaacggcatgtacgacggcagcgccctgatcagagccagcggcaagctgctgctgctgcagaagatgctgaagaacctgaaggagggcggccacagagtgctgatcttcagccagatgaccaagatgctggacctgctggaggacttcctggagcacgagggctacaagtacgagagaatcgacggcggcatcaccggcaacatgagacaggaggccatcgacagattcaacgcccccggcgcccagcagttctgcttcctgctgagcaccagagccggcggcctgggcatcaacctggccaccgccgacaccgtgatcatctacgacagcgactggaacccccacaacgacatccaggccttcagcagagcccacagaatcggccagaacaagaaggtgatgatctacagattcgtgaccagagccagcgtggaggagagaatcacccaggtggccaagaagaagatgatgctgacccacctggtggtgagacccggcctgggcagcaagaccggcagcatgagcaagcaggagctggacgacatcctgaagttcggcaccgaggagctgttcaaggacgaggccaccgacggcggcggcgacaacaaggagggcgaggacagcagcgtgatccactacgacgacaaggccatcgagagactgctggacagaaaccaggacgagaccgaggacaccgagctgcagggcatgaacgagtacctgagcagcttcaaggtggcccagtacgtggtgagagaggaggagatgggcgaggaggaggaggtggagagagagatcatcaagcaggaggagagcgtggaccccgactactgggagaagctgctgagacaccactacgagcagcagcaggaggacctggccagaaacctgggcaagggcaagagaatcagaaagcaggtgaactacaacgacggcagccaggaggacagaggcgtgtgcggcagacccagacccccccccatgggcagaagcaccagagccgtgggccccgcccacctgcccagcctgccccccgactggcaggacgaccagagcgacaaccagagcgactacagcgtggccagcgaggagggcgacgaggacttcgacgagagaagcgaggcccccagaagacccagcagaaagggcctgagaaacgacaaggacaagcccctgccccccctgctggccagagtgggcggcaacatcgaggtgctgggcttcaacgccagacagagaaaggccttcctgaacgccatcatgagatacggcatgcccccccaggacgccttcaccacccagtggctggtgagagacctgagaggcaagagcgagaaggagttcaaggcctacgtgagcctgttcatgagacacctgtgcgagcccggcgccgacggcgccgagaccttcgccgacggcgtgcccagagagggcctgagcagacagcacgtgctgaccagaatcggcgtgatgagcctgatcagaaagaaggtgcaggagttcgagcacgtgaacggcagatggagcatgcccgagctggccgaggtggaggagaacaagaagatgagccagcccggcagccccagccccaagacccccacccccagcacccccggcgacacccagcccaacacccccgcccccgtgccccccgccgaggacggcatcaagatcgaggagaacagcctgaaggaggaggagagcatcgagggcgagaaggaggtgaagagcaccgcccccgagaccgccatcgagtgcacccaggcccccgcccccgccagcgaggacgagaaggtggtggtggagccccccgagggcgaggagaaggtggagaaggccgaggtgaaggagagaaccgaggagcccatggagaccgagcccaagggcgccgccgacgtggagaaggtggaggagaagagcgccatcgacctgacccccatcgtggtggaggacaaggaggagaagaaggaggaggaggagaagaaggaggtgatgctgcagaacggcgagacccccaaggacctgaacgacgagaagcagaagaagaacatcaagcagagattcatgttcaacatcgccgacggcggcttcaccgagctgcacagcctgtggcagaacgaggagagagccgccaccgtgaccaagaagacctacgagatctggcacagaagacacgactactggctgctggccggcatcatcaaccacggctacgccagatggcaggacatccagaacgaccccagatacgccatcctgaacgagcccttcaagggcgagatgaacagaggcaacttcctggagatcaagaacaagttcctggccagaagattcaagctgctggagcaggccctggtgatcgaggagcagctgagaagagccgcctacctgaacatgagcgaggaccccagccaccccagcatggccctgaacaccagattcgccgaggtggagtgcctggccgagagccaccagcacctgagcaaggagagcatggccggcaacaagcccgccaacgccgtgctgcacaaggtgctgaagcagctggaggagctgctgagcgacatgaaggccgacgtgaccagactgcccgccaccatcgccagaatcccccccgtggccgtgagactgcagatgagcgagagaaacatcctgagcagactggccaacagagcccccgagcccaccccccagcaggtggcccagcagcagtag

SEQ ID NO: 10107 - DNA, 1065 bp, synthetic construct
  misc_feature 1..1065: note = Description of Artificial Sequence: Synthetic coding sequence
  source 1..1065: mol_type = other DNA
atggccagcggcctgggcagccccagcccctgcagcgccggcagcgaggaggaggacatggacgccctgctgaacaacagcctgccccccccccaccccgagaacgaggaggaccccgaggaggacctgagcgagaccgagacccccaagctgaagaagaagaagaagcccaagaagcccagagaccccaagatccccaagagcaagagacagaagaaggagagaatgctgctgtgcagacagctgggcgacagcagcggcgagggccccgagttcgtggaggaggaggaggaggtggccctgagaagcgacagcgagggcagcgactacacccccggcaagaagaagaagaagaagctgggccccaagaaggagaagaagagcaagagcaagagaaaggaggaggaggaggaggaggacgacgacgacgacagcaaggagcccaagagcagcgcccagctgctggaggactggggcatggaggacatcgaccacgtgttcagcgaggaggactacagaaccctgaccaactacaaggccttcagccagttcgtgagacccctgatcgccgccaagaaccccaagatcgccgtgagcaagatgatgatggtgctgggcgccaagtggagagagttcagcaccaacaaccccttcaagggcagcagcggcgccagcgtggccgccgccgccgccgccgccgtggccgtggtggagagcatggtgaccgccaccgaggtggcccccccccccccccccgtggaggtgcccatcagaaaggccaagaccaaggagggcaagggccccaacgccagaagaaagcccaagggcagccccagagtgcccgacgccaagaagcccaagcccaagaaggtggcccccctgaagatcaagctgggcggcttcggcagcaagagaaagagaagcagcagcgaggacgacgacctggacgtggagagcgacttcgacgacgccagcatcaacagctacagcgtgagcgacggcagcaccagcagaagcagcagaagcagaaagaagctgagaaccaccaagaagaagaagaagtag

SEQ ID NO: 10108 - DNA, 1065 bp, synthetic construct; identical to SEQ ID NO: 10107
  misc_feature 1..1065: note = Description of Artificial Sequence: Synthetic coding sequence
  source 1..1065: mol_type = other DNA

SEQ ID NO: 10109 - DNA, 2562 bp, synthetic construct
  misc_feature 1..2562: note = Description of Artificial Sequence: Synthetic coding sequence
  source 1..2562: mol_type = other DNA
atgttcctgccccacatgaaccacctgaccctggagcagaccttcttcagccaggtgctgcccaagaccgtgaagctgttcgacgacatgatgtacgagctgaccagccaggccagaggcctgagcagccagaacctggagatccagaccaccctgagaaacatcctgcagaccatggtgcagctgctgggcgccctgaccggctgcgtgcagcacatctgcgccacccaggagagcatcatcctggagaacatccagagcctgcccagcagcgtgctgcacatcatcaagagcaccttcgtgcactgcaagaacagcgagagcgtgtacagcggctgcctgcacctggtgagcgacctgctgcaggccctgttcaaggaggcctacagcctgcagaagcagctgatggagctgctggacatggtgtgcatggaccccctggtggacgacaacgacgacatcctgaacatggtgatcgtgatccacagcctgctggacatctgcagcgtgatcagcagcatggaccacgccttccacgccaacacctggaagttcatcatcaagcagagcctgaagcaccagagcatcatcaagagccagctgaagcacaaggacatcatcaccagcctgtgcgaggacatcctgttcagcttccacagctgcctgcagctggccgagcagatgacccagagcgacgcccaggacaacgccgactacagactgttccagaagaccctgaagctgtgcagattcttcgccaacagcctgctgcactacgccaaggagttcctgcccttcctgagcgacagctgctgcaccctgcaccagctgtacctgcagatccacagcaagttcccccccagcctgtacgccaccagaatcagcaaggcccaccaggaggagatcgccggcgccttcctggtgaccctggaccccctgatcagccagctgctgaccttccagcccttcatgcaggtggtgctggacagcaagctggacctgccctgcgagctgcagttcccccagtgcctgctgctggtggtggtgatggacaagctgcccagccagcccaaggaggtgcagaccctgtggtgcaccgacagccaggtgagcgagaccaccaccagaatcagcctgctgaaggccgtgttctacagcttcgagcagtgcagcggcgagctgagcctgcccgtgcacctgcagggcctgaagagcaagggcaaggccgaggtggccgtgaccctgtaccagcacgtgtgcgtgcacctgtgcaccttcatcaccagcttccaccccagcctgttcgccgagctggacgccgccctgctgaacgccgtgctgagcgccaacatgatcaccagcctgctggccatggacgcctggtgcttcctggccagatacggcaccgccgagctgtgcgcccaccacgtgaccatcgtggcccacctgatcaagagctgccccggcgagtgctaccagctgatcaacctgagcatcctgctgaagagactgttcttcttcatggcccccccccaccagctggagttcatccagaagttcagccccaaggaggccgagaacctgcccctgtggcagcacatcagcttccaggccctgccccccgagctgagagagcagaccgtgcacgaggtgaccaccgtgggcaccgccgagtgcagaaagtggctgagcagaagcagaaccctgggcgagctggagagcctgaacaccgtgctgagcgccctgctggccgtgtgcaacagcgccggcgaggccctggacaccggcaagcagaccgccatcatcgaggtggtgagccagctgtgggccttcctgaacatcaagcaggtggccgaccagccctacgtgcagcagaccttcagcctgctgctgcccctgctgggcttcttcatccagaccctggaccccaagctgatcctgcaggccgtgaccctgcagaccagcctgctgaagctggagctgcccgactacgtgagactggccatgctggacttcgtgagcagcctgggcaagctgttcatccccgaggccatccaggacagaatcctgcccaacctgagctgcatgttcgccctgctgctggccgacagaagctggctgctggagcagcacaccctggaggccttcacccagttcgccgagggcaccaaccacgaggagatcgtgccccagtgcctgagcagcgaggagaccaagaacaaggtggtgagcttcctggagaagaccggcttcgtggacgagaccgaggccgccaaggtggagagagtgaagcaggagaagggcatcttctgggagcccttcgccaacgtgaccgtggaggaggccaagagaagcagcctgcagccctacgccaagagagccagacaggagttcccctgggaggaggagtacagaagcgccctgcacaccatcgccggcgccctggaggccaccgagagcctgctgcagaagggccccgcccccgcctggctgagcatggagatggaggccctgcaggagagaatggacaagctgaagagatacatccacaccctgggctag

SEQ ID NO: 10110 - DNA, 2562 bp, synthetic construct; identical to SEQ ID NO: 10109
  misc_feature 1..2562: note = Description of Artificial Sequence: Synthetic coding sequence
  source 1..2562: mol_type = other DNA

SEQ ID NO: 10111 - DNA, 993 bp, synthetic construct
  misc_feature 1..993: note = Description of Artificial Sequence: Synthetic coding sequence
  source 1..993: mol_type = other DNA
atgatgtacgagctgaccagccaggccagaggcctgagcagccagaacctggagatccagaccaccctgagaaacatcctgcagaccatggtgcagctgctgggcgccctgaccggctgcgtgcagcacatctgcgccacccaggagagcatcatcctggagaacatccagagcctgcccagcagcgtgctgcacatcatcaagagcaccttcgtgcactgcaagaacagcgagagcgtgtacagcggctgcctgcacctggtgagcgacctgctgcaggccctgttcaaggaggcctacagcctgcagaagcagctgatggagctgctggacatggtgtgcatggaccccctggtggacgacaacgacgacatcctgaacatggtgatcgtgatccacagcctgctggacatctgcagcgtgatcagcagcatggaccacgccttccacgccaacacctggaagttcatcatcaagcagagcctgaagcaccagagcatcatcaagagccagctgaagcacaaggacatcatcaccagcctgtgcgaggacatcctgttcagcttccacagctgcctgcagctggccgagcagatgacccagagcgacgcccaggacaacgccgactacagactgttccagaagaccctgaagctgtgcagattcttcgccaacagcctgctgcactacgccaaggagttcctgcccttcctgagcgacagctgctgcaccctgcaccagctgtacctgcagatccacagcaagttcccccccagcctgtacgccaccagaatcagcaaggcccaccaggaggagatcgccggcgccttcctggtgaccctggaccccctgatcagccagctgctgaccttccagcccttcatgcaggtggtgctggacagcaagctgggctacctgtacagcaagcccttcagcaccgtgctgagcagcgtgctggtgaacagcctgtacctgttcatctacagagactag

SEQ ID NO: 10112 - DNA, 1047 bp, synthetic construct
  misc_feature 1..1047: note = Description of Artificial Sequence: Synthetic coding sequence
  source 1..1047: mol_type = other DNA
atgagccaggagggcgccgtgcccgccagcgccgtgcccctggaggagctgagcagctggcccgaggagctgtgcagaagagagctgcccagcgtgctgcccagactgctgagcctgagccagcacagcgacagctggatcgagcacatccagatcctgaagatcatcgtggagatgttcctgccccacatgaaccacctgaccctggagcagaccttcttcagccaggtgctgcccaagaccgtgaagctgttcgacgacatgatgtacgagctgaccagccaggccagaggcctgagcagccagaacctggagatccagaccaccctgagaaacatcctgcagaccatggtgcagctgctgggcgccctgaccggctgcgtgcagcacatctgcgccacccaggagagcatcatcctggagaacatccagagcctgcccagcagcgtgctgcacatcatcaagagcaccttcgtgcactgcaagaacagcgagagcgtgtacagcggctgcctgcacctggtgagcgacctgctgcaggccctgttcaaggaggcctacagcctgcagaagcagctgatggagctgctggacatggtgtgcatggaccccctggtggacgacaacgacgacatcctgaacatggtgatcgtgatccacagcctgctggacatctgcagcgtgatcagcagcatggaccacgccttccacgccaacacctggaagttcatcatcaagcagagcctgaagcaccagagcatcatcaagagccagctgaagcacaaggacatcatcaccagcctgtgcgaggacatcctgttcagcttccacagctgcctgcagctggccgagcagatgacccagagcgacgcccaggacaacgccgactacagactgttccagaagaccctgaagctgtgcagattcttcgccaacagcctgctgcactacgccaaggagttcctgcccttcctgagcgacagctgctgcaccctgcaccagctgtacctgcagatccacagatggagcttcgccctggccgtgtag

SEQ ID NO: 10113 - DNA, 2100 bp, synthetic construct
  misc_feature 1..2100: note = Description of Artificial Sequence: Synthetic coding sequence
  source 1..2100: mol_type = other DNA
atgctgaagctgagcggcgagggcctgagagacagctaccacagcagaagagaccagatcgccctgaagaacctgcagagcgacgtgaccgaggccaagagcgacttcaccaaggagaccctggccagccagaacaccaagatgatcagcagcatcgtgatcagccagatgatcgacgagaacaagagcagagagaacagagccagcctgcccctgccctgcgccatcgcccagagcagagcccaccacgccaagcagagcctggccaacagaagcggcgtgaacatccacagagccttcgccctgctgcccggcagactgggcatccccgcccccagcgacgagagaggccccgaggccgagctgccccccaaggaggagagaccctgcggcggccccagaagaggcttcgccagcatcaccatcaccgccagaagagtgggcccccccgccagagccctggtgtggggcaccgccggcgacagcctgtgccccaagtgcagagccgaggacaccctgttccaggccccccccgccctggccaacggcgcccaccccggcagacaccagagaagcttcgcctgcaccgagttcagcagaaacagcagcgtggtgagactgaaggtgcccgaggcccacaccggcctgtgcgagagaagaaagtactgggtgacccacgccgacgacaaggagaccagcttcagccccgacacccccctgagcggcaagagccccctggtgttcagcagctgcgtgcacctgagagtgagccagcagtgccccgacagcatctactacgtggacaagagcctgagcgtgcccatcgagcccccccagatcgccagccccaagatgcacagaagcgtgctgagcctgaacctgaactgcagcagccacagactgaccgccgacggcgtggacggcctggtgaacagagagcccatcagcgaggccctgaagcaggagctgctggagggcgaccaggacctggtgggccagagatggaaccccggcctgcaggagagccacctgaaggagacccccagcctgagaagagtgcacctgggcaccggcgcctgcccctggagcggcagcttccccctggagaacaccgagctggccaacgtgggcgccaaccaggtgaccgtgagaaagggcgagaaggaccacaccacccactgccacgccagcgaccacgccaaccagctgagcatccacatccccggctggagctacagagccgtgcacaccaaggtgttcagcggcagcagcaagagacagcagggcgaggtgtgcatgaccgtgagcgccccccccgtggagcagaagcccaccagacacttcctgcccatcggcgacagcagccccagcgacgactgcctgagcagagacctgagcgagcccaccgagagaagacaccagagcttcctgaagcccagaatcctgttccccggcttcctgtgccccctgcaggacgtgtgcgccagcctgcaggaggacaacggcgtgcagatcgagagcaagttccccaagggcgactacacctgctgcgacctggtggtgaagatcaaggagtgcaagaagagcgaggaccccaccacccccgagcccagccccgccgcccccagccccgcccccagagacggcgccggcagccccggcctgagcgaggactgcagcgagagccagcagacccccgccagaagcctgaccctgcaggaggccctggaggtgagaaagccccagttcatcagcagaagccaggagagactgaagaagctggagcacatggtgcagcagagaaaggcccagagaaaggaggacctgagacagaagcagagcctgctgcccatcagaaccagcaagaagcagttcaccatcccccaccccctgagcgacaacctgttcaagcccaaggagagatgcatcagcgagaaggagatgcacatgagaagcaagagaatctacgacaacctgcccgaggtgaagaagaagaaggaggagcagagaaagagagtgatcctgcagagcaacagactgagagccgaggtgttcaagaagcagctgctggaccagctgctgcagagaaacgccgtgtag

SEQ ID NO: 10114 - DNA, 1959 bp, synthetic construct
  misc_feature 1..1959: note = Description of Artificial Sequence: Synthetic coding sequence
  source 1..1959: mol_type = other DNA
atgatcagcagcatcgtgatcagccagatgatcgacgagaacaagagcagagagaacagagccagcctgcccctgccctgcgccatcgcccagagcagagcccaccacgccaagcagagcctggccaacagaagcggcgtgaacatccacagagccttcgccctgctgcccggcagactgggcatccccgcccccagcgacgagagaggccccgaggccgagctgccccccaaggaggagagaccctgcggcggccccagaagaggcttcgccagcatcaccatcaccgccagaagagtgggcccccccgccagagccctggtgtggggcaccgccggcgacagcctgtgccccaagtgcagagccgaggacaccctgttccaggccccccccgccctggccaacggcgcccaccccggcagacaccagagaagcttcgcctgcaccgagttcagcagaaacagcagcgtggtgagactgaaggtgcccgaggcccacaccggcctgtgcgagagaagaaagtactgggtgacccacgccgacgacaaggagaccagcttcagccccgacacccccctgagcggcaagagccccctggtgttcagcagctgcgtgcacctgagagtgagccagcagtgccccgacagcatctactacgtggacaagagcctgagcgtgcccatcgagcccccccagatcgccagccccaagatgcacagaagcgtgctgagcctgaacctgaactgcagcagccacagactgaccgccgacggcgtggacggcctggtgaacagagagcccatcagcgaggccctgaagcaggagctgctggagggcgaccaggacctggtgggccagagatggaaccccggcctgcaggagagccacctgaaggagacccccagcctgagaagagtgcacctgggcaccggcgcctgcccctggagcggcagcttccccctggagaacaccgagctggccaacgtgggcgccaaccaggtgaccgtgagaaagggcgagaaggaccacaccacccactgccacgccagcgaccacgccaaccagctgagcatccacatccccggctggagctacagagccgtgcacaccaaggtgttcagcggcagcagcaagagacagcagggcgaggtgtgcatgaccgtgagcgccccccccgtggagcagaagcccaccagacacttcctgcccatcggcgacagcagccccagcgacgactgcctgagcagagacctgagcgagcccaccgagagaagacaccagagcttcctgaagcccagaatcctgttccccggcttcctgtgccccctgcaggacgtgtgcgccagcctgcaggaggacaacggcgtgcagatcgagagcaagttccccaagggcgactacacctgctgcgacctggtggtgaagatcaaggagtgcaagaagagcgaggaccccaccacccccgagcccagccccgccgcccccagccccgcccccagagacggcgccggcagccccggcctgagcgaggactgcagcgagagccagcagacccccgccagaagcctgaccctgcaggaggccctggaggtgagaaagccccagttcatcagcagaagccaggagagactgaagaagctggagcacatggtgcagcagagaaaggcccagagaaaggaggacctgagacagaagcagagcctgctgcccatcagaaccagcaagaagcagttcaccatcccccaccccctgagcgacaacctgttcaagcccaaggagagatgcatcagcgagaaggagatgcacatgagaagcaagagaatctacgacaacctgcccgaggtgaagaagaagaaggaggagcagagaaagagagtgatcctgcagagcaacagactgagagccgaggtgttcaagaagcagctgctggaccagctgctgcagagaaacgccgtgtag

SEQ ID NO: 10115 - DNA, 1152 bp, synthetic construct
  misc_feature 1..1152: note = Description of Artificial Sequence: Synthetic coding sequence
  source 1..1152: mol_type = other DNA
atgatcagcagcatcgtgatcagccagatgatcgacgagaacaagagcagagagaacagagccagcctgcccctgccctgcgccatcgcccagagcagagcccaccacgccaagcagagcctggccaacagaagcggcgtgaacatccacagagccttcgccctgctgcccggcagactgggcatccccgcccccagcgacgagagaggccccgaggccgagctgccccccaaggaggagagaccctgcggcggccccagaagaggcttcgccagcatcaccatcaccgccagaagagtgggcccccccgccagagccctggtgtggggcaccgccggcgacagcctgtgccccaagtgcagagccgaggacaccctgttccaggccccccccgccctggccaacggcgcccaccccggcagacaccagagaagcttcgcctgcaccgagttcagcagaaacagcagcgtggtgagactgaaggtgcccgaggcccacaccggcctgtgcgagagaagaaagtactgggtgacccacgccgacgacaaggagaccagcttcagccccgacacccccctgagcggcaagagccccctggtgttcagcagctgcgtgcacctgagagtgagccagcagtgccccgacagcatctactacgtggacaagagcctgagcgtgcccatcgagcccccccagatcgccagccccaagatgcacagaagcgtgctgagcctgaacctgaactgcagcagccacagactgaccgccgacggcgtggacggcctggtgaacagagagcccatcagcgaggccctgaagcaggagctgctggagggcgaccaggacctggtgggccagagatggaaccccggcctgcaggagagccacctgaaggagacccccagcctgagaagagtgcacctgggcaccggcgcctgcccctggagcggcagcttccccctggagaacaccgagctggccaacgtgggcgccaaccaggtgaccgtgagaaagggcgagaaggaccacaccacccactgccacgccagcgaccacgccaaccagctgagcatccacatccccggctggagctacagagccgacctgctgcaggagggccagcacaagcagctgagcatgttccagagatag

SEQ ID NO: 10116 - DNA, 1152 bp, synthetic construct; identical to SEQ ID NO: 10115
  misc_feature 1..1152: note = Description of Artificial Sequence: Synthetic coding sequence
  source 1..1152: mol_type = other DNA

SEQ ID NO: 10117 - DNA, 729 bp, synthetic construct
  misc_feature 1..729: note = Description of Artificial Sequence: Synthetic coding sequence
  source 1..729: mol_type = other DNA
tgatggagcggcagcttccccctggagaacaccgagctggccaacgtgggcgccaaccaggtgaccgtgagaaagggcgagaaggaccacaccacccactgccacgccagcgaccacgccaaccagctgagcatccacatccccggctggagctacagagccggcgactacacctgctgcgacctggtggtgaagatcaaggagtgcaagaagagcgaggaccccaccacccccgagcccagccccgccgcccccagccccgcccccagagacggcgccggcagccccggcctgagcgaggactgcagcgagagccagcagacccccgccagaagcctgaccctgcaggaggccctggaggtgagaaagccccagttcatcagcagaagccaggagagactgaagaagctggagcacatggtgcagcagagaaaggcccagagaaaggaggacctgagacagaagcagagcctgctgcccatcagaaccagcaagaagcagttcaccatcccccaccccctgagcgacaacctgttcaagcccaaggagagatgcatcagcgagaaggagatgcacatgagaagcaagagaatctacgacaacctgcccgaggtgaagaagaagaaggaggagcagagaaagagagtgatcctgcagagcaacagactgagagccgaggtgttcaagaagcagctgctggaccagctgctgcagagaaacgccgtgtag

SEQ ID NO: 10118 - DNA, 1989 bp, synthetic construct
  misc_feature 1..1989: note = Description of Artificial Sequence: Synthetic coding sequence
  source 1..1989: mol_type = other DNA
atgctgaagctgagcggcgagggcctgagagacagctaccacagcagaagagaccagatcgccctgaagaacctgcagagcgacgtgaccgaggccaagagcgacttcaccaaggagaccctggccagccagaacaccaagatgatcagcagcatcgtgatcagccagatgatcgacgagaacaagagcagagagaacagagccagcctgcccctgccctgcgccatcgcccagagcagagcccaccacgccaagcagagcctggccaacagaagcggcgtgaacatccacagagccttcgccctgctgcccggcagactgggcatccccgcccccagcgacgagagaggccccgaggccgagctgccccccaaggaggagagaccctgcggcggccccagaagaggcttcgccagcatcaccatcaccgccagaagagtgggcccccccgccagagccctggtgtggggcaccgccggcgacagcctgtgccccaagtgcagagccgaggacaccctgttccaggccccccccgccctggccaacggcgcccaccccggcagacaccagagaagcttcgcctgcaccgagttcagcagaaacagcagcgtggtgagactgaaggtgcccgaggcccacaccggcctgtgcgagagaagaaagtactgggtgacccacgccgacgacaaggagaccagcttcagccccgacacccccctgagcggcaagagccccctggtgttcagcagctgcgtgcacctgagagtgagccagcagtgccccgacagcatctactacgtggacaagagcctgagcgtgcccatcgagcccccccagatcgccagccccaagatgcacagaagcgtgctgagcctgaacctgaactgcagcagccacagactgaccgccgacggcgtggacggcctggtgaacagagagcccatcagcgaggccctgaagcaggagctgctggagggcgaccaggacctggtgggccagagatggaaccccggcctgcaggagagccacctgaaggagacccccagcctgagaagagtgcacctgggcaccggcgcctgcccctggagcggcagcttccccctggagaacaccgagctggccaacgtgggcgccaaccaggtgaccgtgagaaagggcgagaaggaccacaccacccactgccacgccagcgaccacgccaaccagctgagcatccacatccccggctggagctacagagccgtgcacaccaaggtgttcagcggcagcagcaagagacagcagggcgaggtgtgcatgaccgtgagcgccccccccgtggagcagaagcccaccagacacttcctgcccatcggcgacagcagccccagcgacgactgcctgagcagagacctgagcgagcccaccgagagaagacaccagagcttcctgaagcccagaatcctgttccccggcttcctgtgccccctgcaggacgtgtgcgccagcctgcaggaggacaacggcgtgcagatcgagagcaagttccccaagggcgactacacctgctgcgacctggtggtgaagatcaaggagtgcaagaagagcgaggaccccaccacccccgagcccagccccgccgcccccagccccgcccccagagacggcgccggcagccccggcctgagcgaggactgcagcgagagccagcagacccccgccagaagcctgaccctgcaggaggccctggaggtgagaaagccccagttcatcagcagaagccaggagagactgaagaagctggagcacatggtgcagcagagaaaggcccagagaaaggaggacctgagacagaagcagagcctgctgcccatcagaaccagcaagaagcagttcaccatcccccaccccctgagcgacaacctgttcaagcccaaggagagatgcatcagcgagaaggagatgcacatgagaagcaagagaatctacgacaacctgcccgaggtgtag

SEQ ID NO: 10119 - DNA, 1809 bp, synthetic construct
  misc_feature 1..1809: note = Description of Artificial Sequence: Synthetic coding sequence
  source 1..1809: mol_type = other DNA
atgctgaagctgagcggcgagggcctgagagacagctaccacagcagaagagaccagatcgccctgaagaacctgcagagcgacgtgaccgaggccaagagcgacttcaccaaggagaccctggccagccagaacaccaagatgatcagcagcatcgtgatcagccagatgatcgacgagaacaagagcagagagaacagagccagcctgcccctgccctgcgccatcgcccagagcagagcccaccacgccaagcagagcctggccaacagaagcggcgtgaacatccacagagccttcgccctgctgcccggcagactgggcatccccgcccccagcgacgagagaggccccgaggccgagctgccccccaaggaggagagaccctgcggcggccccagaagaggcttcgccagcatcaccatcaccgccagaagagtgggcccccccgccagagccctggtgtggggcaccgccggcgacagcctgtgccccaagtgcagagccgaggacaccctgttccaggccccccccgccctggccaacggcgcccaccccggcagacaccagagaagcttcgcctgcaccgagttcagcagaaacagcagcgtggtgagactgaaggtgcccgaggcccacaccggcctgtgcgagagaagaaagtactgggtgacccacgccgacgacaaggagaccagcttcagccccgacacccccctgagcggcaagagccccctggtgttcagcagctgcgtgcacctgagagtgagccagcagtgccccgacagcatctactacgtggacaagagcctgagcgtgcccatcgagcccccccagatcgccagccccaagatgcacagaagcgtgctgagcctgaacctgaactgcagcagccacagactgaccgccgacggcgtggacggcctggtgaacagagagcccatcagcgaggccctgaagcaggagctgctggagggcgaccaggacctggtgggccagagatggaaccccggcctgcaggagagccacctgaaggagacccccagcctgagaagagtgcacctgggcaccggcgcctgcccctggagcggcagcttccccctggagaacaccgagctggccaacgtgggcgccaaccaggtgaccgtgagaaagggcgagaaggaccacaccacccactgccacgccagcgaccacgccaaccagctgagcatccacatccccggctggagctacagagccggcgactacacctgctgcgacctggtggtgaagatcaaggagtgcaagaagagcgaggaccccaccacccccgagcccagccccgccgcccccagccccgcccccagagacggcgccggcagccccggcctgagcgaggactgcagcgagagccagcagacccccgccagaagcctgaccctgcaggaggccctggaggtgagaaagccccagttcatcagcagaagccaggagagactgaagaagctggagcacatggtgcagcagagaaaggcccagagaaaggaggacctgagacagaagcagagcctgctgcccatcagaaccagcaagaagcagttcaccatcccccaccccctgagcgacaacctgttcaagcccaaggagagatgcatcagcgagaaggagatgcacatgagaagcaagagaatctacgacaacctgcccgaggtgaagaagaagaaggaggagcagagaaagagagtgatcctgcagagcaacagactgagagccgaggtgttcaagaagcagctgctggaccagctgctgcagagaaacgccgtgtag

SEQ ID NO: 10120 - DNA, 2391 bp, synthetic construct
  misc_feature 1..2391: note = Description of Artificial Sequence: Synthetic coding sequence
  source 1..2391: mol_type = other DNA
atgcagcacagcggcatccccaccaagacccacccccagggctacgccgccagatacaccgagaccgccgtgcacagaaccttccagatcaagaccttcagcaccgagctgaagaaccacgtgatggtgatggacttcgtgaagagcaactggttccccagccagagaagagccaaggtgtgcatcatccacatgtgccagggcctgaagaccgccgagcagaccgccagcagatacgagatccacagcagactgttcagcagccccaaggaccacagcgcctgggagagaaacgagagcctgagcaacgccggcctgagagacagctaccacagcagaagagaccagatcgccctgaagaacctgcagagcgacgtgaccgaggccaagagcgacttcaccaaggagaccctggccagccagaacaccaagatgatcagcagcatcgtgatcagccagatgatcgacgagaacaagagcagagagaacagagccagcctgcccctgccctgcgccatcgcccagagcagagcccaccacgccaagcagagcctggccaacagaagcggcgtgaacatccacagagccttcgccctgctgcccggcagactgggcatccccgcccccagcgacgagagaggccccgaggccgagctgccccccaaggaggagagaccctgcggcggccccagaagaggcttcgccagcatcaccatcaccgccagaagagtgggcccccccgccagagccctggtgtggggcaccgccggcgacagcctgtgccccaagtgcagagccgaggacaccctgttccaggccccccccgccctggccaacggcgcccaccccggcagacaccagagaagcttcgcctgcaccgagttcagcagaaacagcagcgtggtgagactgaaggtgcccgaggcccacaccggcctgtgcgagagaagaaagtactgggtgacccacgccgacgacaaggagaccagcttcagccccgacacccccctgagcggcaagagccccctggtgttcagcagctgcgtgcacctgagagtgagccagcagtgccccgacagcatctactacgtggacaagagcctgagcgtgcccatcgagcccccccagatcgccagccccaagatgcacagaagcgtgctgagcctgaacctgaactgcagcagccacagactgaccgccgacggcgtggacggcctggtgaacagagagcccatcagcgaggccctgaagcaggagctgctggagggcgaccaggacctggtgggccagagatggaaccccggcctgcaggagagccacctgaaggagacccccagcctgagaagagtgcacctgggcaccggcgcctgcccctggagcggcagcttccccctggagaacaccgagctggccaacgtgggcgccaaccaggtgaccgtgagaaagggcgagaaggaccacaccacccactgccacgccagcgaccacgccaaccagctgagcatccacatccccggctggagctacagagccgtgcacaccaaggtgttcagcggcagcagcaagagacagcagggcgaggtgtgcatgaccgtgagcgccccccccgtggagcagaagcccaccagacacttcctgcccatcggcgacagcagccccagcgacgactgcctgagcagagacctgagcgagcccaccgagagaagacaccagagcttcctgaagcccagaatcctgttccccggcttcctgtgccccctgcaggacgtgtgcgccagcctgcaggaggacaacggcgtgcagatcgagagcaagttccccaagggcgactacacctgctgcgacctggtggtgaagatcaaggagtgcaagaagagcgaggaccccaccacccccgagcccagccccgccgcccccagccccgcccccagagacggcgccggcagccccggcctgagcgaggactgcagcgagagccagcagacccccgccagaagcctgaccctgcaggaggccctggaggtgagaaagccccagttcatcagcagaagccaggagagactgaagaagctggagcacatggtgcagcagagaaaggcccagagaaaggaggacctgagacagaagcagagcctgctgcccatcagaaccagcaagaagcagttcaccatcccccaccccctgagcgacaacctgttcaagcccaaggagagatgcatcagcgagaaggagatgcacatgagaagcaagagaatctacgacaacctgcccgaggtgaagaagaagaaggaggagcagagaaagagagtgatcctgcagagcaacagactgagagccgaggtgttcaagaagcagctgctggaccagctgctgcagagaaacgccgtgtag

SEQ ID NO: 10121 - DNA, 786 bp, synthetic construct
  misc_feature 1..786: note = Description of Artificial Sequence: Synthetic coding sequence
  source 1..786: mol_type = other DNA
atgagcaccaccacctgccaggtggtggccttcctgctgagcatcctgggcctggccggctgcatcgccgccaccggcatggacatgtggagcacccaggacctgtacgacaaccccgtgaccagcgtgttccagtacgagggcctgtggagaagctgcgtgagacagagcagcggcttcaccgagtgcagaccctacttcaccatcctgggcctgcccgccatgctgcaggccgtgagagccctgatgatcgtgggcatcgtgctgggcgccatcggcctgctggtgagcatcttcgccctgaagtgcatcagaatcggcagcatggaggacagcgccaaggccaacatgaccctgaccagcggcatcatgttcatcgtgagcggcctgtgcgccatcgccggcgtgagcgtgttcgccaacatgctggtgaccaacttctggatgagcaccgccaacatgtacaccggcatgggcggcatggtgcagaccgtgcagaccagatacaccttcggcgccgccctgttcgtgggctgggtggccggcggcctgaccctgatcggcggcgtgatgatgtgcatcgcctgcagaggcctggcccccgaggagaccaactacaaggccgtgagctaccacgccagcggccacagcgtggcctacaagcccggcggcttcaaggccagcaccggcttcggcagcaacaccaagaacaagaagatctacgacggcggcgccagaaccgaggacgaggtgcagagctaccccagcaagcacgactacgtgtag

SEQ ID NO: 10122 - DNA, 786 bp, synthetic construct
  misc_feature 1..786: note = Description of Artificial Sequence: Synthetic coding sequence
  source 1..786: mol_type = other DNA
atggccgtgaccgcctgccagggcctgggcttcgtggtgagcctgatcggcatcgccggcatcatcgccgccacctgcatggaccagtggagcacccaggacctgtacaacaaccccgtgaccgccgtgttcaactaccagggcctgtggagaagctgcgtgagagagagcagcggcttcaccgagtgcagaggctacttcaccctgctgggcctgcccgccatgctgcaggccgtgagagccctgatgatcgtgggcatcgtgctgggcgccatcggcctgctggtgagcatcttcgccctgaagtgcatcagaatcggcagcatggaggacagcgccaaggccaacatgaccctgaccagcggcatcatgttcatcgtgagcggcctgtgcgccatcgccggcgtgagcgtgttcgccaacatgctggtgaccaacttctggatgagcaccgccaacatgtacaccggcatgggcggcatggtgcagaccgtgcagaccagatacaccttcggcgccgccctgttcgtgggctgggtggccggcggcctgaccctgatcggcggcgtgatgatgtgcatcgcctgcagaggcctggcccccgaggagaccaactacaaggccgtgagctaccacgccagcggccacagcgtggcctacaagcccggcggcttcaaggccagcaccggcttcggcagcaacaccaagaacaagaagatctacgacggcggcgccagaaccgaggacgaggtgcagagctaccccagcaagcacgactacgtgtag

SEQ ID NO: 10123 - DNA, 753 bp, synthetic construct
  misc_feature 1..753: note = Description of Artificial Sequence: Synthetic coding sequence
  source 1..753: mol_type = other DNA
atgagcaccaccacctgccaggtggtggccttcctgctgagcatcctgggcctggccggctgcatcgccgccaccggcatggacatgtggagcacccaggacctgtacgacaaccccgtgaccagcgtgttccagtacgagggcctgtggagaagctgcgtgagacagagcagcggcttcaccgagtgcagaccctacttcaccatcctgggcctgcccgccatgctgcaggccgtgagagccctgatgatcgtggccatcttcgccctgaagtgcatcagaatcggcagcatggaggacagcgccaaggccaacatgaccctgaccagcggcatcatgttcatcgtgagcggcctgtgcgccatcgccggcgtgagcgtgttcgccaacatgctggtgaccaacttctggatgagcaccgccaacatgtacaccggcatgggcggcatggtgcagaccgtgcagaccagatacaccttcggcgccgccctgttcgtgggctgggtggccggcggcctgaccctgatcggcggcgtgatgatgtgcatcgcctgcagaggcctggcccccgaggagaccaactacaaggccgtgagctaccacgccagcggccacagcgtggcctacaagcccggcggcttcaaggccagcaccggcttcggcagcaacaccaagaacaagaagatctacgacggcggcgccagaaccgaggacgaggtgcagagctaccccagcaagcacgactacgtgtag

SEQ ID NO: 10124 - DNA, 3000 bp, synthetic construct
  misc_feature 1..3000: note = Description of Artificial Sequence: Synthetic coding sequence
  source 1..3000: mol_type = other DNA
atgggccccgcccccctgcccctgctgctgggcctgttcctgcccgccctgtggagaagagccatcaccgaggccagagaggaggccaagccctaccccctgttccccggccccttccccggcagcctgcagaccgaccacacccccctgctgagcctgccccacgccagcggctaccagcccgccctgatgttcagccccacccagcccggcagaccccacaccggcaacgtggccatcccccaggtgaccagcgtggagagcaagcccctgccccccctggccttcaagcacaccgtgggccacatcatcctgagcgagcacaagggcgtgaagttcaactgcagcatcagcgtgcccaacatctaccaggacaccaccatcagctggtggaaggacggcaaggagctgctgggcgcccaccacgccatcacccagttctaccccgacgacgaggtgaccgccatcatcgccagcttcagcatcaccagcgtgcagagaagcgacaacggcagctacatctgcaagatgaagatcaacaacgaggagatcgtgagcgaccccatctacatcgaggtgcagggcctgccccacttcaccaagcagcccgagagcatgaacgtgaccagaaacaccgccttcaacctgacctgccaggccgtgggcccccccgagcccgtgaacatcttctgggtgcagaacagcagcagagtgaacgagcagcccgagaagagccccagcgtgctgaccgtgcccggcctgaccgagatggccgtgttcagctgcgaggcccacaacgacaagggcctgaccgtgagcaagggcgtgcagatcaacatcaaggccatccccagcccccccaccgaggtgagcatcagaaacagcaccgcccacagcatcctgatcagctgggtgcccggcttcgacggctacagccccttcagaaactgcagcatccaggtgaaggaggccgaccccctgagcaacggcagcgtgatgatcttcaacaccagcgccctgccccacctgtaccagatcaagcagctgcaggccctggccaactacagcatcggcgtgagctgcatgaacgagatcggctggagcgccgtgagcccctggatcctggccagcaccaccgagggcgcccccagcgtggcccccctgaacgtgaccgtgttcctgaacgagagcagcgacaacgtggacatcagatggatgaagccccccaccaagcagcaggacggcgagctggtgggctacagaatcagccacgtgtggcagagcgccggcatcagcaaggagctgctggaggaggtgggccagaacggcagcagagccagaatcagcgtgcaggtgcacaacgccacctgcaccgtgagaatcgccgccgtgaccagaggcggcgtgggccccttcagcgaccccgtgaagatcttcatccccgcccacggctgggtggactacgcccccagcagcacccccgcccccggcaacgccgaccccgtgctgatcatcttcggctgcttctgcggcttcatcctgatcggcctgatcctgtacatcagcctggccatcagaaagagagtgcaggagaccaagttcggcaacgccttcaccgaggaggacagcgagctggtggtgaactacatcgccaagaagagcttctgcagaagagccatcgagctgaccctgcacagcctgggcgtgagcgaggagctgcagaacaagctggaggacgtggtgatcgacagaaacctgctgatcctgggcaagatcctgggcgagggcgagttcggcagcgtgatggagggcaacctgaagcaggaggacggcaccagcctgaaggtggccgtgaagaccatgaagctggacaacagcagccagagagagatcgaggagttcctgagcgaggccgcctgcatgaaggacttcagccaccccaacgtgatcagactgctgggcgtgtgcatcgagatgagcagccagggcatccccaagcccatggtgatcctgcccttcatgaagtacggcgacctgcacacctacctgctgtacagcagactggagaccggccccaagcacatccccctgcagaccctgctgaagttcatggtggacatcgccctgggcatggagtacctgagcaacagaaacttcctgcacagagacctggccgccagaaactgcatgctgagagacgacatgaccgtgtgcgtggccgacttcggcctgagcaagaagatctacagcggcgactactacagacagggcagaatcgccaagatgcccgtgaagtggatcgccatcgagagcctggccgacagagtgtacaccagcaagagcgacgtgtgggccttcggcgtgaccatgtgggagatcgccaccagaggcatgaccccctaccccggcgtgcagaaccacgagatgtacgactacctgctgcacggccacagactgaagcagcccgaggactgcctggacgagctgtacgagatcatgtacagctgctggagaaccgaccccctggacagacccaccttcagcgtgctgagactgcagctggagaagctgctggagagcctgcccgacgtgagaaaccaggccgacgtgatctacgtgaacacccagctgctggagagcagcgagggcctggcccagggcagcaccctggcccccctggacctgaacatcgaccccgacagcatcatcgccagctgcacccccagagccgccatcagcgtggtgaccgccgaggtgcacgacagcaagccccacgagggcagatacatcctgaacggcggcagcgaggagtgggaggacctgaccagcgcccccagcgccgccgtgaccgccgagaagaacagcgtgctgcccggcgagagactggtgagaaacggcgtgagctggagccacagcagcatgctgcccctgggcagcagcctgcccgacgagctgctgttcgccgacgacagcagcgagggcagcgaggtgctgatgtag

SEQ ID NO: 10125 - DNA, 1671 bp, synthetic construct
  misc_feature 1..1671: note = Description of Artificial Sequence: Synthetic coding sequence
  source 1..1671: mol_type = other DNA
atgaagccccccaccaagcagcaggacggcgagctggtgggctacagaatcagccacgtgtggcagagcgccggcatcagcaaggagctgctggaggaggtgggccagaacggcagcagagccagaatcagcgtgcaggtgcacaacgccacctgcaccgtgagaatcgccgccgtgaccagaggcggcgtgggccccttcagcgaccccgtgaagatcttcatccccgcccacggcgagagctacacccacgcccagatcgccagaaacctgcacaaggtgagacccgcctacatcagcctgaccatctgcagcagcctgctgcaggccagcgtgagccacatcttccagaccatgaccggcctgctggtgagcaccagactgggcagactgtgccccctgttcaacagcggcgcctggcagagaagaagctgcgcccaccacctgtggctgctgctgtggatcctgatcggcctgatcctgtacatcagcctggccatcagaaagagagtgcaggagaccaagttcggcaacgccttcaccgaggaggacagcgagctggtggtgaactacatcgccaagaagagcttctgcagaagagccatcgagctgaccctgcacagcctgggcgtgagcgaggagctgcagaacaagctggaggacgtggtgatcgacagaaacctgctgatcctgggcaagatcctgggcgagggcgagttcggcagcgtgatggagggcaacctgaagcaggaggacggcaccagcctgaaggtggccgtgaagaccatgaagctggacaacagcagccagagagagatcgaggagttcctgagcgaggccgcctgcatgaaggacttcagccaccccaacgtgatcagactgctgggcaccagcgagaagtgcagatgggtggccaagagagccctgctgatctgcagcgtgcccaaggagaagatcagcggcgtggacaagaactgcctgcagatccacatccccctgcagaccctgctgaagttcatggtggacatcgccctgggcatggagtacctgagcaacagaaacttcctgcacagagacctggccgccagaaactgcatgctgagagacgacatgaccgtgtgcgtggccgacttcggcctgagcaagaagatctacagcggcgactactacagacagggcagaatcgccaagatgcccgtgaagtggatcgccatcgagagcctggccgacagagtgtacaccagcaagagcgacgtgtgggccttcggcgtgaccatgtgggagatcgccaccagaggcatgaccccctaccccggcgtgcagaaccacgagatgtacgactacctgctgcacggccacagactgaagcagcccaccgcctggatgaactgcgaccaggtgggcatgtgcagaggcgtggagcccaccgacacccccgcccaggagcccttcctgatgtgggagatcgtgtacgagtgcaccctggccggcgagcccatccccgacagacccaccttcagcgtgctgagactgcagctggagaagctgctggagagcctgcccgacgtgagaaaccaggccgacgtgatctacgtgaacacccagctgctggagagcagcgagggcctggccctgcacccctgcagcaccggcctggagcacagaccctag

SEQ ID NO: 10126 - DNA, 2472 bp, synthetic construct
  misc_feature 1..2472: note = Description of Artificial Sequence: Synthetic coding sequence
  source 1..2472: mol_type = other DNA
atgaagatcaacaacgaggagatcgtgagcgaccccatctacatcgaggtgcagggcctgccccacttcaccaagcagcccgagagcatgaacgtgaccagaaacaccgccttcaacctgacctgccaggccgtgggcccccccgagcccgtgaacatcttctgggtgcagaacagcagcagagtgaacgagcagcccgagaagagccccagcgtgctgaccgtgcccggcctgaccgagatggccgtgttcagctgcgaggcccacaacgacaagggcctgaccgtgagcaagggcgtgcagatcaacatcaaggccatccccagcccccccaccgaggtgagcatcagaaacagcaccgcccacagcatcctgatcagctgggtgcccggcttcgacggctacagccccttcagaaactgcagcatccaggtgaaggaggccgaccccctgagcaacggcagcgtgatgatcttcaacaccagcgccctgccccacctgtaccagatcaagcagctgcaggccctggccaactacagcatcggcgtgagctgcatgaacgagatcggctggagcgccgtgagcccctggatcctggccagcaccaccgagggcgcccccagcgtggcccccctgaacgtgaccgtgttcctgaacgagagcagcgacaacgtggacatcagatggatgaagccccccaccaagcagcaggacggcgagctggtgggctacagaatcagccacgtgtggcagagcgccggcatcagcaaggagctgctggaggaggtgggccagaacggcagcagagccagaatcagcgtgcaggtgcacaacgccacctgcaccgtgagaatcgccgccgtgaccagaggcggcgtgggccccttcagcgaccccgtgaagatcttcatccccgcccacggctgggtggactacgcccccagcagcacccccgcccccggcaacgccgaccccgtgctgatcatcttcggctgcttctgcggcttcatcctgatcggcctgatcctgtacatcagcctggccatcagaaagagagtgcaggagaccaagttcggcaacgccttcaccgaggaggacagcgagctggtggtgaactacatcgccaagaagagcttctgcagaagagccatcgagctgaccctgcacagcctgggcgtgagcgaggagctgcagaacaagctggaggacgtggtgatcgacagaaacctgctgatcctgggcaagatcctgggcgagggcgagttcggcagcgtgatggagggcaacctgaagcaggaggacggcaccagcctgaaggtggccgtgaagaccatgaagctggacaacagcagccagagagagatcgaggagttcctgagcgaggccgcctgcatgaaggacttcagccaccccaacgtgatcagactgctgggcgtgtgcatcgagatgagcagccagggcatccccaagcccatggtgatcctgcccttcatgaagtacggcgacctgcacacctacctgctgtacagcagactggagaccggccccaagcacatccccctgcagaccctgctgaagttcatggtggacatcgccctgggcatggagtacctgagcaacagaaacttcctgcacagagacctggccgccagaaactgcatgctgagagacgacatgaccgtgtgcgtggccgacttcggcctgagcaagaagatctacagcggcgactactacagacagggcagaatcgccaagatgcccgtgaagtggatcgccatcgagagcctggccgacagagtgtacaccagcaagagcgacgtgtgggccttcggcgtgaccatgtgggagatcgccaccagaggcatgaccccctaccccggcgtgcagaaccacgagatgtacgactacctgctgcacggccacagactgaagcagcccgaggactgcctggacgagctgtacgagatcatgtacagctgctggagaaccgaccccctggacagacccaccttcagcgtgctgagactgcagctggagaagctgctggagagcctgcccgacgtgagaaaccaggccgacgtgatctacgtgaacacccagctgctggagagcagcgagggcctggcccagggcagcaccctggcccccctggacctgaacatcgaccccgacagcatcatcgccagctgcacccccagagccgccatcagcgtggtgaccgccgaggtgcacgacagcaagccccacgagggcagatacatcctgaacggcggcagcgaggagtgggaggacctgaccagcgcccccagcgccgccgtgaccgccgagaagaacagcgtgctgcccggcgagagactggtgagaaacggcgtgagctggagccacagcagcatgctgcccctgggcagcagcctgcccgacgagctgctgttcgccgacgacagcagcgagggcagcgaggtgctgatgtag

SEQ ID NO: 10127 - DNA, 3000 bp, synthetic construct; identical to SEQ ID NO: 10124
  misc_feature 1..3000: note = Description of Artificial Sequence: Synthetic coding sequence
  source 1..3000: mol_type = other DNA

SEQ ID NO: 10128 - DNA, 501 bp, synthetic construct
  misc_feature 1..501: note = Description of Artificial Sequence: Synthetic coding sequence
  source 1..501: mol_type = other DNA
atggccagcggcgtggccgtgagcgacggcgtgatcaaggtgttcaacgacatgaaggtgagaaagagcagcacccccgaggaggtgaagaagagaaagaaggccgtgctgttctgcctgagcgaggacaagaagaacatcatcctggaggagggcaaggagatcctggtgggcgacgtgggccagaccgtggacgacccctacgccaccttcgtgaagatgctgcccgacaaggactgcagatacgccctgtacgacgccacctacgagaccaaggagagcaagaaggaggacctggtgttcatcttctgggcccccgagagcgcccccctgaagagcaagatgatctacgccagcagcaaggacgccatcaagaagaagctgaccggcatcaagcacgagctgcaggccaactgctacgaggaggtgaaggacagatgcaccctggccgagaagctgggcggcagcgccgtgatcagcctggagggcaagcccctgtag

SEQ ID NO: 10129 - DNA, 501 bp, synthetic construct; identical to SEQ ID NO: 10128
  misc_feature 1..501: note = Description of Artificial Sequence: Synthetic coding sequence
  source 1..501: mol_type = other DNA

SEQ ID NO: 10130 - DNA, 276 bp, synthetic construct
  misc_feature 1..276: note = Description of Artificial Sequence: Synthetic coding sequence
  source 1..276: mol_type = other DNA
atggccagcggcgtggccgtgagcgacggcgtgatcaaggtgttcaacgacatgaaggtgagaaagagcagcacccccgaggaggtgaagaagagaaagaaggccgtgctgttctgcctgagcgaggacaagaagaacatcatcctggaggagggcaaggagatcctggtgggcgacgtgggccagaccgtggacgacccctacgccaccttcgtgaagatgctgcccgacaaggactgcagatacgccctgtacgacgccacctacgagacctag

SEQ ID NO: 10131 - DNA, 4101 bp, synthetic construct
  misc_feature 1..4101: note = Description of Artificial Sequence: Synthetic coding sequence
  source 1..4101: mol_type = other DNA
atgctgagcttcgtggacaccagaaccctgctgctgctggccgtgaccctgtgcctggccacctgccagagcctgcaggaggagaccgtgagaaagggccccgccggcgacagaggccccagaggcgagagaggcccccccggcccccccggcagagacggcgaggacggccccaccggcccccccggcccccccggcccccccggcccccccggcctgggcggcaacttcgccgcccagtacgacggcaagggcgtgggcctgggccccggccccatgggcctgatgggccccagaggcccccccggcgccgccggcgcccccggcccccagggcttccagggccccgccggcgagcccggcgagcccggccagaccggccccgccggcgccagaggccccgccggcccccccggcaaggccggcgaggacggccaccccggcaagcccggcagacccggcgagagaggcgtggtgggcccccagggcgccagaggcttccccggcacccccggcctgcccggcttcaagggcatcagaggccacaacggcctggacggcctgaagggccagcccggcgcccccggcgtgaagggcgagcccggcgcccccggcgagaacggcacccccggccagaccggcgccagaggcctgcccggcgagagaggcagagtgggcgcccccggccccgccggcgccagaggcagcgacggcagcgtgggccccgtgggccccgccggccccatcggcagcgccggcccccccggcttccccggcgcccccggccccaagggcgagatcggcgccgtgggcaacgccggccccgccggccccgccggccccagaggcgaggtgggcctgcccggcctgagcggccccgtgggcccccccggcaaccccggcgccaacggcctgaccggcgccaagggcgccgccggcctgcccggcgtggccggcgcccccggcctgcccggccccagaggcatccccggccccgtgggcgccgccggcgccaccggcgccagaggcctggtgggcgagcccggccccgccggcagcaagggcgagagcggcaacaagggcgagcccggcagcgccggcccccagggcccccccggccccagcggcgaggagggcaagagaggccccaacggcgaggccggcagcgccggcccccccggcccccccggcctgagaggcagccccggcagcagaggcctgcccggcgccgacggcagagccggcgtgatgggcccccccggcagcagaggcgccagcggccccgccggcgtgagaggccccaacggcgacgccggcagacccggcgagcccggcctgatgggccccagaggcctgcccggcagccccggcaacatcggccccgccggcaaggagggccccgtgggcctgcccggcatcgacggcagacccggccccatcggccccgccggcgccagaggcgagcccggcaacatcggcttccccggccccaagggccccaccggcgaccccggcaagaacggcgacaagggccacgccggcctggccggcgccagaggcgcccccggccccgacggcaacaacggcgcccagggcccccccggcccccagggcgtgcagggcggcaagggcgagcagggcccccccggcccccccggcttccagggcctgcccggccccagcggccccgccggcgaggtgggcaagcccggcgagagaggcctgcacggcgagttcggcctgcccggccccgccggccccagaggcgagagaggcccccccggcgagagcggcgccgccggccccaccggccccatcggcagcagaggccccagcggcccccccggccccgacggcaacaagggcgagcccggcgtggtgggcgccgtgggcaccgccggccccagcggccccagcggcctgcccggcgagagaggcgccgccggcatccccggcggcaagggcgagaagggcgagcccggcctgagaggcgagatcggcaaccccggcagagacggcgccagaggcgcccccggcgccgtgggcgcccccggccccgccggcgccaccggcgacagaggcgaggccggcgccgccggccccgccggccccgccggccccagaggcagccccggcgagagaggcgaggtgggccccgccggccccaacggcttcgccggccccgccggcgccgccggccagcccggcgccaagggcgagagaggcgccaagggccccaagggcgagaacggcgtggtgggccccaccggccccgtgggcgccgccggccccgccggccccaacggcccccccggccccgccggcagcagaggcgacggcggcccccccggcatgaccggcttccccggcgccgccggcagaaccggcccccccggccccagcggcatcagcggcccccccggcccccccggccccgccggcaaggagggcctgagaggccccagaggcgaccagggccccgtgggcagaaccggcgaggtgggcgccgtgggcccccccggcttcgccggcgagaagggccccagcggcgaggccggcaccgccggcccccccggcacccccggcccccagggcctgctgggcgcccccggcatcctgggcctgcccggcagcagaggcgagagaggcctgcccggcgtggccggcgccgtgggcgagcccggccccctgggcatcgccggcccccccggcgccagaggcccccccggcgccgtgggcagccccggcgtgaacggcgcccccggcgaggccggcagagacggcaaccccggcaacgacggcccccccggcagagacggccagcccggccacaagggcgagagaggctaccccggcaacatcggccccgtgggcgccgccggcgcccccggcccccacggccccgtgggccccgccggcaagcacggcaacagaggcgagaccggccccagcggccccgtgggccccgccggcgccgtgggccccagaggccccagcggcccccagggcatcagaggcgacaagggcgagcccggcgagaagggccccagaggcctgcccggcctgaagggccacaacggcctgcagggcctgcccggcatcgccggccaccacggcgaccagggcgcccccggcagcgtgggccccgccggccccagaggccccgccggccccagcggccccgccggcaaggacggcagaaccggccaccccggcaccgtgggccccgccggcatcagaggcccccagggccaccagggccccgccggcccccccggcccccccggcccccccggcccccccggcgtgagcggcggcggctacgacttcggctacgacggcgacttctacagagccgaccagcccagaagcgcccccagcctgagacccaaggactacgaggtggacgccaccctgaagagcctgaacaaccagatcgagaccctgctgacccccgagggcagcagaaagaaccccgccagaacctgcagagacctgagactgagccaccccgagtggagcagcggctactactggatcgaccccaaccagggctgcaccatggacgccatcaaggtgtactgcgacttcagcaccggcgagacctgcatcagagcccagcccgagaacatccccgccaagaactggtacagaagcagcaaggacaagaagcacgtgtggctgggcgagaccatcaacgccggcagccagttcgagtacaacgtggagggcgtgaccagcaaggagatggccacccagctggccttcatgagactgctggccaactacgccagccagaacatcacctaccactgcaagaacagcatcgcctacatggacgaggagaccggcaacctgaagaaggccgtgatcctgcagggcagcaacgacgtggagctggtggccgagggcaacagcagattcacctacaccgtgctggtggacggctgcagcaagaagaccaacgagtggggcaagaccatcatcgagtacaagaccaacaagcccagcagactgcccttcctggacatcgcccccctggacatcggcggcgccgaccaggagttcttcgtggacatcggccccgtgtgcttcaagtag

SEQ ID NO: 10132 - DNA, 4104 bp, synthetic construct
  misc_feature 1..4104: note = Description of Artificial Sequence: Synthetic coding sequence
  source 1..4104: mol_type = other DNA
atgctgagcttcgtggacaccagaaccctgctgctgctggccgtgaccctgtgcctggccacctgccagtgcaccctgggcggccagaccctgagcaagttccccccctacctgcacatcgagagaagcgagcagggcccccccggcccccccggcagagacggcgaggacggccccaccggcccccccggcccccccggcccccccggcccccccggcctgggcggcaacttcgccgcccagtacgacggcaagggcgtgggcctgggccccggccccatgggcctgatgggccccagaggcccccccggcgccgccggcgcccccggcccccagggcttccagggccccgccggcgagcccggcgagcccggccagaccggccccgccggcgccagaggccccgccggcccccccggcaaggccggcgaggacggccaccccggcaagcccggcagacccggcgagagaggcgtggtgggcccccagggcgccagaggcttccccggcacccccggcctgcccggcttcaagggcatcagaggccacaacggcctggacggcctgaagggccagcccggcgcccccggcgtgaagggcgagcccggcgcccccggcgagaacggcacccccggccagaccggcgccagaggcctgcccggcgagagaggcagagtgggcgcccccggccccgccggcgccagaggcagcgacggcagcgtgggccccgtgggccccgccggccccatcggcagcgccggcccccccggcttccccggcgcccccggccccaagggcgagatcggcgccgtgggcaacgccggccccgccggccccgccggccccagaggcgaggtgggcctgcccggcctgagcggccccgtgggcccccccggcaaccccggcgccaacggcctgaccggcgccaagggcgccgccggcctgcccggcgtggccggcgcccccggcctgcccggccccagaggcatccccggccccgtgggcgccgccggcgccaccggcgccagaggcctggtgggcgagcccggccccgccggcagcaagggcgagagcggcaacaagggcgagcccggcagcgccggcccccagggcccccccggccccagcggcgaggagggcaagagaggccccaacggcgaggccggcagcgccggcccccccggcccccccggcctgagaggcagccccggcagcagaggcctgcccggcgccgacggcagagccggcgtgatgggcccccccggcagcagaggcgccagcggccccgccggcgtgagaggccccaacggcgacgccggcagacccggcgagcccggcctgatgggccccagaggcctgcccggcagccccggcaacatcggccccgccggcaaggagggccccgtgggcctgcccggcatcgacggcagacccggccccatcggccccgccggcgccagaggcgagcccggcaacatcggcttccccggccccaagggccccaccggcgaccccggcaagaacggcgacaagggccacgccggcctggccggcgccagaggcgcccccggccccgacggcaacaacggcgcccagggcccccccggcccccagggcgtgcagggcggcaagggcgagcagggcccccccggcccccccggcttccagggcctgcccggccccagcggccccgccggcgaggtgggcaagcccggcgagagaggcctgcacggcgagttcggcctgcccggccccgccggccccagaggcgagagaggcccccccggcgagagcggcgccgccggccccaccggccccatcggcagcagaggccccagcggcccccccggccccgacggcaacaagggcgagcccggcgtggtgggcgccgtgggcaccgccggccccagcggccccagcggcctgcccggcgagagaggcgccgccggcatccccggcggcaagggcgagaagggcgagcccggcctgagaggcgagatcggcaaccccggcagagacggcgccagaggcgcccccggcgccgtgggcgcccccggccccgccggcgccaccggcgacagaggcgaggccggcgccgccggccccgccggccccgccggccccagaggcagccccggcgagagaggcgaggtgggccccgccggccccaacggcttcgccggccccgccggcgccgccggccagcccggcgccaagggcgagagaggcgccaagggccccaagggcgagaacggcgtggtgggccccaccggccccgtgggcgccgccggccccgccggccccaacggcccccccggccccgccggcagcagaggcgacggcggcccccccggcatgaccggcttccccggcgccgccggcagaaccggcccccccggccccagcggcatcagcggcccccccggcccccccggccccgccggcaaggagggcctgagaggccccagaggcgaccagggccccgtgggcagaaccggcgaggtgggcgccgtgggcccccccggcttcgccggcgagaagggccccagcggcgaggccggcaccgccggcccccccggcacccccggcccccagggcctgctgggcgcccccggcatcctgggcctgcccggcagcagaggcgagagaggcctgcccggcgtggccggcgccgtgggcgagcccggccccctgggcatcgccggcccccccggcgccagaggcccccccggcgccgtgggcagccccggcgtgaacggcgcccccggcgaggccggcagagacggcaaccccggcaacgacggcccccccggcagagacggccagcccggccacaagggcgagagaggctaccccggcaacatcggccccgtgggcgccgccggcgcccccggcccccacggccccgtgggccccgccggcaagcacggcaacagaggcgagaccggccccagcggccccgtgggccccgccggcgccgtgggccccagaggccccagcggcccccagggcatcagaggcgacaagggcgagcccggcgagaagggccccagaggcctgcccggcctgaagggccacaacggcctgcagggcctgcccggcatcgccggccaccacggcgaccagggcgcccccggcagcgtgggccccgccggccccagaggccccgccggccccagcggccccgccggcaaggacggcagaaccggccaccccggcaccgtgggccccgccggcatcagaggcccccagggccaccagggccccgccggcccccccggcccccccggcccccccggcccccccggcgtgagcggcggcggctacgacttcggctacgacggcgacttctacagagccgaccagcccagaagcgcccccagcctgagacccaaggactacgaggtggacgccaccctgaagagcctgaacaaccagatcgagaccctgctgacccccgagggcagcagaaagaaccccgccagaacctgcagagacctgagactgagccaccccgagtggagcagcggctactactggatcgaccccaaccagggctgcaccatggacgccatcaaggtgtactgcgacttcagcaccggcgagacctgcatcagagcccagcccgagaacatccccgccaagaactggtacagaagcagcaaggacaagaagcacgtgtggctgggcgagaccatcaacgccggcagccagttcgagtacaacgtggagggcgtgaccagcaaggagatggccacccagctggccttcatgagactgctggccaactacgccagccagaacatcacctaccactgcaagaacagcatcgcctacatggacgaggagaccggcaacctgaagaaggccgtgatcctgcagggcagcaacgacgtggagctggtggccgagggcaacagcagattcacctacaccgtgctggtggacggctgcagcaagaagaccaacgagtggggcaagaccatcatcgagtacaagaccaacaagcccagcagactgcccttcctggacatcgcccccctggacatcggcggcgccgaccaggagttcttcgtggacatcggccccgtgtgcttcaagtag

SEQ ID NO: 10133 - DNA, 4401 bp, synthetic construct
  misc_feature 1..4401: note = Description of Artificial Sequence: Synthetic coding sequence
  source 1..4401: mol_type = other DNA
atgatgagcttcgtgcagaagggcagctggctgctgctggccctgctgcaccccaccatcatcctggcccagcaggaggccgtggagggcggctgcagccacctgggccagagctacgccgacagagacgtgtggaagcccgagccctgccagatctgcgtgtgcgacagcggcagcgtgctgtgcgacgacatcatctgcgacgaccaggagctggactgccccaaccccgagatccccttcggcgagtgctgcgccgtgtgcccccagccccccaccgcccccaccagaccccccaacggccagggcccccagggccccaagggcgaccccggcccccccggcatccccggcagaaacggcgaccccggcatccccggccagcccggcagccccggcagccccggcccccccggcatctgcgagagctgccccaccggcccccagaactacagcccccagtacgacagctacgacgtgaagagcggcgtggccgtgggcggcctggccggctaccccggccccgccggcccccccggcccccccggcccccccggcaccagcggccaccccggcagccccggcagccccggctaccagggcccccccggcgagcccggccaggccggccccagcggcccccccggcccccccggcgccatcggccccagcggccccgccggcaaggacggcgagagcggcagacccggcagacccggcgagagaggcctgcccggcccccccggcatcaagggccccgccggcatccccggcttccccggcatgaagggccacagaggcttcgacggcagaaacggcgagaagggcgagaccggcgcccccggcctgaagggcgagaacggcctgcccggcgagaacggcgcccccggccccatgggccccagaggcgcccccggcgagagaggcagacccggcctgcccggcgccgccggcgccagaggcaacgacggcgccagaggcagcgacggccagcccggcccccccggcccccccggcaccgccggcttccccggcagccccggcgccaagggcgaggtgggccccgccggcagccccggcagcaacggcgcccccggccagagaggcgagcccggcccccagggccacgccggcgcccagggcccccccggcccccccggcatcaacggcagccccggcggcaagggcgagatgggccccgccggcatccccggcgcccccggcctgatgggcgccagaggcccccccggccccgccggcgccaacggcgcccccggcctgagaggcggcgccggcgagcccggcaagaacggcgccaagggcgagcccggccccagaggcgagagaggcgaggccggcatccccggcgtgcccggcgccaagggcgaggacggcaaggacggcagccccggcgagcccggcgccaacggcctgcccggcgccgccggcgagagaggcgcccccggcttcagaggccccgccggccccaacggcatccccggcgagaagggccccgccggcgagagaggcgcccccggccccgccggccccagaggcgccgccggcgagcccggcagagacggcgtgcccggcggccccggcatgagaggcatgcccggcagccccggcggccccggcagcgacggcaagcccggcccccccggcagccagggcgagagcggcagacccggcccccccggccccagcggccccagaggccagcccggcgtgatgggcttccccggccccaagggcaacgacggcgcccccggcaagaacggcgagagaggcggccccggcggccccggcccccagggcccccccggcaagaacggcgagaccggcccccagggcccccccggccccaccggccccggcggcgacaagggcgacaccggcccccccggcccccagggcctgcagggcctgcccggcaccggcggcccccccggcgagaacggcaagcccggcgagcccggccccaagggcgacgccggcgcccccggcgcccccggcggcaagggcgacgccggcgcccccggcgagagaggcccccccggcctggccggcgcccccggcctgagaggcggcgccggcccccccggccccgagggcggcaagggcgccgccggcccccccggcccccccggcgccgccggcacccccggcctgcagggcatgcccggcgagagaggcggcctgggcagccccggccccaagggcgacaagggcgagcccggcggccccggcgccgacggcgtgcccggcaaggacggccccagaggccccaccggccccatcggcccccccggccccgccggccagcccggcgacaagggcgagggcggcgcccccggcctgcccggcatcgccggccccagaggcagccccggcgagagaggcgagaccggcccccccggccccgccggcttccccggcgcccccggccagaacggcgagcccggcggcaagggcgagagaggcgcccccggcgagaagggcgagggcggcccccccggcgtggccggcccccccggcggcagcggccccgccggcccccccggcccccagggcgtgaagggcgagagaggcagccccggcggccccggcgccgccggcttccccggcgccagaggcctgcccggcccccccggcagcaacggcaaccccggcccccccggccccagcggcagccccggcaaggacggcccccccggccccgccggcaacaccggcgcccccggcagccccggcgtgagcggccccaagggcgacgccggccagcccggcgagaagggcagccccggcgcccagggcccccccggcgcccccggccccctgggcatcgccggcatcaccggcgccagaggcctggccggcccccccggcatgcccggccccagaggcagccccggcccccagggcgtgaagggcgagagcggcaagcccggcgccaacggcctgagcggcgagagaggcccccccggcccccagggcctgcccggcctggccggcaccgccggcgagcccggcagagacggcaaccccggcagcgacggcctgcccggcagagacggcagccccggcggcaagggcgacagaggcgagaacggcagccccggcgcccccggcgcccccggccaccccggcccccccggccccgtgggccccgccggcaagagcggcgacagaggcgagagcggccccgccggccccgccggcgcccccggccccgccggcagcagaggcgcccccggcccccagggccccagaggcgacaagggcgagaccggcgagagaggcgccgccggcatcaagggccacagaggcttccccggcaaccccggcgcccccggcagccccggccccgccggccagcagggcgccatcggcagccccggccccgccggccccagaggccccgtgggccccagcggcccccccggcaaggacggcaccagcggccaccccggccccatcggcccccccggccccagaggcaacagaggcgagagaggcagcgagggcagccccggccaccccggccagcccggcccccccggcccccccggcgcccccggcccctgctgcggcggcgtgggcgccgccgccatcgccggcatcggcggcgagaaggccggcggcttcgccccctactacggcgacgagcccatggacttcaagatcaacaccgacgagatcatgaccagcctgaagagcgtgaacggccagatcgagagcctgatcagccccgacggcagcagaaagaaccccgccagaaactgcagagacctgaagttctgccaccccgagctgaagagcggcgagtactgggtggaccccaaccagggctgcaagctggacgccatcaaggtgttctgcaacatggagaccggcgagacctgcatcagcgccaaccccctgaacgtgcccagaaagcactggtggaccgacagcagcgccgagaagaagcacgtgtggttcggcgagagcatggacggcggcttccagttcagctacggcaaccccgagctgcccgaggacgtgctggacgtgcacctggccttcctgagactgctgagcagcagagccagccagaacatcacctaccactgcaagaacagcatcgcctacatggaccaggccagcggcaacgtgaagaaggccctgaagctgatgggcagcaacgagggcgagttcaaggccgagggcaacagcaagttcacctacaccgtgctggaggacggctgcaccaagcacaccggcgagtggagcaagaccgtgttcgagtacagaaccagaaaggccgtgagactgcccatcgtggacatcgccccctacgacatcggcggccccgaccaggagttcggcgtggacgtgggccccgtgtgcttcctgtag

SEQ ID NO: 10134 - DNA, 3492 bp, synthetic construct
  misc_feature 1..3492: note = Description of Artificial Sequence: Synthetic coding sequence
  source 1..3492: mol_type = other DNA
atgatgagcttcgtgcagaagggcagctggctgctgctggccctgctgcaccccaccatcatcctggcccagcaggaggccgtggagggcggctgcagccacctgggccagagctacgccgacagagacgtgtggaagcccgagccctgccagatctgcgtgtgcgacagcggcagcgtgctgtgcgacgacatcatctgcgacgaccaggagctggactgccccaaccccgagatccccttcggcgagtgctgcgccgtgtgcccccagccccccaccgcccccaccagaccccccaacggccagggcccccagggccccaagggcgaccccggcccccccggcatccccggcagaaacggcgaccccggcatccccggccagcccggcagccccggcagccccggcccccccggcatctgcgagagctgccccaccggcccccagaactacagcccccagtacgacagctacgacgtgaagagcggcgtggccgtgggcggcctggccggctaccccggccccgccggcccccccggcccccccggcccccccggcaccagcggccaccccggcagccccggcagccccggctaccagggcccccccggcgagcccggccaggccggccccagcggcccccccggcccccccggcgccatcggccccagcggccccgccggcaaggacggcgagagcggcagacccggcagacccggcgagagaggcctgcccggcccccccggcatcaagggccccgccggcatccccggcttccccggcatgaagggccacagaggcttcgacggcagaaacggcgagaagggcgagaccggcgcccccggcctgaagggcgagaacggcctgcccggcgagaacggcgcccccggccccatgggccccagaggcgcccccggcgagagaggcagacccggcctgcccggcgccgccggcgccagaggcaacgacggcgccagaggcagcgacggccagcccggcccccccggcccccccggcaccgccggcttccccggcagccccggcgccaagggcgaggtgggccccgccggcagccccggcagcaacggcgcccccggccagagaggcgagcccggcccccagggccacgccggcgcccagggcccccccggcccccccggcatcaacggcagccccggcggcaagggcgagatgggccccgccggcatccccggcgcccccggcctgatgggcgccagaggcccccccggccccgccggcgccaacggcgcccccggcctgagaggcggcgccggcgagcccggcaagaacggcgccaagggcgagcccggccccagaggcgagagaggcgaggccggcatccccggcgtgcccggcgccaagggcgaggacggcaaggacggcagccccggcgagcccggcgccaacggcctgcccggcgccgccggcgagagaggcgcccccggcttcagaggccccgccggccccaacggcatccccggcgagaagggccccgccggcgagagaggcgcccccggccccgccggccccagaggcgccgccggcgagcccggcagagacggcgtgcccggcggccccggcatgagaggcatgcccggcagccccggcggccccggcagcgacggcaagcccggcccccccggcagccagggcgagagcggcagacccggcccccccggccccagcggccccagaggccagcccggcgtgatgggcttccccggccccaagggcaacgacggcgcccccggcaagaacggcgagagaggcggccccggcggccccggcccccagggcccccccggcaagaacggcgagaccggcccccagggcccccccggccccaccggccccggcggcgacaagggcgacaccggcccccccggcccccagggcctgcagggcctgcccggcaccggcggcccccccggcgagaacggcaagcccggcgagcccggccccaagggcgacgccggcgcccccggcgcccccggcggcaagggcgacgccggcgcccccggcgagagaggcccccccggcctggccggcgcccccggcctgagaggcggcgccggcccccccggccccgagggcggcaagggcgccgccggcccccccggcccccccggcgccgccggcacccccggcctgcagggcatgcccggcgagagaggcggcctgggcagccccggccccaagggcgacaagggcgagcccggcggccccggcgccgacggcgtgcccggcaaggacggccccagaggccccaccggccccatcggcccccccggccccgccggccagcccggcgacaagggcgagggcggcgcccccggcctgcccggcatcgccggccccagaggcagccccggcgagagaggcgagaccggcccccccggccccgccggcttccccggcgcccccggccagaacggcgagcccggcggcaagggcgagagaggcgcccccggcgagaagggcgagggcggcccccccggcctgttcggcccccccggcaaggacggcaccagcggccaccccggccccatcggcccccccggccccagaggcaacagaggcgagagaggcagcgagggcagccccggccaccccggccagcccggcccccccggcccccccggcgcccccggcccctgctgcggcggcgtgggcgccgccgccatcgccggcatcggcggcgagaaggccggcggcttcgccccctactacggcgacgagcccatggacttcaagatcaacaccgacgagatcatgaccagcctgaagagcgtgaacggccagatcgagagcctgatcagccccgacggcagcagaaagaaccccgccagaaactgcagagacctgaagttctgccaccccgagctgaagagcggcgagtactgggtggaccccaaccagggctgcaagctggacgccatcaaggtgttctgcaacatggagaccggcgagacctgcatcagcgccaaccccctgaacgtgcccagaaagcactggtggaccgacagcagcgccgagaagaagcacgtgtggttcggcgagagcatggacggcggcttccagttcagctacggcaaccccgagctgcccgaggacgtgctggacgtgcacctggccttcctgagactgctgagcagcagagccagccagaacatcacctaccactgcaagaacagcatcgcctacatggaccaggccagcggcaacgtgaagaaggccctgaagctgatgggcagcaacgagggcgagttcaaggccgagggcaacagcaagttcacctacaccgtgctggaggacggctgcaccaagcacaccggcgagtggagcaagaccgtgttcgagtacagaaccagaaaggccgtgagactgcccatcgtggacatcgccccctacgacatcggcggccccgaccaggagttcggcgtggacgtgggccccgtgtgcttcctgtag

SEQ ID NO: 10135 - DNA, 5139 bp, synthetic construct
  misc_feature 1..5139: note = Description of Artificial Sequence: Synthetic coding sequence
  source 1..5139: mol_type = other DNA
atgggcagagaccagagagccgtggccggccccgccctgagaagatggctgctgctgggcaccgtgaccgtgggcttcctggcccagagcgtgctggccggcgtgaagaagttcgacgtgccctgcggcggcagagactgcagcggcggctgccagtgctaccccgagaagggcggcagaggccagcccggccccgtgggcccccagggctacaacggcccccccggcctgcagggcttccccggcctgcagggcagaaagggcgacaagggcgagagaggcgcccccggcgtgaccggccccaagggcgacgtgggcgccagaggcgtgagcggcttccccggcgccgacggcatccccggccaccccggccagggcggccccagaggcagacccggctacgacggctgcaacggcacccagggcgacagcggcccccagggcccccccggcagcgagggcttcaccggcccccccggcccccagggccccaagggccagaagggcgagccctacgccctgcccaaggaggagagagacagatacagaggcgagcccggcgagcccggcctggtgggcttccagggcccccccggcagacccggccacgtgggccagatgggccccgtgggcgcccccggcagacccggccccagcagcgacgagagcttcaagaacaagctgaagaacaagggcctgaactactacaccgtgaacagcatgcagggcgacgtgggccagcccggccccaacggcatccccagcgacaccctgcaccccatcatcgcccccaccggcgtgaccttccaccccgaccagtacaagggccccgtgggctggagaggcagaccctgggtggccggcatcagcctgaagggcgaggagggcatcatgggcttccccggcctgagaggctaccccggcctgagcggcgagaagggcagccccggccagaagggcagcagaggcctggacggctaccagggccccgacggccccagaggccccaagggcgaggccggcgaccccggcccccccggcctgcccgcctacagcccccaccccagcctggccaagggcgccagaggcgaccccggcttccccggcgcccagggcgagcccggcagccagggcgagcccggcgaccccggcctgcccggcccccccggcctgagcatcggcgacggcgaccagagaagaggcctgcccggcgagatgggccccaagggcttcatcggcgaccccggcatccccgccctgtacggcggcccccccggccccgacggcaagagaggcccccccggcccccccggcctgcccggcccccccggccccgacggcttcctgttcggcctgaagggcgccaagggcagagccggcttccccggcctgcccggcagccccggcgccagaggccccaagggctggaagggcgacgccggcgagtgcagatgcaccgagggcgacgaggccatcaagggcctgcccggcctgcccggccccaagggcttcgccggcatcaacggcgagcccggcagaaagggcgacagaggcgaccccggccagcacggcctgcccggcttccccggcctgaagggcgtgcccggcaacatcggcgcccccggccccaagggcgccaagggcgacagcagaaccatcaccaccaagggcgagagaggccagcccggcgtgcccggcgtgcccggcatgaagggcgacgacggcagccccggcagagacggcctggacggcttccccggcctgcccggcccccccggcgacggcatcaagggcccccccggcgaccccggctaccccggcatccccggcaccaagggcacccccggcgagatgggcccccccggcctgggcctgcccggcctgaagggccagagaggcttccccggcgacgccggcctgcccggcccccccggcttcctgggcccccccggccccgccggcacccccggccagatcgactgcgacaccgacgtgaagagagccgtgggcggcgacagacaggaggccatccagcccggctgcatcggcggccccaagggcctgcccggcctgcccggcccccccggccccaccggcgccaagggcctgagaggcatccccggcttcgccggcgccgacggcggccccggccccagaggcctgcccggcgacgccggcagagagggcttccccggcccccccggcttcatcggccccagaggcagcaagggcgccgtgggcctgcccggccccgacggcagccccggccccatcggcctgcccggccccgacggcccccccggcgagagaggcctgcccggcgaggtgctgggcgcccagcccggccccagaggcgacgccggcgtgcccggccagcccggcctgaagggcctgcccggcgacagaggcccccccggcttcagaggcagccagggcatgcccggcatgcccggcctgaagggccagcccggcctgcccggccccagcggccagcccggcctgtacggcccccccggcctgcacggcttccccggcgcccccggccaggagggccccctgggcctgcccggcatccccggcagagagggcctgcccggcgacagaggcgaccccggcgacaccggcgcccccggccccgtgggcatgaagggcctgagcggcgacagaggcgacgccggcttcaccggcgagcagggccaccccggcagccccggcttcaagggcatcgacggcatgcccggcacccccggcctgaagggcgacagaggcagccccggcatggacggcttccagggcatgcccggcctgaagggcagacccggcttccccggcagcaagggcgaggccggcttcttcggcatccccggcctgaagggcctggccggcgagcccggcttcaagggcagcagaggcgaccccggcccccccggccccccccccgtgatcctgcccggcatgaaggacatcaagggcgagaagggcgacgagggccccatgggcctgaagggctacctgggcgccaagggcatccagggcatgcccggcatccccggcctgagcggcatccccggcctgcccggcagacccggccacatcaagggcgtgaagggcgacatcggcgtgcccggcatccccggcctgcccggcttccccggcgtggccggcccccccggcatcaccggcttccccggcttcatcggcagcagaggcgacaagggcgcccccggcagagccggcctgtacggcgagatcggcgccaccggcgacttcggcgacatcggcgacaccatcaacctgcccggcagacccggcctgaagggcgagagaggcaccaccggcatccccggcctgaagggcttcttcggcgagaagggcaccgagggcgacatcggcttccccggcatcaccggcgtgaccggcgtgcagggcccccccggcctgaagggccagaccggcttccccggcctgaccggcccccccggcagccagggcgagctgggcagaatcggcctgcccggcggcaagggcgacgacggctggcccggcgcccccggcctgcccggcttccccggcctgagaggcatcagaggcctgcacggcctgcccggcaccaagggcttccccggcagccccggcagcgacatccacggcgaccccggcttccccggcccccccggcgagagaggcgaccccggcgaggccaacaccctgcccggccccgtgggcgtgcccggccagaagggcgaccagggcgcccccggcgagagaggcccccccggcagccccggcctgcagggcttccccggcatcaccccccccagcaacatcagcggcgcccccggcgacaagggcgcccccggcatcttcggcctgaagggctacagaggcccccccggcccccccggcagcgccgccctgcccggcagcaagggcgacaccggcaaccccggcgcccccggcacccccggcaccaagggctgggccggcgacagcggcccccagggcagacccggcgtgttcggcctgcccggcgagaagggccccagaggcgagcagggcttcatgggcaacaccggccccaccggcgccgtgggcgacagaggccccaagggccccaagggcgaccccggcttccccggcgcccccggcaccgtgggcgcccccggcatcgccggcatcccccagaagatcgccgtgcagcccggcaccgtgggcccccagggcagaagaggcccccccggcgcccccggcgagatgggcccccagggcccccccggcgagcccggcttcagaggcgcccccggcaaggccggcccccagggcagaggcggcgtgagcgccgtgcccggcttcagaggcgacgagggccccatcggccaccagggccccatcggccaggagggcgcccccggcagacccggcagccccggcctgcccggcatgcccggcagaagcgtgagcatcggctacctgctggtgaagcacagccagaccgaccaggagcccatgtgccccgtgggcatgaacaagctgtggagcggctacagcctgctgtacttcgagggccaggagaaggcccacaaccaggacctgggcctggccggcagctgcctggccagattcagcaccatgcccttcctgtactgcaaccccggcgacgtgtgctactacgccagcagaaacgacaagagctactggctgagcaccaccgcccccctgcccatgatgcccgtggccgaggacgagatcaagccctacatcagcagatgcagcgtgtgcgaggcccccgccatcgccatcgccgtgcacagccaggacgtgagcatcccccactgccccgccggctggagaagcctgtggatcggctacagcttcctgatgcacaccgccgccggcgacgagggcggcggccagagcctggtgagccccggcagctgcctggaggacttcagagccacccccttcatcgagtgcaacggcggcagaggcacctgccactactacgccaacaagtacagcttctggctgaccaccatccccgagcagagcttccagggcagccccagcgccgacaccctgaaggccggcctgatcagaacccacatcagcagatgccaggtgtgcatgaagaacctgtag

SEQ ID NO: 10136 - DNA, 5139 bp, synthetic construct
  misc_feature 1..5139: note = Description of Artificial Sequence: Synthetic coding sequence
  source 1..5139: mol_type = other DNA
atgggcagagaccagagagccgtggccggccccgccctgagaagatggctgctgctgggcaccgtgaccgtgggcttcctggcccagagcgtgctggccggcgtgaagaagttcgacgtgccctgcggcggcagagactgcagcggcggctgccagtgctaccccgagaagggcggcagaggccagcccggccccgtgggcccccagggctacaacggcccccccggcctgcagggcttccccggcctgcagggcagaaagggcgacaagggcgagagaggcgcccccggcgtgaccggccccaagggcgacgtgggcgccagaggcgtgagcggcttccccggcgccgacggcatccccggccaccccggccagggcggccccagaggcagacccggctacgacggctgcaacggcacccagggcgacagcggcccccagggcccccccggcagcgagggcttcaccggcccccccggcccccagggccccaagggccagaagggcgagccctacgccctgcccaaggaggagagagacagatacagaggcgagcccggcgagcccggcctggtgggcttccagggcccccccggcagacccggccacgtgggccagatgggccccgtgggcgcccccggcagacccggcccccccggcccccccggccccaagggccagcagggcaacagaggcctgggcttctacggcgtgaagggcgagaagggcgacgtgggccagcccggccccaacggcatccccagcgacaccctgcaccccatcatcgcccccaccggcgtgaccttccaccccgaccagtacaagggcgagaagggcagcgagggcgagcccggcatcagaggcatcagcctgaagggcgaggagggcatcatgggcttccccggcctgagaggctaccccggcctgagcggcgagaagggcagccccggccagaagggcagcagaggcctggacggctaccagggccccgacggccccagaggccccaagggcgaggccggcgaccccggcccccccggcctgcccgcctacagcccccaccccagcctggccaagggcgccagaggcgaccccggcttccccggcgcccagggcgagcccggcagccagggcgagcccggcgaccccggcctgcccggcccccccggcctgagcatcggcgacggcgaccagagaagaggcctgcccggcgagatgggccccaagggcttcatcggcgaccccggcatccccgccctgtacggcggcccccccggccccgacggcaagagaggcccccccggcccccccggcctgcccggcccccccggccccgacggcttcctgttcggcctgaagggcgccaagggcagagccggcttccccggcctgcccggcagccccggcgccagaggccccaagggctggaagggcgacgccggcgagtgcagatgcaccgagggcgacgaggccatcaagggcctgcccggcctgcccggccccaagggcttcgccggcatcaacggcgagcccggcagaaagggcgacagaggcgaccccggccagcacggcctgcccggcttccccggcctgaagggcgtgcccggcaacatcggcgcccccggccccaagggcgccaagggcgacagcagaaccatcaccaccaagggcgagagaggccagcccggcgtgcccggcgtgcccggcatgaagggcgacgacggcagccccggcagagacggcctggacggcttccccggcctgcccggcccccccggcgacggcatcaagggcccccccggcgaccccggctaccccggcatccccggcaccaagggcacccccggcgagatgggcccccccggcctgggcctgcccggcctgaagggccagagaggcttccccggcgacgccggcctgcccggcccccccggcttcctgggcccccccggccccgccggcacccccggccagatcgactgcgacaccgacgtgaagagagccgtgggcggcgacagacaggaggccatccagcccggctgcatcggcggccccaagggcctgcccggcctgcccggcccccccggccccaccggcgccaagggcctgagaggcatccccggcttcgccggcgccgacggcggccccggccccagaggcctgcccggcgacgccggcagagagggcttccccggcccccccggcttcatcggccccagaggcagcaagggcgccgtgggcctgcccggccccgacggcagccccggccccatcggcctgcccggccccgacggcccccccggcgagagaggcctgcccggcgaggtgctgggcgcccagcccggccccagaggcgacgccggcgtgcccggccagcccggcctgaagggcctgcccggcgacagaggcccccccggcttcagaggcagccagggcatgcccggcatgcccggcctgaagggccagcccggcctgcccggccccagcggccagcccggcctgtacggcccccccggcctgcacggcttccccggcgcccccggccaggagggccccctgggcctgcccggcatccccggcagagagggcctgcccggcgacagaggcgaccccggcgacaccggcgcccccggccccgtgggcatgaagggcctgagcggcgacagaggcgacgccggcttcaccggcgagcagggccaccccggcagccccggcttcaagggcatcgacggcatgcccggcacccccggcctgaagggcgacagaggcagccccggcatggacggcttccagggcatgcccggcctgaagggcagacccggcttccccggcagcaagggcgaggccggcttcttcggcatccccggcctgaagggcctggccggcgagcccggcttcaagggcagcagaggcgaccccggcccccccggccccccccccgtgatcctgcccggcatgaaggacatcaagggcgagaagggcgacgagggccccatgggcctgaagggctacctgggcgccaagggcatccagggcatgcccggcatccccggcctgagcggcatccccggcctgcccggcagacccggccacatcaagggcgtgaagggcgacatcggcgtgcccggcatccccggcctgcccggcttccccggcgtggccggcccccccggcatcaccggcttccccggcttcatcggcagcagaggcgacaagggcgcccccggcagagccggcctgtacggcgagatcggcgccaccggcgacttcggcgacatcggcgacaccatcaacctgcccggcagacccggcctgaagggcgagagaggcaccaccggcatccccggcctgaagggcttcttcggcgagaagggcaccgagggcgacatcggcttccccggcatcaccggcgtgaccggcgtgcagggcccccccggcctgaagggccagaccggcttccccggcctgaccggcccccccggcagccagggcgagctgggcagaatcggcctgcccggcggcaagggcgacgacggctggcccggcgcccccggcctgcccggcttccccggcctgagaggcatcagaggcctgcacggcctgcccggcaccaagggcttccccggcagccccggcagcgacatccacggcgaccccggcttccccggcccccccggcgagagaggcgaccccggcgaggccaacaccctgcccggccccgtgggcgtgcccggccagaagggcgaccagggcgcccccggcgagagaggcccccccggcagccccggcctgcagggcttccccggcatcaccccccccagcaacatcagcggcgcccccggcgacaagggcgcccccggcatcttcggcctgaagggctacagaggcccccccggcccccccggcagcgccgccctgcccggcagcaagggcgacaccggcaaccccggcgcccccggcacccccggcaccaagggctgggccggcgacagcggcccccagggcagacccggcgtgttcggcctgcccggcgagaagggccccagaggcgagcagggcttcatgggcaacaccggccccaccggcgccgtgggcgacagaggccccaagggccccaagggcgaccccggcttccccggcgcccccggcaccgtgggcgcccccggcatcgccggcatcccccagaagatcgccgtgcagcccggcaccgtgggcccccagggcagaagaggcccccccggcgcccccggcgagatgggcccccagggcccccccggcgagcccggcttcagaggcgcccccggcaaggccggcccccagggcagaggcggcgtgagcgccgtgcccggcttcagaggcgacgagggccccatcggccaccagggccccatcggccaggagggcgcccccggcagacccggcagccccggcctgcccggcatgcccggcagaagcgtgagcatcggctacctgctggtgaagcacagccagaccgaccaggagcccatgtgccccgtgggcatgaacaagctgtggagcggctacagcctgctgtacttcgagggccaggagaaggcccacaaccaggacctgggcctggccggcagctgcctggccagattcagcaccatgcccttcctgtactgcaaccccggcgacgtgtgctactacgccagcagaaacgacaagagctactggctgagcaccaccgcccccctgcccatgatgcccgtggccgaggacgagatcaagccctacatcagcagatgcagcgtgtgcgaggcccccgccatcgccatcgccgtgcacagccaggacgtgagcatcccccactgccccgccggctggagaagcctgtggatcggctacagcttcctgatgcacaccgccgccggcgacgagggcggcggccagagcctggtgagccccggcagctgcctggaggacttcagagccacccccttcatcgagtgcaacggcggcagaggcacctgccactactacgccaacaagtacagcttctggctgaccaccatccccgagcagagcttccagggcagccccagcgccgacaccctgaaggccggcctgatcagaacccacatcagcagatgccaggtgtgcatgaagaacctgtag

SEQ ID NO: 10137 - DNA, 318 bp, synthetic construct
  misc_feature 1..318: note = Description of Artificial Sequence: Synthetic coding sequence
  source 1..318: mol_type = other DNA
atgggcagagaccagagagccgtggccggccccgccctgagaagatggctgctgctgggcaccgtgaccgtgggcttcctggcccagagcgtgctggccggcgtgaagaagttcgacgtgccctgcggcggcagagactgcagcggcggctgccagtgctaccccgagaagggcggcagaggccagcccggccccgtgggcccccagggctacaacggcccccccggcctgcagggcttccccggcctgcagggcagaaagggcgacaagggcgagagaggcgcccccggcgtgaccggccccaagggcgacgtgtag

SEQ ID NO: 10138 - DNA, 4497 bp, synthetic construct
  misc_feature 1..4497: note = Description of Artificial Sequence: Synthetic coding sequence
  source 1..4497: mol_type = other DNA
atgagcgccagaaccgcccccagaccccaggtgctgctgctgcccctgctgctggtgctgctggccgccgcccccgccgccagcaagggctgcgtgtgcaaggacaagggccagtgcttctgcgacggcgccaagggcgagaagggcgagaagggcttccccggcccccccggcagccccggccagaagggcttcaccggccccgagggcctgcccggcccccagggccccaagagcttcagagccatccccagctacagcggcggcaagagcctgcagggcatcagcggcctgcccggcttcagcggcagccccggcctgcccggcacccccggcaacaccggcccctacggcctggtgggcgtgcccggctgcagcggcagcaagggcgagcagggcttccccggcctgcccggcaccctgggctaccccggcatccccggcatccacaacctgaagatcttcaagggcgcccccgccaaggaggaggacatcgagctggacgccaagggcgaccccggcctgcccggcgcccccggcccccagggcctgcccggcccccccggcttccccggccccgtgggcccccccggcccccccggcttcttcggcttccccggcgccatgggccccagaggccccaagagcttcgtgctgagcagcagaatcagcaccaagggcgagaagggcgtgaagggcctgaccggcccccccggcccccccggcaccgtgatcgtgaccctgaccggccccgacaacagaaccgacctgaagggcgagaagggcgacaagggcgccatgggcgagcccggcccccccggccccagcggcctgcccggcgagagctacggcagcgagaagggcgcccccggcgaccccggcctgcagggcaagcccggcaaggacggcgtgcccggcttccccggcagcgagggcgtgaagggcaacagaggcttccccggcctgatgggcgaggacggcatcaaggaggagaagagagacgtggccatcgtgagcttcagcagcaagaccgagtactacgacacctaccaggagaagggcgacgagggcacccccggcccccccggccccagaggcgccagaggcccccagggcaagaacaagttcagatgcatccccggcagccagggcagcagcagacccggcctgagaggcgcccccggctggcccggcctgaagggcagcaagggcgagagaggcagacccggcaaggacgccatgggcacccccggcagccccggctgcgccggcagccccggcctgcccggcagccccggcccccccggcccccccggcgacatcgtgttcagaaagggcccccccggcgaccacggcctgcccggctacctgggcagccccggcatccccggcgtggacggccccaagggcgagcccggcctgctgtgcacccagtgcccctacatccccggcccccccggcctgcccggcctgcccggcctgcacggcgtgaagggcatccccggcagacagggcgccgccggcctgaagggcagccccggcagccccggcaacaccggcctgcccggcttccccggcttccccggcgcccagggcgaccccggcctgaagggcgagaagggcgagaccctgcagcccgagggccaggtgggcgtgcccggcgaccccggcctgagaggccagcccggcagaaagggcctggacggcatccccggcacccccggcgtgaagggcctgcccggccccaagggcgagctggccctgagcggcgagaagggcgaccagggcccccccggcgaccccggcagccccggcagccccggccccgccggccccgccggcccccccggctacggcccccagggcgagcccggcctgcagggcacccagggcgtgcccggcgcccccggcccccccggcgaggccggccccagaggcgagctgagcgtgagcacccccgtgcccggcccccccggcccccccggcccccccggccaccccggcccccagggcccccccggcatccccggcagcctgggcaagtgcggcgaccccggcctgcccggccccgacggcgagcccggcatccccggcatcggcttccccggcccccccggccccaagggcgaccagggcttccccggcaccaagggcagcctgggctgccccggcaagatgggcgagcccggcctgcccggcaagcccggcctgcccggcgccaagggcgagcccgccgtggccatgcccggcggccccggcacccccggcttccccggcgagagaggcaacagcggcgagcacggcgagatcggcctgcccggcctgcccggcctgcccggcacccccggcaacgagggcctggacggccccagaggcgaccccggccagcccggcccccccggcgagcagggcccccccggcagatgcatcgagggccccagaggcgcccagggcctgcccggcctgaacggcctgaagggccagcagggcagaagaggcaagaccggccccaagggcgaccccggcatccccggcctggacagaagcggcttccccggcgagaccggcagccccggcatccccggccaccagggcgagatgggccccctgggccagagaggctaccccggcaaccccggcatcctgggcccccccggcgaggacggcgtgatcggcatgatgggcttccccggcgccatcggcccccccggcccccccggcaaccccggcacccccggccagagaggcagccccggcatccccggcgtgaagggccagagaggcacccccggcgccaagggcgagcagggcgacaagggcaaccccggccccagcgagatcagccacgtgatcggcgacaagggcgagcccggcctgaagggcttcgccggcaaccccggcgagaagggcaacagaggcgtgcccggcatgcccggcctgaagggcctgaagggcctgcccggccccgccggcccccccggccccagaggcgacctgggcagcaccggcaaccccggcgagcccggcctgagaggcatccccggcagcatgggcaacatgggcatgcccggcagcaagggcaagagaggcaccctgggcttccccggcagagccggcagacccggcctgcccggcatccacggcctgcagggcgacaagggcgagcccggctacagcgagggcaccagacccggcccccccggccccaccggcgaccccggcctgcccggcgacatgggcaagaagggcgagatgggccagcccggcccccccggccacctgggccccgccggccccgagggcgcccccggcagccccggcagccccggcctgcccggcaagcccggcccccacggcgacctgggcttcaagggcatcaagggcctgctgggcccccccggcatcagaggcccccccggcctgcccggcttccccggcagccccggccccatgggcatcagaggcgaccagggcagagacggcatccccggccccgccggcgagaagggcgagaccggcctgctgagagccccccccggccccagaggcaaccccggcgcccagggcgccaagggcgacagaggcgcccccggcttccccggcctgcccggcagaaagggcgccatgggcgacgccggccccagaggccccaccggcatcgagggcttccccggcccccccggcctgcccggcgccatcatccccggccagaccggcaacagaggcccccccggcagcagaggcagccccggcgcccccggcccccccggcccccccggcagccacgtgatcggcatcaagggcgacaagggcagcatgggccaccccggccccaagggcccccccggcaccgccggcgacatgggcccccccggcagactgggcgcccccggcacccccggcctgcccggccccagaggcgaccccggcttccagggcttccccggcgtgaagggcgagaagggcaaccccggcttcctgggcagcatcggcccccccggccccatcggccccaagggcccccccggcgtgagaggcgaccccggcaccctgaagatcatcagcctgcccggcagccccggcccccccggcacccccggcgagcccggcatgcagggcgagcccggcccccccggcccccccggcaacctgggcccctgcggccccagaggcaagcccggcaaggacggcaagcccggcacccccggccccgccggcgagaagggcaacaagggcagcaagggcgagcccggccccgccggcagcgacggcctgcccggcctgaagggcaagagaggcgacagcggcagccccgccacctggaccaccagaggcttcgtgttcaccagacacagccagaccaccgccatccccagctgccccgagggcaccgtgcccctgtacagcggcttcagcttcctgttcgtgcagggcaaccagagagcccacggccaggacctggacgccctgttcgtgaaggtgctgagaagcccctag

SEQ ID NO: 10139 - DNA, 4914 bp, synthetic construct
  misc_feature 1..4914: note = Description of Artificial Sequence: Synthetic coding sequence
  source 1..4914: mol_type = other DNA
atgagcgccagaaccgcccccagaccccaggtgctgctgctgcccctgctgctggtgctgctggccgccgcccccgccgccagcaagggctgcgtgtgcaaggacaagggccagtgcttctgcgacggcgccaagggcgagaagggcgagaagggcttccccggcccccccggcagccccggccagaagggcttcaccggccccgagggcctgcccggcccccagggccccaagagcttcagagccatccccagctacagcggcggcaagagcctgcagggcatcagcggcctgcccggcttcagcggcagccccggcctgcccggcacccccggcaacaccggcccctacggcctggtgggcgtgcccggctgcagcggcagcaagggcgagcagggcttccccggcctgcccggcaccctgggctaccccggcatccccggcatccacaacctgaagatcttcaagggcgcccccgccaaggaggaggacatcgagctggacgccaagggcgaccccggcctgcccggcgcccccggcccccagggcctgcccggcccccccggcttccccggccccgtgggcccccccggcccccccggcttcttcggcttccccggcgccatgggccccagaggccccaagagcttcgtgctgagcagcagaatcagcaccaagggcgagaagggcgtgaagggcctgaccggcccccccggcccccccggcaccgtgatcgtgaccctgaccggccccgacaacagaaccgacctgaagggcgagaagggcgacaagggcgccatgggcgagcccggcccccccggccccagcggcctgcccggcgagagctacggcagcgagaagggcgcccccggcgaccccggcctgcagggcaagcccggcaaggacggcgtgcccggcttccccggcagcgagggcgtgaagggcaacagaggcttccccggcctgatgggcgaggacggcatcaaggaggagaagagagacgtggccatcgtgagcttcagcagcaagaccgagtactacgacacctaccaggagaagggcgacgagggcacccccggcccccccggccccagaggcgccagaggcccccagggcaagaacaagttcagatgcatccccggcagccagggcagcagcagacccggcctgagaggcgcccccggctggcccggcctgaagggcagcaagggcgagagaggcagacccggcaaggacgccatgggcacccccggcagccccggctgcgccggcagccccggcctgcccggcagccccggcccccccggcccccccggcgacatcgtgttcagaaagggcccccccggcgaccacggcctgcccggctacctgggcagccccggcatccccggcgtggacggccccaagggcgagcccggcctgctgtgcacccagtgcccctacatccccggcccccccggcctgcccggcctgcccggcctgcacggcgtgaagggcatccccggcagacagggcgccgccggcctgaagggcagccccggcagccccggcaacaccggcctgcccggcttccccggcttccccggcgcccagggcgaccccggcctgaagggcgagaagggcgagaccctgcagcccgagggccaggtgggcgtgcccggcgaccccggcctgagaggccagcccggcagaaagggcctggacggcatccccggcacccccggcgtgaagggcctgcccggccccaagggcgagctggccctgagcggcgagaagggcgaccagggcccccccggcgaccccggcagccccggcagccccggccccgccggccccgccggcccccccggctacggcccccagggcgagcccggcctgcagggcacccagggcgtgcccggcgcccccggcccccccggcgaggccggccccagaggcgagctgagcgtgagcacccccgtgcccggcccccccggcccccccggcccccccggccaccccggcccccagggcccccccggcatccccggcagcctgggcaagtgcggcgaccccggcctgcccggccccgacggcgagcccggcatccccggcatcggcttccccggcccccccggccccaagggcgaccagggcttccccggcaccaagggcagcctgggctgccccggcaagatgggcgagcccggcctgcccggcaagcccggcctgcccggcgccaagggcgagcccgccgtggccatgcccggcggccccggcacccccggcttccccggcgagagaggcaacagcggcgagcacggcgagatcggcctgcccggcctgcccggcctgcccggcacccccggcaacgagggcctggacggccccagaggcgaccccggccagcccggcccccccggcgagcagggcccccccggcagatgcatcgagggccccagaggcgcccagggcctgcccggcctgaacggcctgaagggccagcagggcagaagaggcaagaccggccccaagggcgaccccggcatccccggcctggacagaagcggcttccccggcgagaccggcagccccggcatccccggccaccagggcgagatgggccccctgggccagagaggctaccccggcaaccccggcatcctgggcccccccggcgaggacggcgtgatcggcatgatgggcttccccggcgccatcggcccccccggcccccccggcaaccccggcacccccggccagagaggcagccccggcatccccggcgtgaagggccagagaggcacccccggcgccaagggcgagcagggcgacaagggcaaccccggccccagcgagatcagccacgtgatcggcgacaagggcgagcccggcctgaagggcttcgccggcaaccccggcgagaagggcaacagaggcgtgcccggcatgcccggcctgaagggcctgaagggcctgcccggccccgccggcccccccggccccagaggcgacctgggcagcaccggcaaccccggcgagcccggcctgagaggcatccccggcagcatgggcaacatgggcatgcccggcagcaagggcaagagaggcaccctgggcttccccggcagagccggcagacccggcctgcccggcatccacggcctgcagggcgacaagggcgagcccggctacagcgagggcaccagacccggcccccccggccccaccggcgaccccggcctgcccggcgacatgggcaagaagggcgagatgggccagcccggcccccccggccacctgggccccgccggccccgagggcgcccccggcagccccggcagccccggcctgcccggcaagcccggcccccacggcgacctgggcttcaagggcatcaagggcctgctgggcccccccggcatcagaggcccccccggcctgcccggcttccccggcagccccggccccatgggcatcagaggcgaccagggcagagacggcatccccggccccgccggcgagaagggcgagaccggcctgctgagagccccccccggccccagaggcaaccccggcgcccagggcgccaagggcgacagaggcgcccccggcttccccggcctgcccggcagaaagggcgccatgggcgacgccggccccagaggccccaccggcatcgagggcttccccggcccccccggcctgcccggcgccatcatccccggccagaccggcaacagaggcccccccggcagcagaggcagccccggcgcccccggcccccccggcccccccggcagccacgtgatcggcatcaagggcgacaagggcagcatgggccaccccggccccaagggcccccccggcaccgccggcgacatgggcccccccggcagactgggcgcccccggcacccccggcctgcccggccccagaggcgaccccggcttccagggcttccccggcgtgaagggcgagaagggcaaccccggcttcctgggcagcatcggcccccccggccccatcggccccaagggcccccccggcgtgagaggcgaccccggcaccctgaagatcatcagcctgcccggcagccccggcccccccggcacccccggcgagcccggcatgcagggcgagcccggcccccccggcccccccggcaacctgggcccctgcggccccagaggcaagcccggcaaggacggcaagcccggcacccccggccccgccggcgagaagggcaacaagggcagcaagggcgagcccggccccgccggcagcgacggcctgcccggcctgaagggcaagagaggcgacagcggcagccccgccacctggaccaccagaggcttcgtgttcaccagacacagccagaccaccgccatccccagctgccccgagggcaccgtgcccctgtacagcggcttcagcttcctgttcgtgcagggcaaccagagagcccacggccaggacctgggcaccctgggcagctgcctgcagagattcaccaccatgcccttcctgttctgcaacgtgaacgacgtgtgcaacttcgccagcagaaacgactacagctactggctgagcacccccgccctgatgcccatgaacatggcccccatcaccggcagagccctggagccctacatcagcagatgcaccgtgtgcgagggccccgccatcgccatcgccgtgcacagccagaccaccgacatccccccctgcccccacggctggatcagcctgtggaagggcttcagcttcatcatgaaggcctacagcatcaactgcgagagctggggcatcagaaagaacaacaagagcctgagcggcgtgcacgaggagaagaccctgaagctgaagaagaccgccgagctgctgttcttcatcctgaagaacaaggtgatgaccgagcacgccgtgatctag

SEQ ID NO: 10140 - DNA, 4485 bp, synthetic construct
  misc_feature 1..4485: note = Description of Artificial Sequence: Synthetic coding sequence
  source 1..4485: mol_type = other DNA
atgagcgccagaaccgcccccagaccccaggtgctgctgctgcccctgctgctggtgctgctggccgccgcccccgccgccagcaagggctgcgtgtgcaaggacaagggccagtgcttctgcgacggcgccaagggcgagaagggcgagaagggcttccccggcccccccggcagccccggccagaagggcttcaccggccccgagggcctgcccggcccccagggccccaagagcttcagagccatccccagctacagcggcggcaagagcctgcagggcatcagcggcctgcccggcttcagcggcagccccggcctgcccggcacccccggcaacaccggcccctacggcctggtgggcgtgcccggctgcagcggcagcaagggcgagcagggcttccccggcctgcccggcaccctgggctaccccggcatccccggcatccacaacctgaagatcttcaagggcgcccccgccaaggaggaggacatcgagctggacgccaagggcgaccccggcctgcccggcgcccccggcccccagggcctgcccggcccccccggcttccccggccccgtgggcccccccggcccccccggcttcttcggcttccccggcgccatgggccccagaggccccaagagcttcgtgctgagcagcagaatcagcaccaagggcgagaagggcgtgaagggcctgaccggcccccccggcccccccggcaccgtgatcgtgaccctgaccggccccgacaacagaaccgacctgaagggcgagaagggcgacaagggcgccatgggcgagcccggcccccccggccccagcggcctgcccggcgagagctacggcagcgagaagggcgcccccggcgaccccggcctgcagggcaagcccggcaaggacggcgtgcccggcttccccggcagcgagggcgtgaagggcaacagaggcttccccggcctgatgggcgaggacggcatcaaggaggagaagagagacgtggccatcgtgagcttcagcagcaagaccgagtactacgacacctaccaggagaagggcgacgagggcacccccggcccccccggccccagaggcgccagaggcccccagggcaagaacaagttcagatgcatccccggcagccagggcagcagcagacccggcctgagaggcgcccccggctggcccggcctgaagggcagcaagggcgagagaggcagacccggcaaggacgccatgggcacccccggcagccccggctgcgccggcagccccggcctgcccggcagccccggcccccccggcccccccggcgacatcgtgttcagaaagggcccccccggcgaccacggcctgcccggctacctgggcagccccggcatccccggcgtggacggccccaagggcgagcccggcctgctgtgcacccagtgcccctacatccccggcccccccggcctgcccggcctgcccggcctgcacggcgtgaagggcatccccggcagacagggcgccgccggcctgaagggcagccccggcagccccggcaacaccggcctgcccggcttccccggcttccccggcgcccagggcgaccccggcctgaagggcgagaagggcgagaccctgcagcccgagggccaggtgggcgtgcccggcgaccccggcctgagaggccagcccggcagaaagggcctggacggcatccccggcacccccggcgtgaagggcctgcccggccccaagggcgagctggccctgagcggcgagaagggcgaccagggcccccccggcgaccccggcagccccggcagccccggccccgccggccccgccggcccccccggctacggcccccagggcgagcccggcctgcagggcacccagggcgtgcccggcgcccccggcccccccggcgaggccggccccagaggcgagctgagcgtgagcacccccgtgcccggcccccccggcccccccggcccccccggccaccccggcccccagggcccccccggcatccccggcagcctgggcaagtgcggcgaccccggcctgcccggccccgacggcgagcccggcatccccggcatcggcttccccggcccccccggccccaagggcgaccagggcttccccggcaccaagggcagcctgggctgccccggcaagatgggcgagcccggcctgcccggcaagcccggcctgcccggcgccaagggcgagcccgccgtggccatgcccggcggccccggcacccccggcttccccggcgagagaggcaacagcggcgagcacggcgagatcggcctgcccggcctgcccggcctgcccggcacccccggcaacgagggcctggacggccccagaggcgaccccggccagcccggcccccccggcgagcagggcccccccggcagatgcatcgagggccccagaggcgcccagggcctgcccggcctgaacggcctgaagggccagcagggcagaagaggcaagaccggccccaagggcgaccccggcatccccggcctggacagaagcggcttccccggcgagaccggcagccccggcatccccggccaccagggcgagatgggccccctgggccagagaggctaccccggcaaccccggcatcctgggcccccccggcgaggacggcgtgatcggcatgatgggcttccccggcgccatcggcccccccggcccccccggcaaccccggcacccccggccagagaggcagccccggcatccccggcgtgaagggccagagaggcacccccggcgccaagggcgagcagggcgacaagggcaaccccggccccagcgagatcagccacgtgatcggcgacaagggcgagcccggcctgaagggcttcgccggcaaccccggcgagaagggcaacagaggcgtgcccggcatgcccggcctgaagggcctgaagggcctgcccggccccgccggcccccccggccccagaggcgacctgggcagcaccggcaaccccggcgagcccggcctgagaggcatccccggcagcatgggcaacatgggcatgcccggcagcaagggcaagagaggcaccctgggcttccccggcagagccggcagacccggcctgcccggcatccacggcctgcagggcgacaagggcgagcccggctacagcgagggcaccagacccggcccccccggccccaccggcgaccccggcctgcccggcgacatgggcaagaagggcgagatgggccagcccggcccccccggccacctgggccccgccggccccgagggcgcccccggcagccccggcagccccggcctgcccggcaagcccggcccccacggcgacctgggcttcaagggcatcaagggcctgctgggcccccccggcatcagaggcccccccggcctgcccggcttccccggcagccccggccccatgggcatcagaggcgaccagggcagagacggcatccccggccccgccggcgagaagggcgagaccggcctgctgagagccccccccggccccagaggcaaccccggcgcccagggcgccaagggcgacagaggcgcccccggcttccccggcctgcccggcagaaagggcgccatgggcgacgccggccccagaggccccaccggcatcgagggcttccccggcccccccggcctgcccggcgccatcatccccggccagaccggcaacagaggcccccccggcagcagaggcagccccggcgcccccggcccccccggcccccccggcagccacgtgatcggcatcaagggcgacaagggcagcatgggccaccccggccccaagggcccccccggcaccgccggcgacatgggcccccccggcagactgggcgcccccggcacccccggcctgcccggccccagaggcgaccccggcttccagggcttccccggcgtgaagggcgagaagggcaaccccggcttcctgggcagcatcggcccccccggccccatcggccccaagggcccccccggcgtgagaggcgaccccggcaccctgaagatcatcagcctgcccggcagccccggcccccccggcacccccggcgagcccggcatgcagggcgagcccggcccccccggcccccccggcaacctgggcccctgcggccccagaggcaagcccggcaaggacggcaagcccggcacccccggccccgccggcgagaagggcaacaagggcagcaagggcgagcccggccccgccggcagcgacggcctgcccggcctgaagggcaagagaggcgacagcggcagccccgccacctggaccaccagaggcttcgtgttcaccagacacagccagaccaccgccatccccagctgccccgagggcaccgtgcccctgtacagcggcttcagcttcctgttcgtgcagggcaaccagagagcccacggccaggacctggagagcctgttccaccagctgtag

SEQ ID NO: 10141 - DNA, 4275 bp, synthetic construct
  misc_feature 1..4275: note = Description of Artificial Sequence: Synthetic coding sequence
  source 1..4275: mol_type = other DNA
atgagcgccagaaccgcccccagaccccaggtgctgctgctgcccctgctgctggtgctgctggccgccgcccccgccgccagcaagggctgcgtgtgcaaggacaagggccagtgcttctgcgacggcgccaagggcgagaagggcgagaagggcttccccggcccccccggcagccccggccagaagggcttcaccggccccgagggcctgcccggcccccagggccccaagagcttcagagccatccccagctacagcggcggcaagagcctgcagggcatcagcggcctgcccggcttcagcggcagccccggcctgcccggcacccccggcaacaccggcccctacggcctggtgggcgtgcccggctgcagcggcagcaagggcgagcagggcttccccggcctgcccggcaccctgggctaccccggcatccccggcatccacaacctgaagatcttcaagggcgcccccgccaaggaggaggacatcgagctggacgccaagggcgaccccggcctgcccggcgcccccggcccccagggcctgcccggcccccccggcttccccggccccgtgggcccccccggcccccccggcttcttcggcttccccggcgccatgggccccagaggccccaagagcttcgtgctgagcagcagaatcagcaccaagggcgagaagggcgtgaagggcctgaccggcccccccggcccccccggcaccgtgatcgtgaccctgaccggccccgacaacagaaccgacctgaagggcgagaagggcgacaagggcgccatgggcgagcccggcccccccggccccagcggcctgcccggcgagagctacggcagcgagaagggcgcccccggcgaccccggcctgcagggcaagcccggcaaggacggcgtgcccggcttccccggcagcgagggcgtgaagggcaacagaggcttccccggcctgatgggcgaggacggcatcaaggaggagaagagagacgtggccatcgtgagcttcagcagcaagaccgagtactacgacacctaccaggagaagggcgacgagggcacccccggcccccccggccccagaggcgccagaggcccccagggcaagaacaagttcagatgcatccccggcagccagggcagcagcagacccggcctgagaggcgcccccggctggcccggcctgaagggcagcaagggcgagagaggcagacccggcaaggacgccatgggcacccccggcagccccggctgcgccggcagccccggcctgcccggcagccccggcccccccggcccccccggcgacatcgtgttcagaaagggcccccccggcgaccacggcctgcccggctacctgggcagccccggcatccccggcgtggacggccccaagggcgagcccggcctgctgtgcacccagtgcccctacatccccggcccccccggcctgcccggcctgcccggcctgcacggcgtgaagggcatccccggcagacagggcgccgccggcctgaagggcagccccggcagccccggcaacaccggcctgcccggcttccccggcttccccggcgcccagggcgaccccggcctgaagggcgagaagggcgagaccctgcagcccgagggccaggtgggcgtgcccggcgaccccggcctgagaggccagcccggcagaaagggcctggacggcatccccggcacccccggcgtgaagggcctgcccggccccaagggcgagctggccctgagcggcgagaagggcgaccagggcccccccggcgaccccggcagccccggcagccccggccccgccggccccgccggcccccccggctacggcccccagggcgagcccggcctgcagggcacccagggcgtgcccggcgcccccggcccccccggcgaggccggccccagaggcgagctgagcgtgagcacccccgtgcccggcccccccggcccccccggcccccccggccaccccggcccccagggcccccccggcatccccggcagcctgggcaagtgcggcgaccccggcctgcccggccccgacggcgagcccggcatccccggcatcggcttccccggcccccccggccccaagggcgaccagggcttccccggcaccaagggcagcctgggctgccccggcaagatgggcgagcccggcctgcccggcaagcccggcctgcccggcgccaagggcgagcccgccgtggccatgcccggcggccccggcacccccggcttccccggcgagagaggcaacagcggcgagcacggcgagatcggcctgcccggcctgcccggcctgcccggcacccccggcaacgagggcctggacggccccagaggcgaccccggccagcccggcccccccggcgagcagggcccccccggcagatgcatcgagggccccagaggcgcccagggcctgcccggcctgaacggcctgaagggccagcagggcagaagaggcaagaccggccccaagggcgaccccggcatccccggcctggacagaagcggcttccccggcgagaccggcagccccggcatccccggccaccagggcgagatgggccccctgggccagagaggctaccccggcaaccccggcatcctgggcccccccggcgaggacggcgtgatcggcatgatgggcttccccggcgccatcggcccccccggcccccccggcaaccccggcacccccggccagagaggcagccccggcatccccggcgtgaagggccagagaggcacccccggcgccaagggcgagcagggcgacaagggcaaccccggccccagcgagatcagccacgtgatcggcgacaagggcgagcccggcctgaagggcttcgccggcaaccccggcgagaagggcaacagaggcgtgcccggcatgcccggcctgaagggcctgaagggcctgcccggccccgccggcccccccggccccagaggcgacctgggcagcaccggcaaccccggcgagcccggcctgagaggcatccccggcagcatgggcaacatgggcatgcccggcagcaagggcaagagaggcaccctgggcttccccggcagagccggcagacccggcctgcccggcatccacggcctgcagggcgacaagggcgagcccggctacagcgagggcaccagacccggcccccccggccccaccggcgaccccggcctgcccggcgacatgggcaagaagggcgagatgggccagcccggcccccccggccacctgggccccgccggccccgagggcgcccccggcagccccggcagccccggcctgcccggcaagcccggcccccacggcgacctgggcttcaagggcatcaagggcctgctgggcccccccggcatcagaggcccccccggcctgcccggcttccccggcagccccggccccatgggcatcagaggcgaccagggcagagacggcatccccggccccgccggcgagaagggcgagaccggcctgctgagagccccccccggccccagaggcaaccccggcgcccagggcgccaagggcgacagaggcgcccccggcttccccggcctgcccggcagaaagggcgccatgggcgacgccggccccagaggccccaccggcatcgagggcttccccggcccccccggcctgcccggcgccatcatccccggccagaccggcaacagaggcccccccggcagcagaggcagccccggcgcccccggcccccccggcccccccggcagccacgtgatcggcatcaagggcgacaagggcagcatgggccaccccggccccaagggcccccccggcaccgccggcgacatgggcccccccggcagactgggcgcccccggcacccccggcctgcccggccccagaggcgaccccggcttccagggcttccccggcgtgaagggcgagaagggcaaccccggcttcctgggcagcatcggcccccccggccccatcggccccaagggcccccccggcgtgagaggcgaccccggcaccctgaagatcatcagcctgcccggcagccccggcccccccggcacccccggcgagcccggcatgcagggcgagcccggcccccccggcccccccggcaacctgggcccctgcggccccagaggcaagcccggcaaggacggcaagcccggcacccccggccccgccggcgagaagggcaacaagggcagcaagggcgagcccgagagcctgttccaccagctgtag

SEQ ID NO: 10142 - DNA, 5013 bp, synthetic construct
  misc_feature 1..5013: note = Description of Artificial Sequence: Synthetic coding sequence
  source 1..5013: mol_type = other DNA
atgagcgccagaaccgcccccagaccccaggtgctgctgctgcccctgctgctggtgctgctggccgccgcccccgccgccagcaagggctgcgtgtgcaaggacaagggccagtgcttctgcgacggcgccaagggcgagaagggcgagaagggcttccccggcccccccggcagccccggccagaagggcttcaccggccccgagggcctgcccggcccccagggccccaagggcttccccggcctgcccggcctgaccggcagcaagggcgtgagaggcatcagcggcctgcccggcttcagcggcagccccggcctgcccggcacccccggcaacaccggcccctacggcctggtgggcgtgcccggctgcagcggcagcaagggcgagcagggcttccccggcctgcccggcaccctgggctaccccggcatccccggcgccgccggcctgaagggccagaagggcgcccccgccaaggaggaggacatcgagctggacgccaagggcgaccccggcctgcccggcgcccccggcccccagggcctgcccggcccccccggcttccccggccccgtgggcccccccggcccccccggcttcttcggcttccccggcgccatgggccccagaggccccaagggccacatgggcgagagagtgatcggccacaagggcgagagaggcgtgaagggcctgaccggcccccccggcccccccggcaccgtgatcgtgaccctgaccggccccgacaacagaaccgacctgaagggcgagaagggcgacaagggcgccatgggcgagcccggcccccccggccccagcggcctgcccggcgagagctacggcagcgagaagggcgcccccggcgaccccggcctgcagggcaagcccggcaaggacggcgtgcccggcttccccggcagcgagggcgtgaagggcaacagaggcttccccggcctgatgggcgaggacggcatcaagggccagaagggcgacatcggcccccccggcttcagaggccccaccgagtactacgacacctaccaggagaagggcgacgagggcacccccggcccccccggccccagaggcgccagaggcccccagggccccagcggcccccccggcgtgcccggcagccccggcagcagcagacccggcctgagaggcgcccccggctggcccggcctgaagggcagcaagggcgagagaggcagacccggcaaggacgccatgggcacccccggcagccccggctgcgccggcagccccggcctgcccggcagccccggcccccccggcccccccggcgacatcgtgttcagaaagggcccccccggcgaccacggcctgcccggctacctgggcagccccggcatccccggcgtggacggccccaagggcgagcccggcctgctgtgcacccagtgcccctacatccccggcccccccggcctgcccggcctgcccggcctgcacggcgtgaagggcatccccggcagacagggcgccgccggcctgaagggcagccccggcagccccggcaacaccggcctgcccggcttccccggcttccccggcgcccagggcgaccccggcctgaagggcgagaagggcgagaccctgcagcccgagggccaggtgggcgtgcccggcgaccccggcctgagaggccagcccggcagaaagggcctggacggcatccccggcacccccggcgtgaagggcctgcccggccccaagggcgagctggccctgagcggcgagaagggcgaccagggcccccccggcgaccccggcagccccggcagccccggccccgccggccccgccggcccccccggctacggcccccagggcgagcccggcctgcagggcacccagggcgtgcccggcgcccccggcccccccggcgaggccggccccagaggcgagctgagcgtgagcacccccgtgcccggcccccccggcccccccggcccccccggccaccccggcccccagggcccccccggcatccccggcagcctgggcaagtgcggcgaccccggcctgcccggccccgacggcgagcccggcatccccggcatcggcttccccggcccccccggccccaagggcgaccagggcttccccggcaccaagggcagcctgggctgccccggcaagatgggcgagcccggcctgcccggcaagcccggcctgcccggcgccaagggcgagcccgccgtggccatgcccggcggccccggcacccccggcttccccggcgagagaggcaacagcggcgagcacggcgagatcggcctgcccggcctgcccggcctgcccggcacccccggcaacgagggcctggacggccccagaggcgaccccggccagcccggcccccccggcgagcagggcccccccggcagatgcatcgagggccccagaggcgcccagggcctgcccggcctgaacggcctgaagggccagcagggcagaagaggcaagaccggccccaagggcgaccccggcatccccggcctggacagaagcggcttccccggcgagaccggcagccccggcatccccggccaccagggcgagatgggccccctgggccagagaggctaccccggcaaccccggcatcctgggcccccccggcgaggacggcgtgatcggcatgatgggcttccccggcgccatcggcccccccggcccccccggcaaccccggcacccccggccagagaggcagccccggcatccccggcgtgaagggccagagaggcacccccggcgccaagggcgagcagggcgacaagggcaaccccggccccagcgagatcagccacgtgatcggcgacaagggcgagcccggcctgaagggcttcgccggcaaccccggcgagaagggcaacagaggcgtgcccggcatgcccggcctgaagggcctgaagggcctgcccggccccgccggcccccccggccccagaggcgacctgggcagcaccggcaaccccggcgagcccggcctgagaggcatccccggcagcatgggcaacatgggcatgcccggcagcaagggcaagagaggcaccctgggcttccccggcagagccggcagacccggcctgcccggcatccacggcctgcagggcgacaagggcgagcccggctacagcgagggcaccagacccggcccccccggccccaccggcgaccccggcctgcccggcgacatgggcaagaagggcgagatgggccagcccggcccccccggccacctgggccccgccggccccgagggcgcccccggcagccccggcagccccggcctgcccggcaagcccggcccccacggcgacctgggcttcaagggcatcaagggcctgctgggcccccccggcatcagaggcccccccggcctgcccggcttccccggcagccccggccccatgggcatcagaggcgaccagggcagagacggcatccccggccccgccggcgagaagggcgagaccggcctgctgagagccccccccggccccagaggcaaccccggcgcccagggcgccaagggcgacagaggcgcccccggcttccccggcctgcccggcagaaagggcgccatgggcgacgccggccccagaggccccaccggcatcgagggcttccccggcccccccggcctgcccggcgccatcatccccggccagaccggcaacagaggcccccccggcagcagaggcagccccggcgcccccggcccccccggcccccccggcagccacgtgatcggcatcaagggcgacaagggcagcatgggccaccccggccccaagggcccccccggcaccgccggcgacatgggcccccccggcagactgggcgcccccggcacccccggcctgcccggccccagaggcgaccccggcttccagggcttccccggcgtgaagggcgagaagggcaaccccggcttcctgggcagcatcggcccccccggccccatcggccccaagggcccccccggcgtgagaggcgaccccggcaccctgaagatcatcagcctgcccggcagccccggcccccccggcacccccggcgagcccggcatgcagggcgagcccggcccccccggcccccccggcaacctgggcccctgcggccccagaggcaagcccggcaaggacggcaagcccggcacccccggccccgccggcgagaagggcaacaagggcagcaagggcgagcccggccccgccggcagcgacggcctgcccggcctgaagggcaagagaggcgacagcggcagccccgccacctggaccaccagaggcttcgtgttcaccagacacagccagaccaccgccatccccagctgccccgagggcaccgtgcccctgtacagcggcttcagcttcctgttcgtgcagggcaaccagagagcccacggccaggacctgggcaccctgggcagctgcctgcagagattcaccaccatgcccttcctgttctgcaacgtgaacgacgtgtgcaacttcgccagcagaaacgactacagctactggctgagcacccccgccctgatgcccatgaacatggcccccatcaccggcagagccctggagccctacatcagcagatgcaccgtgtgcgagggccccgccatcgccatcgccgtgcacagccagaccaccgacatccccccctgcccccacggctggatcagcctgtggaagggcttcagcttcatcatgttcaccagcgccggcagcgagggcaccggccaggccctggccagccccggcagctgcctggaggagttcagagccagccccttcctggagtgccacggcagaggcacctgcaactactacagcaacagctacagcttctggctggccagcctgaaccccgagagaatgttcagaaagcccatccccagcaccgtgaaggccggcgagctggagaagatcatcagcagatgccaggtgtgcatgaagaagagacactag

SEQ ID NO: 10143 - DNA, 4500 bp, synthetic construct
  misc_feature 1..4500: note = Description of Artificial Sequence: Synthetic coding sequence
  source 1..4500: mol_type = other DNA
atgatggccaactgggccgaggccagacccctgctgatcctgatcgtgctgctgggccagttcgtgagcatcaaggcccaggaggaggacgaggacgagggctacggcgaggagatcgcctgcacccagaacggccagatgtacctgaacagagacatctggaagcccgccccctgccagatctgcgtgtgcgacaacggcgccatcctgtgcgacaagatcgagtgccaggacgtgctggactgcgccgaccccgtgaccccccccggcgagtgctgccccgtgtgcagccagacccccggcggcggcaacaccaacttcggcagaggcagaaagggccagaagggcgagcccggcctggtgcccgtggtgaccggcatcagaggcagacccggccccgccggcccccccggcagccagggccccagaggcgagagaggccccaagggcagacccggccccagaggcccccagggcatcgacggcgagcccggcgtgcccggccagcccggcgcccccggcccccccggccaccccagccaccccggccccgacggcctgagcagacccttcagcgcccagatggccggcctggacgagaagagcggcctgggcagccaggtgggcctgatgcccggcagcgtgggccccgtgggccccagaggcccccagggcctgcagggccagcagggcggcgccggccccaccggcccccccggcgagcccggcgaccccggccccatgggccccatcggcagcagaggccccgagggcccccccggcaagcccggcgaggacggcgagcccggcagaaacggcaaccccggcgaggtgggcttcgccggcagccccggcgccagaggcttccccggcgcccccggcctgcccggcctgaagggccacagaggccacaagggcctggagggccccaagggcgaggtgggcgcccccggcagcaagggcgaggccggccccaccggccccatgggcgccatgggccccctgggccccagaggcatgcccggcgagagaggcagactgggcccccagggcgcccccggccagagaggcgcccacggcatgcccggcaagcccggccccatgggccccctgggcatccccggcagcagcggcttccccggcaaccccggcatgaagggcgaggccggccccaccggcgccagaggccccgagggcccccagggccagagaggcgagaccggcccccccggccccgtgggcagccccggcctgcccggcgccatcggcaccgacggcacccccggcgccaagggccccaccggcagccccggcaccagcggcccccccggcagcgccggcccccccggcagccccggcccccagggcagcaccggcccccagggcatcagaggccagcccggcgaccccggcgtgcccggcttcaagggcgaggccggccccaagggcgagcccggcccccacggcatccagggccccatcggcccccccggcgaggagggcaagagaggccccagaggcgaccccggcaccgtgggcccccccggccccgtgggcgagagaggcgcccccggcaacagaggcttccccggcagcgacggcctgcccggccccaagggcgcccagggcgagagaggccccgtgggcagcagcggccccaagggcagccagggcgaccccggcagacccggcgagcccggcctgcccggcgccagaggcctgaccggcaaccccggcgtgcagggccccgagggcaagctgggccccctgggcgcccccggcgaggacggcagacccggcccccccggcagcatcggcatcagaggccagcccggcagcatgggcctgcccggccccaagggcagcagcggcgaccccggcaagcccggcgaggccggcaacgccggcgtgcccggccagagaggcgcccccggcaaggacggcgaggtgggccccagcggccccgtgggcccccccggcctggccggcgagagaggcgagcagggcccccccggccccaccggcttccagggcctgcccggcccccccggcccccccggcgagggcggcaagcccggcgaccagggcgtgcccggcgaccccggcgccgtgggccccctgggccccagaggcgagagaggcaaccccggcgagagaggcgagcccggcatcaccggcctgcccggcgagaagggcatggccggcggccacggccccgacggccccaagggcagccccggccccagcggcacccccggcgacaccggcccccccggcctgcagggcatgcccggcgagagaggcatcgccggcacccccggccccaagggcgacagaggcggcatcggcgagaagggcgccgagggcaccgccggcaacgacggcgccagaggcctgcccggccccctgggcccccccggccccgccggccccaccggcgagaagggcgagcccggccccagaggcctggtgggcccccccggcagcagaggcaaccccggcagcagaggcgagaacggccccaccggcgccgtgggcttcgccggcccccagggccccgacggccagcccggcgtgaagggcgagcccggcgagcccggccagaagggcgacgccggcagccccggcccccagggcctggccggcagccccggcccccacggccccaacggcgtgcccggcctgaagggcggcagaggcacccagggcccccccggcgccaccggcttccccggcagcgccggcagagtgggcccccccggccccgccggcgcccccggccccgccggccccctgggcgagcccggcaaggagggcccccccggcctgagaggcgaccccggcagccacggcagagtgggcgacagaggccccgccggcccccccggcggccccggcgacaagggcgaccccggcgaggacggccagcccggccccgacggcccccccggccccgccggcaccaccggccagagaggcatcgtgggcatgcccggccagagaggcgagagaggcatgcccggcctgcccggccccgccggcacccccggcaaggtgggccccaccggcgccaccggcgacaagggcccccccggccccgtgggcccccccggcagcaacggccccgtgggcgagcccggccccgagggccccgccggcaacgacggcacccccggcagagacggcgccgtgggcgagagaggcgacagaggcgaccccggccccgccggcctgcccggcagccagggcgcccccggcacccccggccccgtgggcgcccccggcgacgccggccagagaggcgaccccggcagcagaggccccatcggcccccccggcagagccggcaagagaggcctgcccggcccccagggccccagaggcgacaagggcgaccacggcgacagaggcgacagaggccagaagggccacagaggcttcaccggcctgcagggcctgcccggcccccccggccccaacggcgagcagggcagcgccggcatccccggccccttcggccccagaggcccccccggccccgtgggccccagcggcaaggagggcaaccccggccccctgggccccatcggcccccccggcgtgagaggcagcgtgggcgaggccggccccgagggcccccccggcgagcccggcccccccggcccccccggcccccccggccacctgaccgccgccctgggcgacatcatgggccactacgacgagagcatgcccgaccccctgcccgagttcaccgaggaccaggccgcccccgacgacaagaacaagaccgaccccggcgtgcacgccaccctgaagagcctgagcagccagatcgagaccatgagaagccccgacggcagcaagaagcaccccgccagaacctgcgacgacctgaagctgtgccacagcgccaagcagagcggcgagtactggatcgaccccaaccagggcagcgtggaggacgccatcaaggtgtactgcaacatggagaccggcgagacctgcatcagcgccaaccccagcagcgtgcccagaaagacctggtgggccagcaagagccccgacaacaagcccgtgtggtacggcctggacatgaacagaggcagccagttcgcctacggcgaccaccagagccccaacaccgccatcacccagatgaccttcctgagactgctgagcaaggaggccagccagaacatcacctacatctgcaagaacagcgtgggctacatggacgaccaggccaagaacctgaagaaggccgtggtgctgaagggcgccaacgacctggacatcaaggccgagggcaacatcagattcagatacatcgtgctgcaggacacctgcagcaagagaaacggcaacgtgggcaagaccgtgttcgagtacagaacccagaacgtggccagactgcccatcatcgacctggcccccgtggacgtgggcggcaccgaccaggagttcggcgtggagatcggccccgtgtgcttcgtgtag

SEQ ID NO: 10144 - DNA, 3420 bp, synthetic construct
  misc_feature 1..3420: note = Description of Artificial Sequence: Synthetic coding sequence
  source 1..3420: mol_type = other DNA
ctgcccggcagaagacacagactgggcccccccggcagccagggccccagaggcgagagaggccccaagggcagacccggccccagaggcccccagggcatcgacggcgagcccggcgtgcccggccagcccggcgcccccggcggcgccggccccaccggcccccccggcgagcccggcgaccccggccccatgggccccatcggcagcagaggccccgagggcccccccggcaagcccggcgaggacggcgagcccggcagaaacggcaaccccggcgaggtgggcttcgccggcagccccggcgccagaggcttccccggcgcccccggcctgcccggcctgaagggccacagaggccacaagggcctggagggccccaagggcgaggtgggcgcccccggcagcaagggcgaggccggccccaccggccccagaggcgaccccggcaccgtgggcccccccggccccgtgggcgagagaggcgcccccggcaacagaggcttccccggcagcgacggcctgcccggccccaagggcgcccagggcgagagaggccccgtgggcagcagcggccccaagggcagccagggcgaccccggcagacccggcgagcccggcctgcccggcgccagaggcctgaccggcaaccccggcgtgcagggccccgagggcaagctgggccccctgggcgcccccggcgaggacggcagacccggcccccccggcagcatcggcatcagaggccagcccggcagcatgggcctgcccggccccaagggcagcagcggcgaccccggcaagcccggcgaggccggcaacgccggcgtgcccggccagagaggcgcccccggcaaggacggcgaggtgggccccagcggccccgtgggcccccccggcctggccggcgagagaggcgagcagggcccccccggccccaccggcttccagggcctgcccggcccccccggcccccccggcgagggcggcaagcccggcgaccagggcgtgcccggcgaccccggcgccgtgggccccctgggccccagaggcgagagaggcaaccccggcgagagaggcgagcccggcatcaccggcctgcccggcgagaagggcatggccggcggccacggccccgacggccccaagggcagccccggccccagcggcacccccggcgacaccggcccccccggcctgcagggcatgcccggcgagagaggcatcgccggcacccccggccccaagggcgacagaggcggcatcggcgagaagggcgccgagggcaccgccggcaacgacggcgccagaggcctgcccggccccctgggcccccccggccccgccggccccaccggcgagaagggcgagcccggccccagaggcctggtgggcccccccggcagcagaggcaaccccggcagcagaggcgagaacggccccaccggcgccgtgggcttcgccggcccccagggccccgacggccagcccggcgtgaagggcgagcccggcgagcccggccagaagggcgacgccggcagccccggcccccagggcctggccggcagccccggcccccacggccccaacggcgtgcccggcctgaagggcggcagaggcacccagggcccccccggcgccaccggcttccccggcagcgccggcagagtgggcccccccggccccgccggcgcccccggccccgccggccccctgggcgagcccggcaaggagggcccccccggcctgagaggcgaccccggcagccacggcagagtgggcgacagaggccccgccggcccccccggcggccccggcgacaagggcgaccccggcgaggacggccagcccggccccgacggcccccccggccccgccggcaccaccggccagagaggcatcgtgggcatgcccggccagagaggcgagagaggcatgcccggcctgcccggccccgccggcacccccggcaaggtgggccccaccggcgccaccggcgacaagggcccccccggccccgtgggcccccccggcagcaacggccccgtgggcgagcccggccccgagggccccgccggcaacgacggcacccccggcagagacggcgccgtgggcgagagaggcgacagaggcgaccccggccccgccggcctgcccggcagccagggcgcccccggcacccccggccccgtgggcgcccccggcgacgccggccagagaggcgaccccggcagcagaggccccatcggcccccccggcagagccggcaagagaggcctgcccggcccccagggccccagaggcgacaagggcgaccacggcgacagaggcgacagaggccagaagggccacagaggcttcaccggcctgcagggcctgcccggcccccccggccccaacggcgagcagggcagcgccggcatccccggccccttcggccccagaggcccccccggccccgtgggccccagcggcaaggagggcaaccccggccccctgggccccatcggcccccccggcgtgagaggcagcgtgggcgaggccggccccgagggcccccccggcgagcccggcccccccggcccccccggcccccccggccacctgaccgccgccctgggcgacatcatgggccactacgacgagagcatgcccgaccccctgcccgagttcaccgaggaccaggccgcccccgacgacaagaacaagaccgaccccggcgtgcacgccaccctgaagagcctgagcagccagatcgagaccatgagaagccccgacggcagcaagaagcaccccgccagaacctgcgacgacctgaagctgtgccacagcgccaagcagagcggcgagtactggatcgaccccaaccagggcagcgtggaggacgccatcaaggtgtactgcaacatggagaccggcgagacctgcatcagcgccaaccccagcagcgtgcccagaaagacctggtgggccagcaagagccccgacaacaagcccgtgtggtacggcctggacatgaacagaggcagccagttcgcctacggcgaccaccagagccccaacaccgccatcacccagatgaccttcctgagactgctgagcaaggaggccagccagaacatcacctacatctgcaagaacagcgtgggctacatggacgaccaggccaagaacctgaagaaggccgtggtgctgaagggcgccaacgacctggacatcaaggccgagggcaacatcagattcagatacatcgtgctgcaggacacctgcagcaagagaaacggcaacgtgggcaagaccgtgttcgagtacagaacccagaacgtggccagactgcccatcatcgacctggcccccgtggacgtgggcggcaccgaccaggagttcggcgtggagatcggccccgtgtgcttcgtgtag

SEQ ID NO: 10145 - DNA, 5304 bp, synthetic construct
  misc_feature 1..5304: note = Description of Artificial Sequence: Synthetic coding sequence
  source 1..5304: mol_type = other DNA
atggagccctggagcagcagatggaagaccaagagatggctgtgggacttcaccgtgaccaccctggccctgaccttcctgttccaggccagagaggtgagaggcgccgcccccgtggacgtgctgaaggccctggacttccacaacagccccgagggcatcagcaagaccaccggcttctgcaccaacagaaagaacagcaagggcagcgacaccgcctacagagtgagcaagcaggcccagctgagcgcccccaccaagcagctgttccccggcggcaccttccccgaggacttcagcatcctgttcaccgtgaagcccaagaagggcatccagagcttcctgctgagcatctacaacgagcacggcatccagcagatcggcgtggaggtgggcagaagccccgtgttcctgttcgaggaccacaccggcaagcccgcccccgaggactaccccctgttcagaaccgtgaacatcgccgacggcaagtggcacagagtggccatcagcgtggagaagaagaccgtgaccatgatcgtggactgcaagaagaagaccaccaagcccctggacagaagcgagagagccatcgtggacaccaacggcatcaccgtgttcggcaccagaatcctggacgaggaggtgttcgagggcgacatccagcagttcctgatcaccggcgaccccaaggccgcctacgactactgcgagcactacagccccgactgcgacagcagcgcccccaaggccgcccaggcccaggagccccagatcgacgaggccaacatcgtggacgacttccaggagtacaactacggcaccatggagagctaccagaccgaggcccccagacacgtgagcggcaccaacgagcccaaccccgtggaggagatcttcaccgaggagtacctgaccggcgaggactacgacagccagagaaagaacagcgaggacaccctgtacgagaacaaggagatcgacggcagagacagcgacctgctggtggacggcgacctgggcgagtacgacttctacgagtacaaggagtacgaggacaagcccaccagcccccccaacgaggagttcggccccggcgtgcccgccgagaccgacatcaccgagaccagcatcaacggccacggcgcctacggcgagaagggccagaagggcgagcccgccgtggtggagcccggcatgctggtggagggcccccccggccccgccggccccgccggcatcatgggcccccccggcctgcagggccccaccggcccccccggcgaccccggcgacagaggcccccccggcagacccggcctgcccggcgccgacggcctgcccggcccccccggcaccatgctgatgctgcccttcagatacggcggcgacggcagcaagggccccaccatcagcgcccaggaggcccaggcccaggccatcctgcagcaggccagaatcgccctgagaggcccccccggccccatgggcctgaccggcagacccggccccgtgggcggccccggcagcagcggcgccaagggcgagagcggcgaccccggcccccagggccccagaggcgtgcagggcccccccggccccaccggcaagcccggcaagagaggcagacccggcgccgacggcggcagaggcatgcccggcgagcccggcgccaagggcgacagaggcttcgacggcctgcccggcctgcccggcgacaagggccacagaggcgagagaggcccccagggcccccccggcccccccggcgacgacggcatgagaggcgaggacggcgagatcggccccagaggcctgcccggcgaggccggccccagaggcctgctgggccccagaggcacccccggcgcccccggccagcccggcatggccggcgtggacggcccccccggccccaagggcaacatgggcccccagggcgagcccggcccccccggccagcagggcaaccccggcccccagggcctgcccggcccccagggccccatcggcccccccggcgagaagggcccccagggcaagcccggcctggccggcctgcccggcgccgacggcccccccggccaccccggcaaggagggccagagcggcgagaagggcgccctgggcccccccggcccccagggccccatcggctaccccggccccagaggcgtgaagggcgccgacggcgtgagaggcctgaagggcagcaagggcgagaagggcgaggacggcttccccggcttcaagggcgacatgggcctgaagggcgacagaggcgaggtgggccagatcggccccagaggcgaggacggccccgagggccccaagggcagagccggccccaccggcgaccccggccccagcggccaggccggcgagaagggcaagctgggcgtgcccggcctgcccggctaccccggcagacagggccccaagggcagcaccggcttccccggcttccccggcgccaacggcgagaagggcgccagaggcgtggccggcaagcccggccccagaggccagagaggccccaccggccccagaggcagcagaggcgccagaggccccaccggcaagcccggccccaagggcaccagcggcggcgacggcccccccggcccccccggcgagagaggcccccagggcccccagggccccgtgggcttccccggccccaagggcccccccggcccccccggcaaggacggcctgcccggccaccccggccagagaggcgagaccggcttccagggcaagaccggcccccccggccccggcggcgtggtgggcccccagggccccaccggcgagaccggccccatcggcgagagaggccaccccggcccccccggcccccccggcgagcagggcctgcccggcgccgccggcaaggagggcgccaagggcgaccccggcccccagggcatcagcggcaaggacggccccgccggcctgagaggcttccccggcgagagaggcctgcccggcgcccagggcgcccccggcctgaagggcggcgagggcccccagggcccccccggccccgtgggcagccccggcgagagaggcagcgccggcaccgccggccccatcggcctgcccggcagacccggcccccagggcccccccggccccgccggcgagaagggcgcccccggcgagaagggcccccagggccccgccggcagagacggcgtgcagggccccgtgggcctgcccggccccgccggccccgccggcagccccggcgaggacggcgacaagggcgagatcggcgagcccggccagaagggcagcaagggcgacaagggcgagaacggcccccccggcccccccggcctgcagggccccgtgggcgcccccggcatcgccggcggcgacggcgagcccggccccagaggccagcagggcatgttcggccagaagggcgacgagggcgccagaggcttccccggcccccccggccccatcggcctgcagggcctgcccggcccccccggcgagaagggcgagaacggcgacgtgggccccatgggcccccccggcccccccggccccagaggcccccagggccccaacggcgccgacggcccccagggcccccccggcagcgtgggcagcgtgggcggcgtgggcgagaagggcgagcccggcgaggccggcaaccccggcccccccggcgaggccggcgtgggcggccccaagggcgagagaggcgagaagggcgaggccggcccccccggcgccgccggcccccccggcgccaagggcccccccggcgacgacggccccaagggcaaccccggccccgtgggcttccccggcgaccccggcccccccggcgagcccggccccgccggccaggacggcgtgggcggcgacaagggcgaggacggcgaccccggccagcccggcccccccggccccagcggcgaggccggcccccccggcccccccggcaagagaggcccccccggcgccgccggcgccgagggcagacagggcgagaagggcgccaagggcgaggccggcgccgagggcccccccggcaagaccggccccgtgggcccccagggccccgccggcaagcccggccccgagggcctgagaggcatccccggccccgtgggcgagcagggcctgcccggcgccgccggccaggacggcccccccggccccatgggcccccccggcctgcccggcctgaagggcgaccccggcagcaagggcgagaagggccaccccggcctgatcggcctgatcggcccccccggcgagcagggcgagaagggcgacagaggcctgcccggcacccagggcagccccggcgccaagggcgacggcggcatccccggccccgccggccccctgggcccccccggcccccccggcctgcccggcccccagggccccaagggcaacaagggcagcaccggccccgccggccagaagggcgacagcggcctgcccggcccccccggcagccccggcccccccggcgaggtgatccagcccctgcccatcctgagcagcaagaagaccagaagacacaccgagggcatgcaggccgacgccgacgacaacatcctggactacagcgacggcatggaggagatcttcggcagcctgaacagcctgaagcaggacatcgagcacatgaagttccccatgggcacccagaccaaccccgccagaacctgcaaggacctgcagctgagccaccccgacttccccgacggcgagtactggatcgaccccaaccagggctgcagcggcgacagcttcaaggtgtactgcaacttcaccagcggcggcgagacctgcatctaccccgacaagaagagcgagggcgtgagaatcagcagctggcccaaggagaagcccggcagctggttcagcgagttcaagagaggcaagctgctgagctacctggacgtggagggcaacagcatcaacatggtgcagatgaccttcctgaagctgctgaccgccagcgccagacagaacttcacctaccactgccaccagagcgccgcctggtacgacgtgagcagcggcagctacgacaaggccctgagattcctgggcagcaacgacgaggagatgagctacgacaacaaccccttcatcaagaccctgtacgacggctgcgccagcagaaagggctacgagaagaccgtgatcgagatcaacacccccaagatcgaccaggtgcccatcgtggacgtgatgatcaacgacttcggcgaccagaaccagaagttcggcttcgaggtgggccccgtgtgcttcctgggctag

SEQ ID NO: 10146 - DNA, 5457 bp, synthetic construct
  misc_feature 1..5457: note = Description of Artificial Sequence: Synthetic coding sequence
  source 1..5457: mol_type = other DNA
atggagccctggagcagcagatggaagaccaagagatggctgtgggacttcaccgtgaccaccctggccctgaccttcctgttccaggccagagaggtgagaggcgccgcccccgtggacgtgctgaaggccctggacttccacaacagccccgagggcatcagcaagaccaccggcttctgcaccaacagaaagaacagcaagggcagcgacaccgcctacagagtgagcaagcaggcccagctgagcgcccccaccaagcagctgttccccggcggcaccttccccgaggacttcagcatcctgttcaccgtgaagcccaagaagggcatccagagcttcctgctgagcatctacaacgagcacggcatccagcagatcggcgtggaggtgggcagaagccccgtgttcctgttcgaggaccacaccggcaagcccgcccccgaggactaccccctgttcagaaccgtgaacatcgccgacggcaagtggcacagagtggccatcagcgtggagaagaagaccgtgaccatgatcgtggactgcaagaagaagaccaccaagcccctggacagaagcgagagagccatcgtggacaccaacggcatcaccgtgttcggcaccagaatcctggacgaggaggtgttcgagggcgacatccagcagttcctgatcaccggcgaccccaaggccgcctacgactactgcgagcactacagccccgactgcgacagcagcgcccccaaggccgcccaggcccaggagccccagatcgacgagaagaagaagagcaacttcaagaagaagatgagaaccgtggccaccaagagcaaggagaagagcaagaagttcaccccccccaagagcgagaagttcagcagcaagaagaagaagagctaccaggccagcgccaaggccaagctgggcgtgaaggccaacatcgtggacgacttccaggagtacaactacggcaccatggagagctaccagaccgaggcccccagacacgtgagcggcaccaacgagcccaaccccgtggaggagatcttcaccgaggagtacctgaccggcgaggactacgacagccagagaaagaacagcgaggacaccctgtacgagaacaaggagatcgacggcagagacagcgacctgctggtggacggcgacctgggcgagtacgacttctacgagtacaaggagtacgaggacaagcccaccagcccccccaacgaggagttcggccccggcgtgcccgccgagaccgacatcaccgagaccagcatcaacggccacggcgcctacggcgagaagggccagaagggcgagcccgccgtggtggagcccggcatgctggtggagggcccccccggccccgccggccccgccggcatcatgggcccccccggcctgcagggccccaccggcccccccggcgaccccggcgacagaggcccccccggcagacccggcctgcccggcgccgacggcctgcccggcccccccggcaccatgctgatgctgcccttcagatacggcggcgacggcagcaagggccccaccatcagcgcccaggaggcccaggcccaggccatcctgcagcaggccagaatcgccctgagaggcccccccggccccatgggcctgaccggcagacccggccccgtgggcggccccggcagcagcggcgccaagggcgagagcggcgaccccggcccccagggccccagaggcgtgcagggcccccccggccccaccggcaagcccggcaagagaggcagacccggcgccgacggcggcagaggcatgcccggcgagcccggcgccaagggcgacagaggcttcgacggcctgcccggcctgcccggcgacaagggccacagaggcgagagaggcccccagggcccccccggcccccccggcgacgacggcatgagaggcgaggacggcgagatcggccccagaggcctgcccggcgaggccggccccagaggcctgctgggccccagaggcacccccggcgcccccggccagcccggcatggccggcgtggacggcccccccggccccaagggcaacatgggcccccagggcgagcccggcccccccggccagcagggcaaccccggcccccagggcctgcccggcccccagggccccatcggcccccccggcgagaagggcccccagggcaagcccggcctggccggcctgcccggcgccgacggcccccccggccaccccggcaaggagggccagagcggcgagaagggcgccctgggcccccccggcccccagggccccatcggctaccccggccccagaggcgtgaagggcgccgacggcgtgagaggcctgaagggcagcaagggcgagaagggcgaggacggcttccccggcttcaagggcgacatgggcctgaagggcgacagaggcgaggtgggccagatcggccccagaggcgaggacggccccgagggccccaagggcagagccggccccaccggcgaccccggccccagcggccaggccggcgagaagggcaagctgggcgtgcccggcctgcccggctaccccggcagacagggccccaagggcagcaccggcttccccggcttccccggcgccaacggcgagaagggcgccagaggcgtggccggcaagcccggccccagaggccagagaggccccaccggccccagaggcagcagaggcgccagaggccccaccggcaagcccggccccaagggcaccagcggcggcgacggcccccccggcccccccggcgagagaggcccccagggcccccagggccccgtgggcttccccggccccaagggcccccccggcccccccggcaaggacggcctgcccggccaccccggccagagaggcgagaccggcttccagggcaagaccggcccccccggccccggcggcgtggtgggcccccagggccccaccggcgagaccggccccatcggcgagagaggccaccccggcccccccggcccccccggcgagcagggcctgcccggcgccgccggcaaggagggcgccaagggcgaccccggcccccagggcatcagcggcaaggacggccccgccggcctgagaggcttccccggcgagagaggcctgcccggcgcccagggcgcccccggcctgaagggcggcgagggcccccagggcccccccggccccgtgggcagccccggcgagagaggcagcgccggcaccgccggccccatcggcctgcccggcagacccggcccccagggcccccccggccccgccggcgagaagggcgcccccggcgagaagggcccccagggccccgccggcagagacggcgtgcagggccccgtgggcctgcccggccccgccggccccgccggcagccccggcgaggacggcgacaagggcgagatcggcgagcccggccagaagggcagcaagggcgacaagggcgagaacggcccccccggcccccccggcctgcagggccccgtgggcgcccccggcatcgccggcggcgacggcgagcccggccccagaggccagcagggcatgttcggccagaagggcgacgagggcgccagaggcttccccggcccccccggccccatcggcctgcagggcctgcccggcccccccggcgagaagggcgagaacggcgacgtgggccccatgggcccccccggcccccccggccccagaggcccccagggccccaacggcgccgacggcccccagggcccccccggcagcgtgggcagcgtgggcggcgtgggcgagaagggcgagcccggcgaggccggcaaccccggcccccccggcgaggccggcgtgggcggccccaagggcgagagaggcgagaagggcgaggccggcccccccggcgccgccggcccccccggcgccaagggcccccccggcgacgacggccccaagggcaaccccggccccgtgggcttccccggcgaccccggcccccccggcgagcccggccccgccggccaggacggcgtgggcggcgacaagggcgaggacggcgaccccggccagcccggcccccccggccccagcggcgaggccggcccccccggcccccccggcaagagaggcccccccggcgccgccggcgccgagggcagacagggcgagaagggcgccaagggcgaggccggcgccgagggcccccccggcaagaccggccccgtgggcccccagggccccgccggcaagcccggccccgagggcctgagaggcatccccggccccgtgggcgagcagggcctgcccggcgccgccggccaggacggcccccccggccccatgggcccccccggcctgcccggcctgaagggcgaccccggcagcaagggcgagaagggccaccccggcctgatcggcctgatcggcccccccggcgagcagggcgagaagggcgacagaggcctgcccggcacccagggcagccccggcgccaagggcgacggcggcatccccggccccgccggccccctgggcccccccggcccccccggcctgcccggcccccagggccccaagggcaacaagggcagcaccggccccgccggccagaagggcgacagcggcctgcccggcccccccggcagccccggcccccccggcgaggtgatccagcccctgcccatcctgagcagcaagaagaccagaagacacaccgagggcatgcaggccgacgccgacgacaacatcctggactacagcgacggcatggaggagatcttcggcagcctgaacagcctgaagcaggacatcgagcacatgaagttccccatgggcacccagaccaaccccgccagaacctgcaaggacctgcagctgagccaccccgacttccccgacggcgagtactggatcgaccccaaccagggctgcagcggcgacagcttcaaggtgtactgcaacttcaccagcggcggcgagacctgcatctaccccgacaagaagagcgagggcgtgagaatcagcagctggcccaaggagaagcccggcagctggttcagcgagttcaagagaggcaagctgctgagctacctggacgtggagggcaacagcatcaacatggtgcagatgaccttcctgaagctgctgaccgccagcgccagacagaacttcacctaccactgccaccagagcgccgcctggtacgacgtgagcagcggcagctacgacaaggccctgagattcctgggcagcaacgacgaggagatgagctacgacaacaaccccttcatcaagaccctgtacgacggctgcgccagcagaaagggctacgagaagaccgtgatcgagatcaacacccccaagatcgaccaggtgcccatcgtggacgtgatgatcaacgacttcggcgaccagaaccagaagttcggcttcgaggtgggccccgtgtgcttcctgggctag

SEQ ID NO: 10147 - DNA, 3081 bp, synthetic construct
  misc_feature 1..3081: note = Description of Artificial Sequence: Synthetic coding sequence
  source 1..3081: mol_type = other DNA
atggtgagcgaggtgagcagagacctgaaggtgaagagagagaagctggtgaagctggcccaggagggcaagatggccctgaaggaccccaaggtggagcaggcccagctggagacccaggtgctgcaggtgaagcaggagaagagagagaacctggagttccaggactaccaggacatccaggaggacaaggtgcagagaatcagcgacgtgatcggcagcaccggcttccccggcttccccggcgccaacggcgagaagggcgccagaggcgtggccggcaagcccggccccagaggccagagaggccccaccggccccagaggcagcagaggcgccagaggccccaccggcaagcccggccccaagggcaccagcggcggcgacggcccccccggcccccccggcgagagaggcccccagggcccccagggccccgtgggcttccccggccccaagggcccccccggcccccccggcaaggacggcctgcccggccaccccggccagagaggcgagaccggcttccagggcaagaccggcccccccggccccggcggcgtggtgggcccccagggccccaccggcgagaccggccccatcggcgagagaggccaccccggcccccccggcccccccggcgagcagggcctgcccggcgccgccggcaaggagggcgccaagggcgaccccggcccccagggcatcagcggcaaggacggccccgccggcctgagaggcttccccggcgagagaggcctgcccggcgcccagggcgcccccggcctgaagggcggcgagggcccccagggcccccccggccccgtgggcagccccggcgagagaggcagcgccggcaccgccggccccatcggcctgcccggcagacccggcccccagggcccccccggccccgccggcgagaagggcgcccccggcgagaagggcccccagggccccgccggcagagacggcgtgcagggccccgtgggcctgcccggccccgccggccccgccggcagccccggcgaggacggcgacaagggcgagatcggcgagcccggccagaagggcagcaagggcgacaagggcgagaacggcccccccggcccccccggcctgcagggccccgtgggcgcccccggcatcgccggcggcgacggcgagcccggccccagaggccagcagggcatgttcggccagaagggcgacgagggcgccagaggcttccccggcccccccggccccatcggcctgcagggcctgcccggcccccccggcgagaagggcgagaacggcgacgtgggccccatgggcccccccggcccccccggccccagaggcccccagggccccaacggcgccgacggcccccagggcccccccggcagcgtgggcagcgtgggcggcgtgggcgagaagggcgagcccggcgaggccggcaaccccggcccccccggcgaggccggcgtgggcggccccaagggcgagagaggcgagaagggcgaggccggcccccccggcgccgccggcccccccggcgccaagggcccccccggcgacgacggccccaagggcaaccccggccccgtgggcttccccggcgaccccggcccccccggcgagcccggccccgccggccaggacggcgtgggcggcgacaagggcgaggacggcgaccccggccagcccggcccccccggccccagcggcgaggccggcccccccggcccccccggcaagagaggcccccccggcgccgccggcgccgagggcagacagggcgagaagggcgccaagggcgaggccggcgccgagggcccccccggcaagaccggccccgtgggcccccagggccccgccggcaagcccggccccgagggcctgagaggcatccccggccccgtgggcgagcagggcctgcccggcgccgccggccaggacggcccccccggccccatgggcccccccggcctgcccggcctgaagggcgaccccggcagcaagggcgagaagggccaccccggcctgatcggcctgatcggcccccccggcgagcagggcgagaagggcgacagaggcctgcccggcacccagggcagccccggcgccaagggcgacggcggcatccccggccccgccggccccctgggcccccccggcccccccggcctgcccggcccccagggccccaagggcaacaagggcagcaccggccccgccggccagaagggcgacagcggcctgcccggcccccccggcagccccggcccccccggcgaggtgatccagcccctgcccatcctgagcagcaagaagaccagaagacacaccgagggcatgcaggccgacgccgacgacaacatcctggactacagcgacggcatggaggagatcttcggcagcctgaacagcctgaagcaggacatcgagcacatgaagttccccatgggcacccagaccaaccccgccagaacctgcaaggacctgcagctgagccaccccgacttccccgacggcgagtactggatcgaccccaaccagggctgcagcggcgacagcttcaaggtgtactgcaacttcaccagcggcggcgagacctgcatctaccccgacaagaagagcgagggcgtgagaatcagcagctggcccaaggagaagcccggcagctggttcagcgagttcaagagaggcaagctgctgagctacctggacgtggagggcaacagcatcaacatggtgcagatgaccttcctgaagctgctgaccgccagcgccagacagaacttcacctaccactgccaccagagcgccgcctggtacgacgtgagcagcggcagctacgacaaggccctgagattcctgggcagcaacgacgaggagatgagctacgacaacaaccccttcatcaagaccctgtacgacggctgcgccagcagaaagggctacgagaagaccgtgatcgagatcaacacccccaagatcgaccaggtgcccatcgtggacgtgatgatcaacgacttcggcgaccagaaccagaagttcggcttcgaggtgggccccgtgtgcttcctgggctag

SEQ ID NO: 10148 - DNA, 5421 bp, synthetic construct
  misc_feature 1..5421: note = Description of Artificial Sequence: Synthetic coding sequence
  source 1..5421: mol_type = other DNA
atggagccctggagcagcagatggaagaccaagagatggctgtgggacttcaccgtgaccaccctggccctgaccttcctgttccaggccagagaggtgagaggcgccgcccccgtggacgtgctgaaggccctggacttccacaacagccccgagggcatcagcaagaccaccggcttctgcaccaacagaaagaacagcaagggcagcgacaccgcctacagagtgagcaagcaggcccagctgagcgcccccaccaagcagctgttccccggcggcaccttccccgaggacttcagcatcctgttcaccgtgaagcccaagaagggcatccagagcttcctgctgagcatctacaacgagcacggcatccagcagatcggcgtggaggtgggcagaagccccgtgttcctgttcgaggaccacaccggcaagcccgcccccgaggactaccccctgttcagaaccgtgaacatcgccgacggcaagtggcacagagtggccatcagcgtggagaagaagaccgtgaccatgatcgtggactgcaagaagaagaccaccaagcccctggacagaagcgagagagccatcgtggacaccaacggcatcaccgtgttcggcaccagaatcctggacgaggaggtgttcgagggcgacatccagcagttcctgatcaccggcgaccccaaggccgcctacgactactgcgagcactacagccccgactgcgacagcagcgcccccaaggccgcccaggcccaggagccccagatcgacgagtacgcccccgaggacatcatcgagtacgactacgagtacggcgaggccgagtacaaggaggccgagagcgtgaccgagggccccaccgtgaccgaggagaccatcgcccagaccgaggccaacatcgtggacgacttccaggagtacaactacggcaccatggagagctaccagaccgaggcccccagacacgtgagcggcaccaacgagcccaaccccgtggaggagatcttcaccgaggagtacctgaccggcgaggactacgacagccagagaaagaacagcgaggacaccctgtacgagaacaaggagatcgacggcagagacagcgacctgctggtggacggcgacctgggcgagtacgacttctacgagtacaaggagtacgaggacaagcccaccagcccccccaacgaggagttcggccccggcgtgcccgccgagaccgacatcaccgagaccagcatcaacggccacggcgcctacggcgagaagggccagaagggcgagcccgccgtggtggagcccggcatgctggtggagggcccccccggccccgccggccccgccggcatcatgggcccccccggcctgcagggccccaccggcccccccggcgaccccggcgacagaggcccccccggcagacccggcctgcccggcgccgacggcctgcccggcccccccggcaccatgctgatgctgcccttcagatacggcggcgacggcagcaagggccccaccatcagcgcccaggaggcccaggcccaggccatcctgcagcaggccagaatcgccctgagaggcccccccggccccatgggcctgaccggcagacccggccccgtgggcggccccggcagcagcggcgccaagggcgagagcggcgaccccggcccccagggccccagaggcgtgcagggcccccccggccccaccggcaagcccggcaagagaggcagacccggcgccgacggcggcagaggcatgcccggcgagcccggcgccaagggcgacagaggcttcgacggcctgcccggcctgcccggcgacaagggccacagaggcgagagaggcccccagggcccccccggcccccccggcgacgacggcatgagaggcgaggacggcgagatcggccccagaggcctgcccggcgaggccggccccagaggcctgctgggccccagaggcacccccggcgcccccggccagcccggcatggccggcgtggacggcccccccggccccaagggcaacatgggcccccagggcgagcccggcccccccggccagcagggcaaccccggcccccagggcctgcccggcccccagggccccatcggcccccccggcgagaagggcccccagggcaagcccggcctggccggcctgcccggcgccgacggcccccccggccaccccggcaaggagggccagagcggcgagaagggcgccctgggcccccccggcccccagggccccatcggctaccccggccccagaggcgtgaagggcgccgacggcgtgagaggcctgaagggcagcaagggcgagaagggcgaggacggcttccccggcttcaagggcgacatgggcctgaagggcgacagaggcgaggtgggccagatcggccccagaggcgaggacggccccgagggccccaagggcagagccggccccaccggcgaccccggccccagcggccaggccggcgagaagggcaagctgggcgtgcccggcctgcccggctaccccggcagacagggccccaagggcagcaccggcttccccggcttccccggcgccaacggcgagaagggcgccagaggcgtggccggcaagcccggccccagaggccagagaggccccaccggccccagaggcagcagaggcgccagaggccccaccggcaagcccggccccaagggcaccagcggcggcgacggcccccccggcccccccggcgagagaggcccccagggcccccagggccccgtgggcttccccggccccaagggcccccccggcccccccggcaaggacggcctgcccggccaccccggccagagaggcgagaccggcttccagggcaagaccggcccccccggccccggcggcgtggtgggcccccagggccccaccggcgagaccggccccatcggcgagagaggccaccccggcccccccggcccccccggcgagcagggcctgcccggcgccgccggcaaggagggcgccaagggcgaccccggcccccagggcatcagcggcaaggacggccccgccggcctgagaggcttccccggcgagagaggcctgcccggcgcccagggcgcccccggcctgaagggcggcgagggcccccagggcccccccggccccgtgggcagccccggcgagagaggcagcgccggcaccgccggccccatcggcctgcccggcagacccggcccccagggcccccccggccccgccggcgagaagggcgcccccggcgagaagggcccccagggccccgccggcagagacggcgtgcagggccccgtgggcctgcccggccccgccggccccgccggcagccccggcgaggacggcgacaagggcgagatcggcgagcccggccagaagggcagcaagggcgacaagggcgagaacggcccccccggcccccccggcctgcagggccccgtgggcgcccccggcatcgccggcggcgacggcgagcccggccccagaggccagcagggcatgttcggccagaagggcgacgagggcgccagaggcttccccggcccccccggccccatcggcctgcagggcctgcccggcccccccggcgagaagggcgagaacggcgacgtgggccccatgggcccccccggcccccccggccccagaggcccccagggccccaacggcgccgacggcccccagggcccccccggcagcgtgggcagcgtgggcggcgtgggcgagaagggcgagcccggcgaggccggcaaccccggcccccccggcgaggccggcgtgggcggccccaagggcgagagaggcgagaagggcgaggccggcccccccggcgccgccggcccccccggcgccaagggcccccccggcgacgacggccccaagggcaaccccggccccgtgggcttccccggcgaccccggcccccccggcgagcccggccccgccggccaggacggcgtgggcggcgacaagggcgaggacggcgaccccggccagcccggcccccccggccccagcggcgaggccggcccccccggcccccccggcaagagaggcccccccggcgccgccggcgccgagggcagacagggcgagaagggcgccaagggcgaggccggcgccgagggcccccccggcaagaccggccccgtgggcccccagggccccgccggcaagcccggccccgagggcctgagaggcatccccggccccgtgggcgagcagggcctgcccggcgccgccggccaggacggcccccccggccccatgggcccccccggcctgcccggcctgaagggcgaccccggcagcaagggcgagaagggccaccccggcctgatcggcctgatcggcccccccggcgagcagggcgagaagggcgacagaggcctgcccggcacccagggcagccccggcgccaagggcgacggcggcatccccggccccgccggccccctgggcccccccggcccccccggcctgcccggcccccagggccccaagggcaacaagggcagcaccggccccgccggccagaagggcgacagcggcctgcccggcccccccggcagccccggcccccccggcgaggtgatccagcccctgcccatcctgagcagcaagaagaccagaagacacaccgagggcatgcaggccgacgccgacgacaacatcctggactacagcgacggcatggaggagatcttcggcagcctgaacagcctgaagcaggacatcgagcacatgaagttccccatgggcacccagaccaaccccgccagaacctgcaaggacctgcagctgagccaccccgacttccccgacggcgagtactggatcgaccccaaccagggctgcagcggcgacagcttcaaggtgtactgcaacttcaccagcggcggcgagacctgcatctaccccgacaagaagagcgagggcgtgagaatcagcagctggcccaaggagaagcccggcagctggttcagcgagttcaagagaggcaagctgctgagctacctggacgtggagggcaacagcatcaacatggtgcagatgaccttcctgaagctgctgaccgccagcgccagacagaacttcacctaccactgccaccagagcgccgcctggtacgacgtgagcagcggcagctacgacaaggccctgagattcctgggcagcaacgacgaggagatgagctacgacaacaaccccttcatcaagaccctgtacgacggctgcgccagcagaaagggctacgagaagaccgtgatcgagatcaacacccccaagatcgaccaggtgcccatcgtggacgtgatgatcaacgacttcggcgaccagaaccagaagttcggcttcgaggtgggccccgtgtgcttcctgggctag

SEQ ID NO: 10149 - DNA, 5073 bp, synthetic construct
  misc_feature 1..5073: note = Description of Artificial Sequence: Synthetic coding sequence
  source 1..5073: mol_type = other DNA
atggagccctggagcagcagatggaagaccaagagatggctgtgggacttcaccgtgaccaccctggccctgaccttcctgttccaggccagagaggtgagaggcgccgcccccgtggacgtgctgaaggccctggacttccacaacagccccgagggcatcagcaagaccaccggcttctgcaccaacagaaagaacagcaagggcagcgacaccgcctacagagtgagcaagcaggcccagctgagcgcccccaccaagcagctgttccccggcggcaccttccccgaggacttcagcatcctgttcaccgtgaagcccaagaagggcatccagagcttcctgctgagcatctacaacgagcacggcatccagcagatcggcgtggaggtgggcagaagccccgtgttcctgttcgaggaccacaccggcaagcccgcccccgaggactaccccctgttcagaaccgtgaacatcgccgacggcaagtggcacagagtggccatcagcgtggagaagaagaccgtgaccatgatcgtggactgcaagaagaagaccaccaagcccctggacagaagcgagagagccatcgtggacaccaacggcatcaccgtgttcggcaccagaatcctggacgaggaggtgttcgagggcgacatccagcagttcctgatcaccggcgaccccaaggccgcctacgactactgcgagcactacagccccgactgcgacagcagcgcccccaaggccgcccaggcccaggagccccagatcgacgagtacgcccccgaggacatcatcgagtacgactacgagtacggcgaggccgagtacaaggaggccgagagcgtgaccgagggccccaccgtgaccgaggagaccatcgcccagaccgagatcaacggccacggcgcctacggcgagaagggccagaagggcgagcccgccgtggtggagcccggcatgctggtggagggcccccccggccccgccggccccgccggcatcatgggcccccccggcctgcagggccccaccggcccccccggcgaccccggcgacagaggcccccccggcagacccggcctgcccggcgccgacggcctgcccggcccccccggcaccatgctgatgctgcccttcagatacggcggcgacggcagcaagggccccaccatcagcgcccaggaggcccaggcccaggccatcctgcagcaggccagaatcgccctgagaggcccccccggccccatgggcctgaccggcagacccggccccgtgggcggccccggcagcagcggcgccaagggcgagagcggcgaccccggcccccagggccccagaggcgtgcagggcccccccggccccaccggcaagcccggcaagagaggcagacccggcgccgacggcggcagaggcatgcccggcgagcccggcgccaagggcgacagaggcttcgacggcctgcccggcctgcccggcgacaagggccacagaggcgagagaggcccccagggcccccccggcccccccggcgacgacggcatgagaggcgaggacggcgagatcggccccagaggcctgcccggcgaggccggccccagaggcctgctgggccccagaggcacccccggcgcccccggccagcccggcatggccggcgtggacggcccccccggccccaagggcaacatgggcccccagggcgagcccggcccccccggccagcagggcaaccccggcccccagggcctgcccggcccccagggccccatcggcccccccggcgagaagggcccccagggcaagcccggcctggccggcctgcccggcgccgacggcccccccggccaccccggcaaggagggccagagcggcgagaagggcgccctgggcccccccggcccccagggccccatcggctaccccggccccagaggcgtgaagggcgccgacggcgtgagaggcctgaagggcagcaagggcgagaagggcgaggacggcttccccggcttcaagggcgacatgggcctgaagggcgacagaggcgaggtgggccagatcggccccagaggcgaggacggccccgagggccccaagggcagagccggccccaccggcgaccccggccccagcggccaggccggcgagaagggcaagctgggcgtgcccggcctgcccggctaccccggcagacagggccccaagggcagcaccggcttccccggcttccccggcgccaacggcgagaagggcgccagaggcgtggccggcaagcccggccccagaggccagagaggccccaccggccccagaggcagcagaggcgccagaggccccaccggcaagcccggccccaagggcaccagcggcggcgacggcccccccggcccccccggcgagagaggcccccagggcccccagggccccgtgggcttccccggccccaagggcccccccggcccccccggcaaggacggcctgcccggccaccccggccagagaggcgagaccggcttccagggcaagaccggcccccccggccccggcggcgtggtgggcccccagggccccaccggcgagaccggccccatcggcgagagaggccaccccggcccccccggcccccccggcgagcagggcctgcccggcgccgccggcaaggagggcgccaagggcgaccccggcccccagggcatcagcggcaaggacggccccgccggcctgagaggcttccccggcgagagaggcctgcccggcgcccagggcgcccccggcctgaagggcggcgagggcccccagggcccccccggccccgtgggcagccccggcgagagaggcagcgccggcaccgccggccccatcggcctgcccggcagacccggcccccagggcccccccggccccgccggcgagaagggcgcccccggcgagaagggcccccagggccccgccggcagagacggcgtgcagggccccgtgggcctgcccggccccgccggccccgccggcagccccggcgaggacggcgacaagggcgagatcggcgagcccggccagaagggcagcaagggcgacaagggcgagaacggcccccccggcccccccggcctgcagggccccgtgggcgcccccggcatcgccggcggcgacggcgagcccggccccagaggccagcagggcatgttcggccagaagggcgacgagggcgccagaggcttccccggcccccccggccccatcggcctgcagggcctgcccggcccccccggcgagaagggcgagaacggcgacgtgggccccatgggcccccccggcccccccggccccagaggcccccagggccccaacggcgccgacggcccccagggcccccccggcagcgtgggcagcgtgggcggcgtgggcgagaagggcgagcccggcgaggccggcaaccccggcccccccggcgaggccggcgtgggcggccccaagggcgagagaggcgagaagggcgaggccggcccccccggcgccgccggcccccccggcgccaagggcccccccggcgacgacggccccaagggcaaccccggccccgtgggcttccccggcgaccccggcccccccggcgagcccggccccgccggccaggacggcgtgggcggcgacaagggcgaggacggcgaccccggccagcccggcccccccggccccagcggcgaggccggcccccccggcccccccggcaagagaggcccccccggcgccgccggcgccgagggcagacagggcgagaagggcgccaagggcgaggccggcgccgagggcccccccggcaagaccggccccgtgggcccccagggccccgccggcaagcccggccccgagggcctgagaggcatccccggccccgtgggcgagcagggcctgcccggcgccgccggccaggacggcccccccggccccatgggcccccccggcctgcccggcctgaagggcgaccccggcagcaagggcgagaagggccaccccggcctgatcggcctgatcggcccccccggcgagcagggcgagaagggcgacagaggcctgcccggcacccagggcagccccggcgccaagggcgacggcggcatccccggccccgccggccccctgggcccccccggcccccccggcctgcccggcccccagggccccaagggcaacaagggcagcaccggccccgccggccagaagggcgacagcggcctgcccggcccccccggcagccccggcccccccggcgaggtgatccagcccctgcccatcctgagcagcaagaagaccagaagacacaccgagggcatgcaggccgacgccgacgacaacatcctggactacagcgacggcatggaggagatcttcggcagcctgaacagcctgaagcaggacatcgagcacatgaagttccccatgggcacccagaccaaccccgccagaacctgcaaggacctgcagctgagccaccccgacttccccgacggcgagtactggatcgaccccaaccagggctgcagcggcgacagcttcaaggtgtactgcaacttcaccagcggcggcgagacctgcatctaccccgacaagaagagcgagggcgtgagaatcagcagctggcccaaggagaagcccggcagctggttcagcgagttcaagagaggcaagctgctgagctacctggacgtggagggcaacagcatcaacatggtgcagatgaccttcctgaagctgctgaccgccagcgccagacagaacttcacctaccactgccaccagagcgccgcctggtacgacgtgagcagcggcagctacgacaaggccctgagattcctgggcagcaacgacgaggagatgagctacgacaacaaccccttcatcaagaccctgtacgacggctgcgccagcagaaagggctacgagaagaccgtgatcgagatcaacacccccaagatcgaccaggtgcccatcgtggacgtgatgatcaacgacttcggcgaccagaaccagaagttcggcttcgaggtgggccccgtgtgcttcctgggctag

SEQ ID NO: 10150 - DNA, 4560 bp, synthetic construct
  misc_feature 1..4560: note = Description of Artificial Sequence: Synthetic coding sequence
  source 1..4560: mol_type = other DNA
atggccccctacccctgcggctgccacatcctgctgctgctgttctgctgcctggccgccgccagagccaacctgctgaacctgaactggctgtggttcaacaacgaggacaccagccacgccgccaccaccatccccgagccccagggccccctgcccgtgcagcccaccgccgacaccaccacccacgtgacccccagaaacggcagcaccgagcccgccaccgcccccggcagccccgagccccccagcgagctgctggaggacggccaggacacccccaccagcgccgagagccccgacgcccccgaggagaacatcgccggcgtgggcgccgagatcctgaacgtggccaagggcatcagaagcttcgtgcagctgtggaacgacaccgtgcccaccgagagcctggccagagccgagaccctggtgctggagacccccgtgggccccctggccctggccggccccagcagcaccccccaggagaacggcaccaccctgtggcccagcagaggcatccccagcagccccggcgcccacaccaccgaggccggcaccctgcccgcccccacccccagcccccccagcctgggcagaccctgggcccccctgaccggccccagcgtgcccccccccagcagcgagagaatcagcgaggaggtgggcctgctgcagctgctgggcgacccccccccccagcaggtgacccagaccgacgaccccgacgtgggcctggcctacgtgttcggccccgacgccaacagcggccaggtggccagataccacttccccagcctgttcttcagagacttcagcctgctgttccacatcagacccgccaccgagggccccggcgtgctgttcgccatcaccgacagcgcccaggccatggtgctgctgggcgtgaagctgagcggcgtgcaggacggccaccaggacatcagcctgctgtacaccgagcccggcgccggccagacccacaccgccgccagcttcagactgcccgccttcgtgggccagtggacccacctggccctgagcgtggccggcggcttcgtggccctgtacgtggactgcgaggagttccagagaatgcccctggccagaagcagcagaggcctggagctggagcccggcgccggcctgttcgtggcccaggccggcggcgccgaccccgacaagttccagggcgtgatcgccgagctgaaggtgagaagagacccccaggtgagccccatgcactgcctggacgaggagggcgacgacagcgacggcgccagcggcgacagcggcagcggcctgggcgacgccagagagctgctgagagaggagaccggcgccgccctgaagcccagactgcccgcccccccccccgtgaccaccccccccctggccggcggcagcagcaccgaggacagcagaagcgaggaggtggaggagcagaccaccgtggccagcctgggcgcccagaccctgcccggcagcgacagcgtgagcacctgggacggcagcgtgagaacccccggcggcagagtgaaggagggcggcctgaagggccagaagggcgagcccggcgtgcccggcccccccggcagagccggcccccccggcagcccctgcctgcccggcccccccggcctgccctgccccgtgagccccctgggccccgccggccccgccctgcagaccgtgcccggcccccagggcccccccggcccccccggcagagacggcacccccggcagagacggcgagcccggcgaccccggcgaggacggcaagcccggcgacaccggcccccagggcttccccggcacccccggcgacgtgggccccaagggcgacaagggcgaccccggcgtgggcgagagaggcccccccggcccccagggcccccccggcccccccggccccagcttcagacacgacaagctgaccttcatcgacatggagggcagcggcttcggcggcgacctggaggccctgagaggccccagaggcttccccggcccccccggcccccccggcgtgcccggcctgcccggcgagcccggcagattcggcgtgaacagcagcgacgtgcccggccccgccggcctgcccggcgtgcccggcagagagggcccccccggcttccccggcctgcccggcccccccggcccccccggcagagagggcccccccggcagaaccggccagaagggcagcctgggcgaggccggcgcccccggccacaagggcagcaagggcgcccccggccccgccggcgccagaggcgagagcggcctggccggcgcccccggccccgccggcccccccggcccccccggcccccccggcccccccggccccggcctgcccgccggcttcgacgacatggagggcagcggcggccccttctggagcaccgccagaagcgccgacggcccccagggcccccccggcctgcccggcctgaagggcgaccccggcgtgcccggcctgcccggcgccaagggcgaggtgggcgccgacggcgtgcccggcttccccggcctgcccggcagagagggcatcgccggcccccagggccccaagggcgacagaggcagcagaggcgagaagggcgaccccggcaaggacggcgtgggccagcccggcctgcccggcccccccggcccccccggccccgtggtgtacgtgagcgagcaggacggcagcgtgctgagcgtgcccggccccgagggcagacccggcttcgccggcttccccggccccgccggccccaagggcaacctgggcagcaagggcgagagaggcagccccggccccaagggcgagaagggcgagcccggcagcatcttcagccccgacggcggcgccctgggccccgcccagaagggcgccaagggcgagcccggcttcagaggcccccccggcccctacggcagacccggctacaagggcgagatcggcttccccggcagacccggcagacccggcatgaacggcctgaagggcgagaagggcgagcccggcgacgccagcctgggcttcggcatgagaggcatgcccggcccccccggcccccccggcccccccggcccccccggcacccccgtgtacgacagcaacgtgttcgccgagagcagcagacccggcccccccggcctgcccggcaaccagggcccccccggccccaagggcgccaagggcgaggtgggcccccccggcccccccggccagttccccttcgacttcctgcagctggaggccgagatgaagggcgagaagggcgacagaggcgacgccggccagaagggcgagagaggcgagcccggcggcggcggcttcttcggcagcagcctgcccggcccccccggcccccccggcccccccggccccagaggctaccccggcatccccggccccaagggcgagagcatcagaggccagcccggcccccccggcccccagggcccccccggcatcggctacgagggcagacagggcccccccggcccccccggcccccccggcccccccagcttccccggcccccacagacagaccatcagcgtgcccggcccccccggcccccccggcccccccggcccccccggcaccatgggcgccagcagcggcgtgagactgtgggccaccagacaggccatgctgggccaggtgcacgaggtgcccgagggctggctgatcttcgtggccgagcaggaggagctgtacgtgagagtgcagaacggcttcagaaaggtgcagctggaggccagaacccccctgcccagaggcaccgacaacgaggtggccgccctgcagccccccgtggtgcagctgcacgacagcaacccctaccccagaagagagcacccccaccccaccgccagaccctggagagccgacgacatcctggccagcccccccagactgcccgagccccagccctaccccggcgccccccaccacagcagctacgtgcacctgagacccgccagacccaccagcccccccgcccacagccacagagacttccagcccgtgctgcacctggtggccctgaacagccccctgagcggcggcatgagaggcatcagaggcgccgacttccagtgcttccagcaggccagagccgtgggcctggccggcaccttcagagccttcctgagcagcagactgcaggacctgtacagcatcgtgagaagagccgacagagccgccgtgcccatcgtgaacctgaaggacgagctgctgttccccagctgggaggccctgttcagcggcagcgagggccccctgaagcccggcgccagaatcttcagcttcgacggcaaggacgtgctgagacaccccacctggccccagaagagcgtgtggcacggcagcgaccccaacggcagaagactgaccgagagctactgcgagacctggagaaccgaggcccccagcgccaccggccaggccagcagcctgctgggcggcagactgctgggccagagcgccgccagctgccaccacgcctacatcgtgctgtgcatcgagaacagcttcatgaccgccagcaagtag

SEQ ID NO: 10151 - DNA, 5265 bp, synthetic construct
  misc_feature 1..5265: note = Description of Artificial Sequence: Synthetic coding sequence
  source 1..5265: mol_type = other DNA
atggccccctacccctgcggctgccacatcctgctgctgctgttctgctgcctggccgccgccagagccaacctgctgaacctgaactggctgtggttcaacaacgaggacaccagccacgccgccaccaccatccccgagccccagggccccctgcccgtgcagcccaccgccgacaccaccacccacgtgacccccagaaacggcagcaccgagcccgccaccgcccccggcagccccgagccccccagcgagctgctggaggacggccaggacacccccaccagcgccgagagccccgacgcccccgaggagaacatcgccggcgtgggcgccgagatcctgaacgtggccaagggcatcagaagcttcgtgcagctgtggaacgacaccgtgcccaccgagagcctggccagagccgagaccctggtgctggagacccccgtgggccccctggccctggccggccccagcagcaccccccaggagaacggcaccaccctgtggcccagcagaggcatccccagcagccccggcgcccacaccaccgaggccggcaccctgcccgcccccacccccagcccccccagcctgggcagaccctgggcccccctgaccggccccagcgtgcccccccccagcagcggcagagccagcctgagcagcctgctgggcggcgcccccccctggggcagcctgcaggaccccgacagccagggcctgagccccgccgccgccgcccccagccagcagctgcagagacccgacgtgagactgagaacccccctgctgcaccccctggtgatgggcagcctgggcaagcacgccgcccccagcgccttcagcagcggcctgcccggcgccctgagccaggtggccgtgaccaccctgaccagagacagcggcgcctgggtgagccacgtggccaacagcgtgggccccggcctggccaacaacagcgccctgctgggcgccgaccccgaggcccccgccggcagatgcctgcccctgccccccagcctgcccgtgtgcggccacctgggcatcagcagattctggctgcccaaccacctgcaccacgagagcggcgagcaggtgagagccggcgccagagcctggggcggcctgctgcagacccactgccaccccttcctggcctggttcttctgcctgctgctggtgcccccctgcggcagcgtgcccccccccgccccccccccctgctgccagttctgcgaggccctgcaggacgcctgctggagcagactgggcggcggcagactgcccgtggcctgcgccagcctgcccacccaggaggacggctactgcgtgctgatcggccccgccgccgagagaatcagcgaggaggtgggcctgctgcagctgctgggcgacccccccccccagcaggtgacccagaccgacgaccccgacgtgggcctggcctacgtgttcggccccgacgccaacagcggccaggtggccagataccacttccccagcctgttcttcagagacttcagcctgctgttccacatcagacccgccaccgagggccccggcgtgctgttcgccatcaccgacagcgcccaggccatggtgctgctgggcgtgaagctgagcggcgtgcaggacggccaccaggacatcagcctgctgtacaccgagcccggcgccggccagacccacaccgccgccagcttcagactgcccgccttcgtgggccagtggacccacctggccctgagcgtggccggcggcttcgtggccctgtacgtggactgcgaggagttccagagaatgcccctggccagaagcagcagaggcctggagctggagcccggcgccggcctgttcgtggcccaggccggcggcgccgaccccgacaagttccagggcgtgatcgccgagctgaaggtgagaagagacccccaggtgagccccatgcactgcctggacgaggagggcgacgacagcgacggcgccagcggcgacagcggcagcggcctgggcgacgccagagagctgctgagagaggagaccggcgccgccctgaagcccagactgcccgcccccccccccgtgaccaccccccccctggccggcggcagcagcaccgaggacagcagaagcgaggaggtggaggagcagaccaccgtggccagcctgggcgcccagaccctgcccggcagcgacagcgtgagcacctgggacggcagcgtgagaacccccggcggcagagtgaaggagggcggcctgaagggccagaagggcgagcccggcgtgcccggcccccccggcagagccggcccccccggcagcccctgcctgcccggcccccccggcctgccctgccccgtgagccccctgggccccgccggccccgccctgcagaccgtgcccggcccccagggcccccccggcccccccggcagagacggcacccccggcagagacggcgagcccggcgaccccggcgaggacggcaagcccggcgacaccggcccccagggcttccccggcacccccggcgacgtgggccccaagggcgacaagggcgaccccggcgtgggcgagagaggcccccccggcccccagggcccccccggcccccccggccccagcttcagacacgacaagctgaccttcatcgacatggagggcagcggcttcggcggcgacctggaggccctgagaggccccagaggcttccccggcccccccggcccccccggcgtgcccggcctgcccggcgagcccggcagattcggcgtgaacagcagcgacgtgcccggccccgccggcctgcccggcgtgcccggcagagagggcccccccggcttccccggcctgcccggcccccccggcccccccggcagagagggcccccccggcagaaccggccagaagggcagcctgggcgaggccggcgcccccggccacaagggcagcaagggcgcccccggccccgccggcgccagaggcgagagcggcctggccggcgcccccggccccgccggcccccccggcccccccggcccccccggcccccccggccccggcctgcccgccggcttcgacgacatggagggcagcggcggccccttctggagcaccgccagaagcgccgacggcccccagggcccccccggcctgcccggcctgaagggcgaccccggcgtgcccggcctgcccggcgccaagggcgaggtgggcgccgacggcgtgcccggcttccccggcctgcccggcagagagggcatcgccggcccccagggccccaagggcgacagaggcagcagaggcgagaagggcgaccccggcaaggacggcgtgggccagcccggcctgcccggcccccccggcccccccggccccgtggtgtacgtgagcgagcaggacggcagcgtgctgagcgtgcccggccccgagggcagacccggcttcgccggcttccccggccccgccggccccaagggcaacctgggcagcaagggcgagagaggcagccccggccccaagggcgagaagggcgagcccggcagcatcttcagccccgacggcggcgccctgggccccgcccagaagggcgccaagggcgagcccggcttcagaggcccccccggcccctacggcagacccggctacaagggcgagatcggcttccccggcagacccggcagacccggcatgaacggcctgaagggcgagaagggcgagcccggcgacgccagcctgggcttcggcatgagaggcatgcccggcccccccggcccccccggcccccccggcccccccggcacccccgtgtacgacagcaacgtgttcgccgagagcagcagacccggcccccccggcctgcccggcaaccagggcccccccggccccaagggcgccaagggcgaggtgggcccccccggcccccccggccagttccccttcgacttcctgcagctggaggccgagatgaagggcgagaagggcgacagaggcgacgccggccagaagggcgagagaggcgagcccggcggcggcggcttcttcggcagcagcctgcccggcccccccggcccccccggcccccccggccccagaggctaccccggcatccccggccccaagggcgagagcatcagaggccagcccggcccccccggcccccagggcccccccggcatcggctacgagggcagacagggcccccccggcccccccggcccccccggcccccccagcttccccggcccccacagacagaccatcagcgtgcccggcccccccggcccccccggcccccccggcccccccggcaccatgggcgccagcagcggcgtgagactgtgggccaccagacaggccatgctgggccaggtgcacgaggtgcccgagggctggctgatcttcgtggccgagcaggaggagctgtacgtgagagtgcagaacggcttcagaaaggtgcagctggaggccagaacccccctgcccagaggcaccgacaacgaggtggccgccctgcagccccccgtggtgcagctgcacgacagcaacccctaccccagaagagagcacccccaccccaccgccagaccctggagagccgacgacatcctggccagcccccccagactgcccgagccccagccctaccccggcgccccccaccacagcagctacgtgcacctgagacccgccagacccaccagcccccccgcccacagccacagagacttccagcccgtgctgcacctggtggccctgaacagccccctgagcggcggcatgagaggcatcagaggcgccgacttccagtgcttccagcaggccagagccgtgggcctggccggcaccttcagagccttcctgagcagcagactgcaggacctgtacagcatcgtgagaagagccgacagagccgccgtgcccatcgtgaacctgaaggacgagctgctgttccccagctgggaggccctgttcagcggcagcgagggccccctgaagcccggcgccagaatcttcagcttcgacggcaaggacgtgctgagacaccccacctggccccagaagagcgtgtggcacggcagcgaccccaacggcagaagactgaccgagagctactgcgagacctggagaaccgaggcccccagcgccaccggccaggccagcagcctgctgggcggcagactgctgggccagagcgccgccagctgccaccacgcctacatcgtgctgtgcatcgagaacagcttcatgaccgccagcaagtag

SEQ ID NO: 10152 - DNA, 4020 bp, synthetic construct
  misc_feature 1..4020: note = Description of Artificial Sequence: Synthetic coding sequence
  source 1..4020: mol_type = other DNA
atggcccccagatgcccctggccctggcccagaagaagaagactgctggacgtgctggcccccctggtgctgctgctgggcgtgagagccgccagcgccgagcccgagagaatcagcgaggaggtgggcctgctgcagctgctgggcgacccccccccccagcaggtgacccagaccgacgaccccgacgtgggcctggcctacgtgttcggccccgacgccaacagcggccaggtggccagataccacttccccagcctgttcttcagagacttcagcctgctgttccacatcagacccgccaccgagggccccggcgtgctgttcgccatcaccgacagcgcccaggccatggtgctgctgggcgtgaagctgagcggcgtgcaggacggccaccaggacatcagcctgctgtacaccgagcccggcgccggccagacccacaccgccgccagcttcagactgcccgccttcgtgggccagtggacccacctggccctgagcgtggccggcggcttcgtggccctgtacgtggactgcgaggagttccagagaatgcccctggccagaagcagcagaggcctggagctggagcccggcgccggcctgttcgtggcccaggccggcggcgccgaccccgacaagttccagggcgtgatcgccgagctgaaggtgagaagagacccccaggtgagccccatgcactgcctggacgaggagggcgacgacagcgacggcgccagcggcgacagcggcagcggcctgggcgacgccagagagctgctgagagaggagaccggcgccgccctgaagcccagactgcccgcccccccccccgtgaccaccccccccctggccggcggcagcagcaccgaggacagcagaagcgaggaggtggaggagcagaccaccgtggccagcctgggcgcccagaccctgcccggcagcgacagcgtgagcacctgggacggcagcgtgagaacccccggcggcagagtgaaggagggcggcctgaagggccagaagggcgagcccggcgtgcccggcccccccggcagagccggcccccccggcagcccctgcctgcccggcccccccggcctgccctgccccgtgagccccctgggccccgccggccccgccctgcagaccgtgcccggcccccagggcccccccggcccccccggcagagacggcacccccggcagagacggcgagcccggcgaccccggcgaggacggcaagcccggcgacaccggcccccagggcttccccggcacccccggcgacgtgggccccaagggcgacaagggcgaccccggcgtgggcgagagaggcccccccggcccccagggcccccccggcccccccggccccagcttcagacacgacaagctgaccttcatcgacatggagggcagcggcttcggcggcgacctggaggccctgagaggccccagaggcttccccggcccccccggcccccccggcgtgcccggcctgcccggcgagcccggcagattcggcgtgaacagcagcgacgtgcccggccccgccggcctgcccggcgtgcccggcagagagggcccccccggcttccccggcctgcccggcccccccggcccccccggcagagagggcccccccggcagaaccggccagaagggcagcctgggcgaggccggcgcccccggccacaagggcagcaagggcgcccccggccccgccggcgccagaggcgagagcggcctggccggcgcccccggccccgccggcccccccggcccccccggcccccccggcccccccggccccggcctgcccgccggcttcgacgacatggagggcagcggcggccccttctggagcaccgccagaagcgccgacggcccccagggcccccccggcctgcccggcctgaagggcgaccccggcgtgcccggcctgcccggcgccaagggcgaggtgggcgccgacggcgtgcccggcttccccggcctgcccggcagagagggcatcgccggcccccagggccccaagggcgacagaggcagcagaggcgagaagggcgaccccggcaaggacggcgtgggccagcccggcctgcccggcccccccggcccccccggccccgtggtgtacgtgagcgagcaggacggcagcgtgctgagcgtgcccggccccgagggcagacccggcttcgccggcttccccggccccgccggccccaagggcaacctgggcagcaagggcgagagaggcagccccggccccaagggcgagaagggcgagcccggcagcatcttcagccccgacggcggcgccctgggccccgcccagaagggcgccaagggcgagcccggcttcagaggcccccccggcccctacggcagacccggctacaagggcgagatcggcttccccggcagacccggcagacccggcatgaacggcctgaagggcgagaagggcgagcccggcgacgccagcctgggcttcggcatgagaggcatgcccggcccccccggcccccccggcccccccggcccccccggcacccccgtgtacgacagcaacgtgttcgccgagagcagcagacccggcccccccggcctgcccggcaaccagggcccccccggccccaagggcgccaagggcgaggtgggcccccccggcccccccggccagttccccttcgacttcctgcagctggaggccgagatgaagggcgagaagggcgacagaggcgacgccggccagaagggcgagagaggcgagcccggcggcggcggcttcttcggcagcagcctgcccggcccccccggcccccccggcccccccggccccagaggctaccccggcatccccggccccaagggcgagagcatcagaggccagcccggcccccccggcccccagggcccccccggcatcggctacgagggcagacagggcccccccggcccccccggcccccccggcccccccagcttccccggcccccacagacagaccatcagcgtgcccggcccccccggcccccccggcccccccggcccccccggcaccatgggcgccagcagcggcgtgagactgtgggccaccagacaggccatgctgggccaggtgcacgaggtgcccgagggctggctgatcttcgtggccgagcaggaggagctgtacgtgagagtgcagaacggcttcagaaaggtgcagctggaggccagaacccccctgcccagaggcaccgacaacgaggtggccgccctgcagccccccgtggtgcagctgcacgacagcaacccctaccccagaagagagcacccccaccccaccgccagaccctggagagccgacgacatcctggccagcccccccagactgcccgagccccagccctaccccggcgccccccaccacagcagctacgtgcacctgagacccgccagacccaccagcccccccgcccacagccacagagacttccagcccgtgctgcacctggtggccctgaacagccccctgagcggcggcatgagaggcatcagaggcgccgacttccagtgcttccagcaggccagagccgtgggcctggccggcaccttcagagccttcctgagcagcagactgcaggacctgtacagcatcgtgagaagagccgacagagccgccgtgcccatcgtgaacctgaaggacgagctgctgttccccagctgggaggccctgttcagcggcagcgagggccccctgaagcccggcgccagaatcttcagcttcgacggcaaggacgtgctgagacaccccacctggccccagaagagcgtgtggcacggcagcgaccccaacggcagaagactgaccgagagctactgcgagacctggagaaccgaggcccccagcgccaccggccaggccagcagcctgctgggcggcagactgctgggccagagcgccgccagctgccaccacgcctacatcgtgctgtgcatcgagaacagcttcatgaccgccagcaagtag

SEQ ID NO: 10153 - DNA, 4020 bp, synthetic construct
  misc_feature 1..4020: note = Description of Artificial Sequence: Synthetic coding sequence
  source 1..4020: mol_type = other DNA
atggcccccagatgcccctggccctggcccagaagaagaagactgctggacgtgctggcccccctggtgctgctgctgggcgtgagagccgccagcgccgagcccgagagaatcagcgaggaggtgggcctgctgcagctgctgggcgacccccccccccagcaggtgacccagaccgacgaccccgacgtgggcctggcctacgtgttcggccccgacgccaacagcggccaggtggccagataccacttccccagcctgttcttcagagacttcagcctgctgttccacatcagacccgccaccgagggccccggcgtgctgttcgccatcaccgacagcgcccaggccatggtgctgctgggcgtgaagctgagcggcgtgcaggacggccaccaggacatcagcctgctgtacaccgagcccggcgccggccagacccacaccgccgccagcttcagactgcccgccttcgtgggccagtggacccacctggccctgagcgtggccggcggcttcgtggccctgtacgtggactgcgaggagttccagagaatgcccctggccagaagcagcagaggcctggagctggagcccggcgccggcctgttcgtggcccaggccggcggcgccgaccccgacaagttccagggcgtgatcgccgagctgaaggtgagaagagacccccaggtgagccccatgcactgcctggacgaggagggcgacgacagcgacggcgccagcggcgacagcggcagcggcctgggcgacgccagagagctgctgagagaggagaccggcgccgccctgaagcccagactgcccgcccccccccccgtgaccaccccccccctggccggcggcagcagcaccgaggacagcagaagcgaggaggtggaggagcagaccaccgtggccagcctgggcgcccagaccctgcccggcagcgacagcgtgagcacctgggacggcagcgtgagaacccccggcggcagagtgaaggagggcggcctgaagggccagaagggcgagcccggcgtgcccggcccccccggcagagccggcccccccggcagcccctgcctgcccggcccccccggcctgccctgccccgtgagccccctgggccccgccggccccgccctgcagaccgtgcccggcccccagggcccccccggcccccccggcagagacggcacccccggcagagacggcgagcccgtgagcccccacgtgccccccagccccggcgacaccggcccccagggcttccccggcacccccggcgacgtgggccccaagggcgacaagggcgaccccggcgtgggcgagagaggcccccccggcccccagggcccccccggcccccccggccccagcttcagacacgacaagctgaccttcatcgacatggagggcagcggcttcggcggcgacctggaggccctgagaggccccagaggcttccccggcccccccggcccccccggcgtgcccggcctgcccggcgagcccggcagattcggcgtgaacagcagcgacgtgcccggccccgccggcctgcccggcgtgcccggcagagagggcccccccggcttccccggcctgcccggcccccccggcccccccggcagagagggcccccccggcagaaccggccagaagggcagcctgcagggcgccggcgcccccggcgtgcagggcagcaagggcgcccccggccccgccggcgccagaggcgagagcggcctggccggcgcccccggccccgccggcccccccggcccccccggcccccccggcccccccggccccggcctgcccgccggcttcgacgacatggagggcagcggcggccccttctggagcaccgccagaagcgccgacggcccccaggagccccccgccctgcacggcatcggcggcgaccccggcgtgcccggcctgcccggcgccaagggcgaggtgggcgccgacggcgtgcccggcttccccggcctgcccggcagagagggcatcgccggcccccagggccccaagggcgacagaggcagcagaggcgagaagggcgaccccggcaaggacggcgtgggccagcccggcctgcccggcccccccggcccccccggccccgtggtgtacgtgagcgagcaggacggcagcgtgctgagcgtgcccggccccgagggcagacccggcttcgccggcttccccggccccgccggccccaagggcaacctgggcagcaagggcgagagaggcagccccggccccaagggcgagaagggcgagcccggcagcatcttcagccccgacggcggcgccctgggccccgcccagaagggcgccaagggcgagcccggcttcagaggcccccccggcccctacggcagacccggctacaagggcgagatcggcttccccggcagacccggcagacccggcatgaacggcctgaagggcgagaagggcgagcccggcgacgccagcctgggcttcggcatgagaggcatgcccggcccccccggcccccccggcccccccggcccccccggcacccccgtgtacgacagcaacgtgttcgccgagagcagcagacccggcccccccggcctgcccggcaaccagggcccccccggccccaagggcgccaagggcgaggtgggcccccccggcccccccggccagttccccttcgacttcctgcagctggaggccgagatgaagggcgagaagggcgacagaggcgacgccggccagaagggcgagagaggcgagcccggcggcggcggcttcttcggcagcagcctgcccggcccccccggcccccccggcccccccggccccagaggctaccccggcatccccggccccaagggcgagagcatcagaggccagcccggcccccccggcccccagggcccccccggcatcggctacgagggcagacagggcccccccggcccccccggcccccccggcccccccagcttccccggcccccacagacagaccatcagcgtgcccggcccccccggcccccccggcccccccggcccccccggcaccatgggcgccagcagcggcgtgagactgtgggccaccagacaggccatgctgggccaggtgcacgaggtgcccgagggctggctgatcttcgtggccgagcaggaggagctgtacgtgagagtgcagaacggcttcagaaaggtgcagctggaggccagaacccccctgcccagaggcaccgacaacgaggtggccgccctgcagccccccgtggtgcagctgcacgacagcaacccctaccccagaagagagcacccccaccccaccgccagaccctggagagccgacgacatcctggccagcccccccagactgcccgagccccagccctaccccggcgccccccaccacagcagctacgtgcacctgagacccgccagacccaccagcccccccgcccacagccacagagacttccagcccgtgctgcacctggtggccctgaacagccccctgagcggcggcatgagaggcatcagaggcgccgacttccagtgcttccagcaggccagagccgtgggcctggccggcaccttcagagccttcctgagcagcagactgcaggacctgtacagcatcgtgagaagagccgacagagccgccgtgcccatcgtgaacctgaaggacgagctgctgttccccagctgggaggccctgttcagcggcagcgagggccccctgaagcccggcgccagaatcttcagcttcgacggcaaggacgtgctgagacaccccacctggccccagaagagcgtgtggcacggcagcgaccccaacggcagaagactgaccgagagctactgcgagacctggagaaccgaggcccccagcgccaccggccaggccagcagcctgctgggcggcagactgctgggccagagcgccgccagctgccaccacgcctacatcgtgctgtgcatcgagaacagcttcatgaccgccagcaagtag

SEQ ID NO: 10154 - DNA, 5265 bp, synthetic construct
  misc_feature 1..5265: note = Description of Artificial Sequence: Synthetic coding sequence
  source 1..5265: mol_type = other DNA
atggccccctacccctgcggctgccacatcctgctgctgctgttctgctgcctggccgccgccagagccaacctgctgaacctgaactggctgtggttcaacaacgaggacaccagccacgccgccaccaccatccccgagccccagggccccctgcccgtgcagcccaccgccgacaccaccacccacgtgacccccagaaacggcagcaccgagcccgccaccgcccccggcagccccgagccccccagcgagctgctggaggacggccaggacacccccaccagcgccgagagccccgacgcccccgaggagaacatcgccggcgtgggcgccgagatcctgaacgtggccaagggcatcagaagcttcgtgcagctgtggaacgacaccgtgcccaccgagagcctggccagagccgagaccctggtgctggagacccccgtgggccccctggccctggccggccccagcagcaccccccaggagaacggcaccaccctgtggcccagcagaggcatccccagcagccccggcgcccacaccaccgaggccggcaccctgcccgcccccacccccagcccccccagcctgggcagaccctgggcccccctgaccggccccagcgtgcccccccccagcagcggcagagccagcctgagcagcctgctgggcggcgcccccccctggggcagcctgcaggaccccgacagccagggcctgagccccgccgccgccgcccccagccagcagctgcagagacccgacgtgagactgagaacccccctgctgcaccccctggtgatgggcagcctgggcaagcacgccgcccccagcgccttcagcagcggcctgcccggcgccctgagccaggtggccgtgaccaccctgaccagagacagcggcgcctgggtgagccacgtggccaacagcgtgggccccggcctggccaacaacagcgccctgctgggcgccgaccccgaggcccccgccggcagatgcctgcccctgccccccagcctgcccgtgtgcggccacctgggcatcagcagattctggctgcccaaccacctgcaccacgagagcggcgagcaggtgagagccggcgccagagcctggggcggcctgctgcagacccactgccaccccttcctggcctggttcttctgcctgctgctggtgcccccctgcggcagcgtgcccccccccgccccccccccctgctgccagttctgcgaggccctgcaggacgcctgctggagcagactgggcggcggcagactgcccgtggcctgcgccagcctgcccacccaggaggacggctactgcgtgctgatcggccccgccgccgagagaatcagcgaggaggtgggcctgctgcagctgctgggcgacccccccccccagcaggtgacccagaccgacgaccccgacgtgggcctggcctacgtgttcggccccgacgccaacagcggccaggtggccagataccacttccccagcctgttcttcagagacttcagcctgctgttccacatcagacccgccaccgagggccccggcgtgctgttcgccatcaccgacagcgcccaggccatggtgctgctgggcgtgaagctgagcggcgtgcaggacggccaccaggacatcagcctgctgtacaccgagcccggcgccggccagacccacaccgccgccagcttcagactgcccgccttcgtgggccagtggacccacctggccctgagcgtggccggcggcttcgtggccctgtacgtggactgcgaggagttccagagaatgcccctggccagaagcagcagaggcctggagctggagcccggcgccggcctgttcgtggcccaggccggcggcgccgaccccgacaagttccagggcgtgatcgccgagctgaaggtgagaagagacccccaggtgagccccatgcactgcctggacgaggagggcgacgacagcgacggcgccagcggcgacagcggcagcggcctgggcgacgccagagagctgctgagagaggagaccggcgccgccctgaagcccagactgcccgcccccccccccgtgaccaccccccccctggccggcggcagcagcaccgaggacagcagaagcgaggaggtggaggagcagaccaccgtggccagcctgggcgcccagaccctgcccggcagcgacagcgtgagcacctgggacggcagcgtgagaacccccggcggcagagtgaaggagggcggcctgaagggccagaagggcgagcccggcgtgcccggcccccccggcagagccggcccccccggcagcccctgcctgcccggcccccccggcctgccctgccccgtgagccccctgggccccgccggccccgccctgcagaccgtgcccggcccccagggcccccccggcccccccggcagagacggcacccccggcagagacggcgagcccgtgagcccccacgtgccccccagccccggcgacaccggcccccagggcttccccggcacccccggcgacgtgggccccaagggcgacaagggcgaccccggcgtgggcgagagaggcccccccggcccccagggcccccccggcccccccggccccagcttcagacacgacaagctgaccttcatcgacatggagggcagcggcttcggcggcgacctggaggccctgagaggccccagaggcttccccggcccccccggcccccccggcgtgcccggcctgcccggcgagcccggcagattcggcgtgaacagcagcgacgtgcccggccccgccggcctgcccggcgtgcccggcagagagggcccccccggcttccccggcctgcccggcccccccggcccccccggcagagagggcccccccggcagaaccggccagaagggcagcctgcagggcgccggcgcccccggcgtgcagggcagcaagggcgcccccggccccgccggcgccagaggcgagagcggcctggccggcgcccccggccccgccggcccccccggcccccccggcccccccggcccccccggccccggcctgcccgccggcttcgacgacatggagggcagcggcggccccttctggagcaccgccagaagcgccgacggcccccagggcccccccggcctgcccggcctgaagggcgaccccggcgtgcccggcctgcccggcgccaagggcgaggtgggcgccgacggcgtgcccggcttccccggcctgcccggcagagagggcatcgccggcccccagggccccaagggcgacagaggcagcagaggcgagaagggcgaccccggcaaggacggcgtgggccagcccggcctgcccggcccccccggcccccccggccccgtggtgtacgtgagcgagcaggacggcagcgtgctgagcgtgcccggccccgagggcagacccggcttcgccggcttccccggccccgccggccccaagggcaacctgggcagcaagggcgagagaggcagccccggccccaagggcgagaagggcgagcccggcagcatcttcagccccgacggcggcgccctgggccccgcccagaagggcgccaagggcgagcccggcttcagaggcccccccggcccctacggcagacccggctacaagggcgagatcggcttccccggcagacccggcagacccggcatgaacggcctgaagggcgagaagggcgagcccggcgacgccagcctgggcttcggcatgagaggcatgcccggcccccccggcccccccggcccccccggcccccccggcacccccgtgtacgacagcaacgtgttcgccgagagcagcagacccggcccccccggcctgcccggcaaccagggcccccccggccccaagggcgccaagggcgaggtgggcccccccggcccccccggccagttccccttcgacttcctgcagctggaggccgagatgaagggcgagaagggcgacagaggcgacgccggccagaagggcgagagaggcgagcccggcggcggcggcttcttcggcagcagcctgcccggcccccccggcccccccggcccccccggccccagaggctaccccggcatccccggccccaagggcgagagcatcagaggccagcccggcccccccggcccccagggcccccccggcatcggctacgagggcagacagggcccccccggcccccccggcccccccggcccccccagcttccccggcccccacagacagaccatcagcgtgcccggcccccccggcccccccggcccccccggcccccccggcaccatgggcgccagcagcggcgtgagactgtgggccaccagacaggccatgctgggccaggtgcacgaggtgcccgagggctggctgatcttcgtggccgagcaggaggagctgtacgtgagagtgcagaacggcttcagaaaggtgcagctggaggccagaacccccctgcccagaggcaccgacaacgaggtggccgccctgcagccccccgtggtgcagctgcacgacagcaacccctaccccagaagagagcacccccaccccaccgccagaccctggagagccgacgacatcctggccagcccccccagactgcccgagccccagccctaccccggcgccccccaccacagcagctacgtgcacctgagacccgccagacccaccagcccccccgcccacagccacagagacttccagcccgtgctgcacctggtggccctgaacagccccctgagcggcggcatgagaggcatcagaggcgccgacttccagtgcttccagcaggccagagccgtgggcctggccggcaccttcagagccttcctgagcagcagactgcaggacctgtacagcatcgtgagaagagccgacagagccgccgtgcccatcgtgaacctgaaggacgagctgctgttccccagctgggaggccctgttcagcggcagcgagggccccctgaagcccggcgccagaatcttcagcttcgacggcaaggacgtgctgagacaccccacctggccccagaagagcgtgtggcacggcagcgaccccaacggcagaagactgaccgagagctactgcgagacctggagaaccgaggcccccagcgccaccggccaggccagcagcctgctgggcggcagactgctgggccagagcgccgccagctgccaccacgcctacatcgtgctgtgcatcgagaacagcttcatgaccgccagcaagtag

SEQ ID NO: 10155 - DNA, 1623 bp, synthetic construct
  misc_feature 1..1623: note = Description of Artificial Sequence: Synthetic coding sequence
  source 1..1623: mol_type = other DNA
atgggccccggcgagagagccggcggcggcggcgacgccggcaagggcaacgccgccggcggcggcggcggcggcagaagcgccaccaccgccggcagcagagccgtgagcgccctgtgcctgctgctgagcgtgggcagcgccgccgcctgcctgctgctgggcgtgcaggccgccgccctgcagggcagagtggccgccctggaggaggagagagagctgctgagaagagccggcccccccggcgccctggacgcctgggccgagccccacctggagagactgctgagagagaagctggacggcctggccaagatcagaaccgccagagaggcccccagcgagtgcgtgtgcccccccggcccccccggcagaagaggcaagcccggcagaagaggcgaccccggcccccccggccagagcggcagagacggctaccccggccccctgggcctggacggcaagcccggcctgcccggccccaagggcgagaagggcgcccccggcgacttcggccccagaggcgaccagggccaggacggcgccgccggcccccccggcccccccggcccccccggcgccagaggcccccccggcgacaccggcaaggacggccccagaggcgcccagggccccgccggccccaagggcgagcccggccaggacggcgagatgggccccaagggcccccccggccccaagggcgagcccggcgtgcccggcaagaagggcgacgacggcacccccagccagcccggcccccccggccccaagggcgagcccggcagcatgggccccagaggcgagaacggcgtggacggcgcccccggccccaagggcgagcccggccacagaggcaccgacggcgccgccggccccagaggcgcccccggcctgaagggcgagcagggcgacaccgtggtgatcgactacgacggcagaatcctggacgccctgaagggcccccccggcccccagggcccccccggcccccccggcatccccggcgccaagggcgagctgggcctgcccggcgcccccggcatcgacggcgagaagggccccaagggccagaagggcgaccccggcgagcccggccccgccggcctgaagggcgaggccggcgagatgggcctgagcggcctgcccggcgccgacggcctgaagggcgagaagggcgagagcgccagcgacagcctgcaggagagcctggcccagctgatcgtggagcccggcccccccggcccccccggcccccccggccccatgggcctgcagggcatccagggccccaagggcctggacggcgccaagggcgagaagggcgccagcggcgagagaggccccagcggcctgcccggccccgtgggcccccccggcctgatcggcctgcccggcaccaagggcgagaagggcagacccggcgagcccggcctggacggcttccccggccccagaggcgagaagggcgacagaagcgagagaggcgagaagggcgagagaggcgtgcccggcagaaagggcgtgaagggccagaagggcgagcccggcccccccggcctggaccagccctgccccgtgggccccgacggcctgcccgtgcccggctgctggcacaagtag

SEQ ID NO: 10156 - DNA, 930 bp, synthetic construct
  misc_feature 1..930: note = Description of Artificial Sequence: Synthetic coding sequence
  source 1..930: mol_type = other DNA
atggagagcagaagcggcatccaggccggcgtgagatgcagagacctgggcagcctgcagcccccccccctggccctgaagcagttcagcagcctgagcctgcccagcagctgggactacagaagactgccccccagatgcggcttcctgttcgaggtgagcgagaccaccaacccccccgccggcaccaacagcagacacaccctgaccgtgaagctggacggcctggccaagatcagaaccgccagagaggcccccagcgagtgcgtgtgcccccccggcccccccggcagaagaggcaagcccggcagaagaggcgaccccggcccccccggccccctgggcctggacggcaagcccggcctgcccggccccaagggcgagaagggcgcccccggcgacttcggccccagaggcgaccagggccaggacggcgccgccggcccccccggcccccccggcccccccggcgccagaggcccccccggcgacaccggcaaggacggccccagaggcgcccagggccccgccggccccaagggcgagcccggccaggacggcgagatgggccccaagggcccccccggccccaagggcgagcccggcgtgcccggcaagaagggcgacgacggcacccccagccagcccggcccccccggccccaagggcgagcccggcagcatgggccccagaggcgagaacggcgtggacggcgcccccggccccaagggcgagcccggccacagaggcaccgacggcgccgccggccccagaggcgacgtgagagaccccggcctgggcagcgtgagcagctgcagccagagactggccagcagcagcaagaagaacggcagcgagcccccccccggctgcgccggctgccccagaccccagggcagagccggcagacacagcggcgacagactgtag

SEQ ID NO: 10157 - DNA, 1665 bp, synthetic construct
  misc_feature 1..1665: note = Description of Artificial Sequence: Synthetic coding sequence
  source 1..1665: mol_type = other DNA
atgaccgcccccggcgccgccggcagatgcccccccaccacctggctgggcagcctgctgctgctggtgtgcctgctggccagcagaagcatcaccgaggaggtgagcgagtactgcagccacatgatcggcagcggccacctgcagagcctgcagagactgatcgacagccagatggagaccagctgccagatcaccttcgagttcgtggaccaggagcagctgaaggaccccgtgtgctacctgaagaaggccttcctgctggtgcaggacatcatggaggacaccatgagattcagagacaacacccccaacgccatcgccatcgtgcagctgcaggagctgagcctgagactgaagagctgcttcaccaaggactacgaggagcacgacaaggcctgcgtgagaaccttctacgagacccccctgcagctgctggagaaggtgaagaacgtgttcaacgagaccaagaacctgctggacaaggactggaacatcttcagcaagaactgcaacaacagcttcgccgagtgcagcagccaggacgtggtgaccaagcccgactgcaactgcctgtaccccaaggccatccccagcagcgaccccgccagcgtgagcccccaccagcccctggcccccagcatggcccccgtggccggcctgacctgggaggacagcgagggcaccgagggcagcagcctgctgcccggcgagcagcccctgcacaccgtggaccccggcagcgccaagcagagaccccccagaagcacctgccagagcttcgagccccccgagacccccgtggtgaaggacagcaccatcggcggcagcccccagcccagacccagcgtgggcgccttcaaccccggcatggaggacatcctggacagcgccatgggcaccaactgggtgcccgaggaggccagcggcgaggccagcgagatccccgtgccccagggcaccgagctgagccccagcagacccggcggcggcagcatgcagaccgagcccgccagacccagcaacttcctgagcgccagcagccccctgcccgccagcgccaagggccagcagcccgccgacgtgaccggcaccgccctgcccagagtgggccccgtgagacccaccggccaggactggaaccacaccccccagaagaccgaccaccccagcgccctgctgagagacccccccgagcccggcagccccagaatcagcagcctgagaccccagggcctgagcaaccccagcaccctgagcgcccagccccagctgagcagaagccacagcagcggcagcgtgctgcccctgggcgagctggagggcagaagaagcaccagagacagaagaagccccgccgagcccgagggcggccccgccagcgagggcgccgccagacccctgcccagattcaacagcgtgcccctgaccgacaccggccacgagagacagagcgagggcagcttcagcccccagctgcaggagagcgtgttccacctgctggtgcccagcgtgatcctggtgctgctggccgtgggcggcctgctgttctacagatggagaagaagaagccaccaggagccccagagagccgacagccccctggagcagcccgagggcagccccctgacccaggacgacagacaggtggagctgcccgtgtag

SEQ ID NO: 10158 - DNA, 1317 bp, synthetic construct
  misc_feature 1..1317: note = Description of Artificial Sequence: Synthetic coding sequence
  source 1..1317: mol_type = other DNA
atgaccgcccccggcgccgccggcagatgcccccccaccacctggctgggcagcctgctgctgctggtgtgcctgctggccagcagaagcatcaccgaggaggtgagcgagtactgcagccacatgatcggcagcggccacctgcagagcctgcagagactgatcgacagccagatggagaccagctgccagatcaccttcgagttcgtggaccaggagcagctgaaggaccccgtgtgctacctgaagaaggccttcctgctggtgcaggacatcatggaggacaccatgagattcagagacaacacccccaacgccatcgccatcgtgcagctgcaggagctgagcctgagactgaagagctgcttcaccaaggactacgaggagcacgacaaggcctgcgtgagaaccttctacgagacccccctgcagctgctggagaaggtgaagaacgtgttcaacgagaccaagaacctgctggacaaggactggaacatcttcagcaagaactgcaacaacagcttcgccgagtgcagcagccaggacgtggtgaccaagcccgactgcaactgcctgtaccccaaggccatccccagcagcgaccccgccagcgtgagcccccaccagcccctggcccccagcatggcccccgtggccggcctgacctgggaggacagcgagggcaccgagggcagcagcctgctgcccggcgagcagcccctgcacaccgtggaccccggcagcgccaagcagagaccccccagaagcacctgccagagcttcgagccccccgagacccccgtggtgaaggacagcaccatcggcggcagcccccagcccagacccagcgtgggcgccttcaaccccggcatggaggacatcctggacagcgccatgggcaccaactgggtgcccgaggaggccagcggcgaggccagcgagatccccgtgccccagggcaccgagctgagccccagcagacccggcggcggcagcatgcagaccgagcccgccagacccagcaacttcctgagcgccagcagccccctgcccgccagcgccaagggccagcagcccgccgacgtgaccggccacgagagacagagcgagggcagcttcagcccccagctgcaggagagcgtgttccacctgctggtgcccagcgtgatcctggtgctgctggccgtgggcggcctgctgttctacagatggagaagaagaagccaccaggagccccagagagccgacagccccctggagcagcccgagggcagccccctgacccaggacgacagacaggtggagctgcccgtgtag

SEQ ID NO: 10159 - DNA, 360 bp, synthetic construct
  misc_feature 1..360: note = Description of Artificial Sequence: Synthetic coding sequence
  source 1..360: mol_type = other DNA
atgaccgcccccggcgccgccggcagatgcccccccaccacctggctgggcagcctgctgctgctggtgtgcctgctggccagcagaagcatcaccgaggaggtgagcgagtactgcagccacatgatcggcagcggccacctgcagagcctgcagagactgatcgacagccagatggagaccagctgccagatcaccttcgagttcgtggaccaggagcagctgaaggaccccgtgtgctacctgaagaaggccttcctgctggtgcaggacatcatggaggacaccatgagattcagagacaacacccccaacgccatcgccatcgtgcagctgcaggagctgagcctgagactgtag

SEQ ID NO: 10160 - DNA, 1317 bp, synthetic construct; identical to SEQ ID NO: 10158
  misc_feature 1..1317: note = Description of Artificial Sequence: Synthetic coding sequence
  source 1..1317: mol_type = other DNA

SEQ ID NO: 10161 - DNA, 1665 bp, synthetic construct; identical to SEQ ID NO: 10157
  misc_feature 1..1665: note = Description of Artificial Sequence: Synthetic coding sequence
  source 1..1665: mol_type = other DNA

SEQ ID NO: 10162 - DNA, 771 bp, synthetic construct
  misc_feature 1..771: note = Description of Artificial Sequence: Synthetic coding sequence
  source 1..771: mol_type = other DNA
atgaccgcccccggcgccgccggcagatgcccccccaccacctggctgggcagcctgctgctgctggtgtgcctgctggccagcagaagcatcaccgaggaggtgagcgagtactgcagccacatgatcggcagcggccacctgcagagcctgcagagactgatcgacagccagatggagaccagctgccagatcaccttcgagttcgtggaccaggagcagctgaaggaccccgtgtgctacctgaagaaggccttcctgctggtgcaggacatcatggaggacaccatgagattcagagacaacacccccaacgccatcgccatcgtgcagctgcaggagctgagcctgagactgaagagctgcttcaccaaggactacgaggagcacgacaaggcctgcgtgagaaccttctacgagacccccctgcagctgctggagaaggtgaagaacgtgttcaacgagaccaagaacctgctggacaaggactggaacatcttcagcaagaactgcaacaacagcttcgccgagtgcagcagccagggccacgagagacagagcgagggcagcttcagcccccagctgcaggagagcgtgttccacctgctggtgcccagcgtgatcctggtgctgctggccgtgggcggcctgctgttctacagatggagaagaagaagccaccaggagccccagagagccgacagccccctggagcagcccgagggcagccccctgacccaggacgacagacaggtggagctgcccgtgtag

SEQ ID NO: 10163 - DNA, 828 bp, synthetic construct
  misc_feature 1..828: note = Description of Artificial Sequence: Synthetic coding sequence
  source 1..828: mol_type = other DNA
ggcagccccggcatggccggcgccctgtgcgccggccacatcgccggcctgtacggcgacagaggcctggtgcccagcaccagaagagaggagagaggcggcagaaagacctggcagaccggcgccgccagaccccagggcggcgccagaggcgccggcggcccctggcaccccgacagacaccccagacccaaggagaccagaggcaacctgggccccctggagacccccgccagatgggccacccagggccccgccgcccccagcgagcccatccccggcatcaagggcaccaagggcagccccggcaacatcaaggaccagcccagacccgccttcagcgccatcagaagaaaccccaacggcggccagagaggccacagcaccagaagcagccccaccagaaagaacagaaccagaaccacccccgccgacagcagcgccctgtaccccgccaccaccaccagccccagcagatgctgccccagcggcaagagcgcctgccccagcagccccccccagggcgccagaagcgacgccccctgggccagcgtgaccccccccaccagaggcagcagcagatggtgccagggcgcctggtgcttcagctgcagcagagtgaccagaagcggcctgaagaagacccccaagagagtgaccttcaccagagccctgagacccaccgccagcagcgccgccagcagcagcagccacctgcccgagcccggcaaggaccccctgccccacccccccctgtggctgccctgcagcgcctgcaagatgggcgccctgctgctgcagctgctgaagggcggcggctggctgtag

SEQ ID NO: 10164 - DNA, 738 bp, synthetic construct
  misc_feature 1..738: note = Description of Artificial Sequence: Synthetic coding sequence
  source 1..738: mol_type = other DNA
atggagggccccagaggctggctggtgctgtgcgtgctggccatcagcctggccagcatggtgaccgaggacctgtgcagagcccccgacggcaagaagggcgaggccggcagacccggcagaagaggcagacccggcctgaagggcgagcagggcgagcccggcgcccccggcatcagaaccggcatccagggcctgaagggcgaccagggcgagcccggccccagcggcaaccccggcaaggtgggctaccccggccccagcggccccctgggcgccagaggcatccccggcatcaagggcaccaagggcagccccggcaacatcaaggaccagcccagacccgccttcagcgccatcagaagaaacccccccatgggcggcaacgtggtgatcttcgacaccgtgatcaccaaccaggaggagccctaccagaaccacagcggcagattcgtgtgcaccgtgcccggctactactacttcaccttccaggtgctgagccagtgggagatctgcctgagcatcgtgagcagcagcagaggccaggtgagaagaagcctgggcttctgcgacaccaccaacaagggcctgttccaggtggtgagcggcggcatggtgctgcagctgcagcagggcgaccaggtgtgggtggagaaggaccccaagaagggccacatctaccagggcagcgaggccgacagcgtgttcagcggcttcctgatcttccccagcgcctag

SEQ ID NO: 10165 - DNA, 738 bp, synthetic construct; identical to SEQ ID NO: 10164
  misc_feature 1..738: note = Description of Artificial Sequence: Synthetic coding sequence
  source 1..738: mol_type = other DNA

SEQ ID NO: 10166 - DNA, 666 bp, synthetic construct
  misc_feature 1..666: note = Description of Artificial Sequence: Synthetic coding sequence
  source 1..666: mol_type = other DNA
atggagggccccagaggctggctggtgctgtgcgtgctggccatcagcctggccagcatggtgaccgaggacctgtgcagagcccccgacggcaagaagggcgaggccggcagacccggcagaagaggcagacccggcctgaagggcgagcagggcgagcccggcgcccccggcatcagaaccggcatccagggcctgaagggcgaccagggcgagcccggccccagcggcaaccccggcaaggtgggctaccccggccccagcggccccctgggcgccagaggcatccccggcatcaagggcaccaagggcagccccggcaacatcaaggaccagcccagacccgccttcagcgccatcagaagaaacccccccatgggcggcaacgtggtgatcttcgacaccgtgatcaccaaccaggaggagccctaccagaaccacagcggcagattcgtgtgcaccgtgcccggctactactacttcaccttccaggtgctgagccagtgggagatctgcctgagcatcgtgagcagcagcagaggccaggtgagaagaagcctgggcttctgcgacaccaccaacaagggcctgttccaggtggtgagcggcggcatggtgctgcagctgcagcagggcgaccaggtgtgggtggagaaggacccctag

SEQ ID NO: 10167 - DNA, 1050 bp, synthetic construct
  misc_feature 1..1050: note = Description of Artificial Sequence: Synthetic coding sequence
  source 1..1050: mol_type = other DNA
atgaccgccgccagcatgggccccgtgagagtggccttcgtggtgctgctggccctgtgcagcagacccgccgtgggccagaactgcagcggcccctgcagatgccccgacgagcccgcccccagatgccccgccggcgtgagcctggtgctggacggctgcggctgctgcagagtgtgcgccaagcagctgggcgagctgtgcaccgagagagacccctgcgacccccacaagggcctgttctgccacttcggcagccccgccaacagaaagatcggcgtgtgcaccgccaaggacggcgccccctgcatcttcggcggcaccgtgtacagaagcggcgagagcttccagagcagctgcaagtaccagtgcacctgcctggacggcgccgtgggctgcatgcccctgtgcagcatggacgtgagactgcccagccccgactgccccttccccagaagagtgaagctgcccggcaagtgctgcgaggagtgggtgtgcgacgagcccaaggaccagaccgtggtgggccccgccctggccgcctacagactggaggacaccttcggccccgaccccaccatgatcagagccaactgcctggtgcagaccaccgagtggagcgcctgcagcaagacctgcggcatgggcatcagcaccagagtgaccaacgacaacgccagctgcagactggagaagcagagcagactgtgcatggtgagaccctgcgaggccgacctggaggagaacatcaagaagggcaagaagtgcatcagaacccccaagatcagcaagcccatcaagttcgagctgagcggctgcaccagcatgaagacctacagagccaagttctgcggcgtgtgcaccgacggcagatgctgcaccccccacagaaccaccaccctgcccgtggagttcaagtgccccgacggcgaggtgatgaagaagaacatgatgttcatcaagacctgcgcctgccactacaactgccccggcgacaacgacatcttcgagagcctgtactacagaaagatgtacggcgacatggcctag

SEQ ID NO: 10168 - DNA, 2238 bp, synthetic construct
  misc_feature 1..2238: note = Description of Artificial Sequence: Synthetic coding sequence
  source 1..2238: mol_type = other DNA
atggagagaccccccggcctgagacccggcgccggcggcccctgggagatgagagagagactgggcaccggcggcttcggcaacgtgtgcctgtaccagcacagagagctggacctgaagatcgccatcaagagctgcagactggagctgagcaccaagaacagagagagatggtgccacgagatccagatcatgaagaagctgaaccacgccaacgtggtgaaggcctgcgacgtgcccgaggagctgaacatcctgatccacgacgtgcccctgctggccatggagtactgcagcggcggcgacctgagaaagctgctgaacaagcccgagaactgctgcggcctgaaggagagccagatcctgagcctgctgagcgacatcggcagcggcatcagatacctgcacgagaacaagatcatccacagagacctgaagcccgagaacatcgtgctgcaggacgtgggcggcaagatcatccacaagatcatcgacctgggctacgccaaggacgtggaccagggcagcctgtgcaccagcttcgtgggcaccctgcagtacctggcccccgagctgttcgagaacaagccctacaccgccaccgtggactactggagcttcggcaccatggtgttcgagtgcatcgccggctacagacccttcctgcaccacctgcagcccttcacctggcacgagaagatcaagaagaaggaccccaagtgcatcttcgcctgcgaggagatgagcggcgaggtgagattcagcagccacctgccccagcccaacagcctgtgcagcctggtggtggagcccatggagaactggctgcagctgatgctgaactgggacccccagcagagaggcggccccgtggacctgaccctgaagcagcccagatgcttcgtgctgatggaccacatcctgaacctgaagatcgtgcacatcctgaacatgaccagcgccaagatcatcagcttcctgctgccccccgacgagagcctgcacagcctgcagagcagaatcgagagagagaccggcatcaacaccggcagccaggagctgctgagcgagaccggcatcagcctggaccccagaaagcccgccagccagtgcgtgctggacggcgtgagaggctgcgacagctacatggtgtacctgttcgacaagagcaagaccgtgtacgagggccccttcgccagcagaagcctgagcgactgcgtgaactacatcgtgcaggacagcaagatccagctgcccatcatccagctgagaaaggtgtgggccgaggccgtgcactacgtgagcggcctgaaggaggactacagcagactgttccagggccagagagccgccatgctgagcctgctgagatacaacgccaacctgaccaagatgaagaacaccctgatcagcgccagccagcagctgaaggccaagctggagttcttccacaagagcatccagctggacctggagagatacagcgagcagatgacctacggcatcagcagcgagaagatgctgaaggcctggaaggagatggaggagaaggccatccactacgccgaggtgggcgtgatcggctacctggaggaccagatcatgagcctgcacgccgagatcatggagctgcagaagagcccctacggcagaagacagggcgacctgatggagagcctggagcagagagccatcgacctgtacaagcagctgaagcacagacccagcgaccacagctacagcgacagcaccgagatggtgaagatcatcgtgcacaccgtgcagagccaggacagagtgctgaaggagctgttcggccacctgagcaagctgctgggctgcaagcagaagatcatcgacctgctgcccaaggtggaggtggccctgagcaacatcaaggaggccgacaacaccgtgatgttcatgcagggcaagagacagaaggagatctggcacctgctgaagatcgcctgcacccagagcagcgccagaagcctggtgggcagcagcctggagggcgccgtgaccccccagaccagcgcctggctgccccccaccagcgccgagcacgaccacagcctgagctgcgtggtgaccccccaggacggcgagaccagcgcccagatgatcgaggagaacctgaactgcctgggccacctgagcaccatcatccacgaggccaacgaggagcagggcaacagcatgatgaacctggactggagctggctgaccgagtag

SEQ ID NO: 10169 - DNA, 1653 bp, synthetic construct
  misc_feature 1..1653: note = Description of Artificial Sequence: Synthetic coding sequence
  source 1..1653: mol_type = other DNA
atgtggaaggccagcgccggccacgccgtgagcatcgcccaggacgacgccggcgccgacgactgggagaccgaccccgacttcgtgaacgacgtgagcgagaaggagcagagatggggcgccaagaccgtgcagggcagcggccaccaggagcacatcaacatccacaagctgagagagaacgtgttccaggagcaccagaccctgaaggagaaggagctggagaccggccccaaggccagccacggctacggcggcaagttcggcgtggagcaggacagaatggacaagagcgccgtgggccacgagtaccagagcaagctgagcaagcactgcagccaggtggacagcgtgagaggcttcggcggcaagttcggcgtgcagatggacagagtggaccagagcgccgtgggcttcgagtaccagggcaagaccgagaagcacgccagccagaaggactacagcagcggcttcggcggcaagtacggcgtgcaggccgacagagtggacaagagcgccgtgggcttcgactaccagggcaagaccgagaagcacgagagccagagagactacagcaagggcttcggcggcaagtacggcatcgacaaggacaaggtggacaagagcgccgtgggcttcgagtaccagggcaagaccgagaagcacgagagccagaaggactacgtgaagggcttcggcggcaagttcggcgtgcagaccgacagacaggacaagtgcgccctgggctgggaccaccaggagaagctgcagctgcacgagagccagaaggactacaagaccggcttcggcggcaagttcggcgtgcagagcgagagacaggacagcgccgccgtgggcttcgactacaaggagaagctggccaagcacgagagccagcaggactacagcaagggcttcggcggcaagtacggcgtgcagaaggacagaatggacaagaacgccagcaccttcgaggacgtgacccaggtgagcagcgcctaccagaagaccgtgcccgtggaggccgtgaccagcaagaccagcaacatcagagccaacttcgagaacctggccaaggagaaggagcaggaggacagaagaaaggccgaggccgagagagcccagagaatggccaaggagagacaggagcaggaggaggccagaagaaagctggaggagcaggccagagccaagacccagaccccccccgtgagccccgccccccagcccaccgaggagagactgcccagcagccccgtgtacgaggacgccgccagcttcaaggccgagctgagctacagaggccccgtgagcggcaccgagcccgagcccgtgtacagcatggaggccgccgactacagagaggccagcagccagcagggcctggcctacgccaccgaggccgtgtacgagagcgccgaggcccccggccactaccccgccgaggacagcacctacgacgagtacgagaacgacctgggcatcaccgccgtggccctgtacgactaccaggccgccggcgacgacgagatcagcttcgaccccgacgacatcatcaccaacatcgagatgatcgacgacggctggtggagaggcgtgtgcaagggcagatacggcctgttccccgccaactacgtggagctgagacagtag

SEQ ID NO: 10170 - DNA, 1542 bp, synthetic construct
  misc_feature 1..1542: note = Description of Artificial Sequence: Synthetic coding sequence
  source 1..1542: mol_type = other DNA
atgtggaaggccagcgccggccacgccgtgagcatcgcccaggacgacgccggcgccgacgactgggagaccgaccccgacttcgtgaacgacgtgagcgagaaggagcagagatggggcgccaagaccgtgcagggcagcggccaccaggagcacatcaacatccacaagctgagagagaacgtgttccaggagcaccagaccctgaaggagaaggagctggagaccggccccaaggccagccacggctacggcggcaagttcggcgtggagcaggacagaatggacaagagcgccgtgggccacgagtaccagagcaagctgagcaagcactgcagccaggtggacagcgtgagaggcttcggcggcaagttcggcgtgcagatggacagagtggaccagagcgccgtgggcttcgagtaccagggcaagaccgagaagcacgccagccagaaggactacagcagcggcttcggcggcaagtacggcgtgcaggccgacagagtggacaagagcgccgtgggcttcgactaccagggcaagaccgagaagcacgagagccagagagactacagcaagggcttcggcggcaagtacggcatcgacaaggacaaggtggacaagagcgccgtgggcttcgagtaccagggcaagaccgagaagcacgagagccagaaggactacgtgaagggcttcggcggcaagttcggcgtgcagaccgacagacaggacaagtgcgccctgggctgggaccaccaggagaagctgcagctgcacgagagccagaaggactacagcaagggcttcggcggcaagtacggcgtgcagaaggacagaatggacaagaacgccagcaccttcgaggacgtgacccaggtgagcagcgcctaccagaagaccgtgcccgtggaggccgtgaccagcaagaccagcaacatcagagccaacttcgagaacctggccaaggagaaggagcaggaggacagaagaaaggccgaggccgagagagcccagagaatggccaaggagagacaggagcaggaggaggccagaagaaagctggaggagcaggccagagccaagacccagaccccccccgtgagccccgccccccagcccaccgaggagagactgcccagcagccccgtgtacgaggacgccgccagcttcaaggccgagctgagctacagaggccccgtgagcggcaccgagcccgagcccgtgtacagcatggaggccgccgactacagagaggccagcagccagcagggcctggcctacgccaccgaggccgtgtacgagagcgccgaggcccccggccactaccccgccgaggacagcacctacgacgagtacgagaacgacctgggcatcaccgccgtggccctgtacgactaccaggccgccggcgacgacgagatcagcttcgaccccgacgacatcatcaccaacatcgagatgatcgacgacggctggtggagaggcgtgtgcaagggcagatacggcctgttccccgccaactacgtggagctgagacagtag

SEQ ID NO: 10171 - DNA, 1905 bp, synthetic construct
  misc_feature 1..1905: note = Description of Artificial Sequence: Synthetic coding sequence
  source 1..1905: mol_type = other DNA
atgtggaaggccagcgccggccacgccgtgagcatcgcccaggacgacgccggcgccgacgactgggagaccgaccccgacttcgtgaacgacgtgagcgagaaggagcagagatggggcgccaagaccgtgcagggcagcggccaccaggagcacatcaacatccacaagctgagagagaacgtgttccaggagcaccagaccctgaaggagaaggagctggagaccggccccaaggccagccacggctacggcggcaagttcggcgtggagcaggacagaatggacaagagcgccgtgggccacgagtaccagagcaagctgagcaagcactgcagccaggtggacagcgtgagaggcttcggcggcaagttcggcgtgcagatggacagagtggaccagagcgccgtgggcttcgagtaccagggcaagaccgagaagcacgccagccagaaggactacagcagcggcttcggcggcaagtacggcgtgcaggccgacagagtggacaagagcgccgtgggcttcgactaccagggcaagaccgagaagcacgagagccagagagactacagcaagggcttcggcggcaagtacggcatcgacaaggacaaggtggacaagagcgccgtgggcttcgagtaccagggcaagaccgagaagcacgagagccagaaggactacgtgaagggcttcggcggcaagttcggcgtgcagaccgacagacaggacaagtgcgccctgggctgggaccaccaggagaagctgcagctgcacgagagccagaaggactacagcaagggcttcggcggcaagtacggcgtgcagaaggacagaatggacaagaacgccagcaccttcgaggacgtgacccaggtgagcagcgcctaccagaagaccgtgcccgtggaggccgtgaccagcaagaccagcaacatcagagccaacttcgagaacctggccaaggagaaggagcaggaggacagaagaaaggccgaggccgagagagcccagagaatggccaaggagagacaggagcaggaggaggccagaagaaagctggaggagcaggccagagccaagacccagaccccccccgtgagccccgccccccagcccaccgaggagagactgcccagcagccccgtgtacgaggacgccgccagcttcaaggccgagctgagctacagaggccccgtgagcggcaccgagcccgagcccgtgtacagcatggaggccgccgactacagagaggccagcagccagcagggcctggcctacgccaccgaggccgtgtacgagagcgccgaggcccccggccactaccccgccgaggacagcacctacgacgagtacgagaacgacctgggcatcaccgccgtggccctgtacgactaccaggccgccggcgacgacgagatcagcttcgaccccgacgacatcatcaccaacatcgagatgatcgacgacggctggtggagaggcgtgtgcaagggcagattcagagagctggccttcagctgcgtgagagtggccctggtgcccatcaagtgcagcagagacctgcccggccaggccagaggcctgagaagcgccctgtggagagtgggcagaaaggactgccccagaagaggcgccagcagcagagtgagcctgctgggcagaagaggcctgggcctgatggaggtgaaccccgagctgagccaccccgagcacagaagctgccacgtgagatgggagatctgcctgtgccacaccgtgaccgccagaagaatcagaaagctgatcagcttcctgagaagcagagaggccggccccgtgcccagctgcagccaggtgggcggcgtgagcttccagaaggtgacctggaagtgcctgggcacctgggtgcccgagtgcccctag

SEQ ID NO: 10172 - DNA, 945 bp, synthetic construct
  misc_feature 1..945: note = Description of Artificial Sequence: Synthetic coding sequence
  source 1..945: mol_type = other DNA
atggacaagaacgccagcaccttcgaggacgtgacccaggtgagcagcgcctaccagaagaccgtgcccgtggaggccgtgaccagcaagaccagcaacatcagagccaacttcgagaacctggccaaggagaaggagcaggaggacagaagaaaggccgaggccgagagagcccagagaatggccaaggagagacaggagcaggaggaggccagaagaaagctggaggagcaggccagagccaagacccagaccccccccgtgagccccgccccccagcccaccgaggagagactgcccagcagccccgtgtacgaggacgccgccagcttcaaggccgagctgagctacagaggccccgtgagcggcaccgagcccgagcccgtgtacagcatggaggccgccgactacagagaggccagcagccagcagggcctggcctacgccaccgaggccgtgtacgagagcgccgaggcccccggccactaccccgccgaggacagcacctacgacgagtacgagaacgacctgggcatcaccgccgtggccctgtacgactaccaggccgccggcgacgacgagatcagcttcgaccccgacgacatcatcaccaacatcgagatgatcgacgacggctggtggagaggcgtgtgcaagggcagattcagagagctggccttcagctgcgtgagagtggccctggtgcccatcaagtgcagcagagacctgcccggccaggccagaggcctgagaagcgccctgtggagagtgggcagaaaggactgccccagaagaggcgccagcagcagagtgagcctgctgggcagaagaggcctgggcctgatggaggtgaaccccgagctgagccaccccgagcacagaagctgccacgtgagatgggagatctgcctgtgccacaccgtgaccgccagaagaatcagatag

SEQ ID NO: 10173 - DNA, 1761 bp, synthetic construct
  misc_feature 1..1761: note = Description of Artificial Sequence: Synthetic coding sequence
  source 1..1761: mol_type = other DNA
atgggcgtgaacgccgtgcactggttcagaaagggcctgagactgcacgacaaccccgccctgaaggagtgcatccagggcgccgacaccatcagatgcgtgtacatcctggacccctggttcgccggcagcagcaacgtgggcatcaacagatggagattcctgctgcagtgcctggaggacctggacgccaacctgagaaagctgaacagcagactgttcgtgatcagaggccagcccgccgacgtgttccccagactgttcaaggagtggaacatcaccaagctgagcatcgagtacgacagcgagcccttcggcaaggagagagacgccgccatcaagaagctggccaccgaggccggcgtggaggtgatcgtgagaatcagccacaccctgtacgacctggacaagatcatcgagctgaacggcggccagccccccctgacctacaagagattccagaccctgatcagcaagatggagcccctggagatccccgtggagaccatcaccagcgaggtgatcgagaagtgcaccacccccctgagcgacgaccacgacgagaagtacggcgtgcccagcctggaggagctgggcttcgacaccgacggcctgagcagcgccgtgtggcccggcggcgagaccgaggccctgaccagactggagagacacctggagagaaaggcctgggtggccaacttcgagagacccagaatgaacgccaacagcctgctggccagccccaccggcctgagcccctacctgagattcggctgcctgagctgcagactgttctacttcaagctgaccgacctgtacaagaaggtgaagaagaacagcagcccccccctgagcctgtacggccagctgctgtggagagagttcttctacaccgccgccaccaacaaccccagattcgacaagatggagggcaaccccatctgcgtgcagatcccctgggacaagaaccccgaggccctggccaagtgggccgagggcagaaccggcttcccctggatcgacgccatcatgacccagctgagacaggagggctggatccaccacctggccagacacgccgtggcctgcttcctgaccagaggcgacctgtggatcagctgggaggagggcatgaaggtgttcgaggagctgctgctggacgccgactggagcatcaacgccggcagctggatgtggctgagctgcagcagcttcttccagcagttcttccactgctactgccccgtgggcttcggcagaagaaccgaccccaacggcgactacatcagaagatacctgcccgtgctgagaggcttccccgccaagtacatctacgacccctggaacgcccccgagggcatccagaaggtggccaagtgcctgatcggcgtgaactaccccaagcccatggtgaaccacgccgaggccagcagactgaacatcgagagaatgaagcagatctaccagcagctgagcagatacagaggcctgggcctgctggccagcgtgcccagcaaccccaacggcaacggcggcttcatgggctacagcgccgagaacatccccggctgcagcagcagcggcagctgcagccagggcagcggcatcctgcactacgcccacggcgacagccagcagacccacctgctgaagcagggcagaagcagcatgggcaccggcctgagcggcggcaagagacccagccaggaggaggacacccagagcatcggccccaaggtgcagagacagagcaccaactag

SEQ ID NO: 10174 - DNA, 582 bp, synthetic construct
  misc_feature 1..582: note = Description of Artificial Sequence: Synthetic coding sequence
  source 1..582: mol_type = other DNA
atgctggaggtgggctgcggctgcctggtggtgcccttcttcaacttcttccactgctactgccccgtgggcttcggcagaagaaccgaccccaacggcgactacatcagaagatacctgcccgtgctgagaggcttccccgccaagtacatctacgacccctggaacgcccccgagggcatccagaaggtggccaagtgcctgatcggcgtgaactaccccaagcccatggtgaaccacgccgaggccagcagactgaacatcgagagaatgaagcagatctaccagcagctgagcagatacagaggcctgggcctgctggccagcgtgcccagcaaccccaacggcaacggcggcttcatgggctacagcgccgagaacatccccggctgcagcagcagcggcagctgcagccagggcagcggcatcctgcactacgcccacggcgacagccagcagacccacctgctgaagcagggcagaagcagcatgggcaccggcctgagcggcggcaagagacccagccaggaggaggacacccagagcatcggccccaaggtgcagagacagagcaccaactag

SEQ ID NO: 10175 - DNA, 1323 bp, synthetic construct
  misc_feature 1..1323: note = Description of Artificial Sequence: Synthetic coding sequence
  source 1..1323: mol_type = other DNA
atgggcagcagccacctgctgaacaagggcctgcccctgggcgtgagaccccccatcatgaacggccccctgcaccccagacccctggtggccctgctggacggcagagactgcaccgtggagatgcccatcctgaaggacgtggccaccgtggccttctgcgacgcccagagcacccaggagatccacgagaaggtgctgaacgaggccgtgggcgccctgatgtaccacaccatcaccctgaccagagaggacctggagaagttcaaggccctgagaatcatcgtgagaatcggcagcggcttcgacaacatcgacatcaagagcgccggcgacctgggcatcgccgtgtgcaacgtgcccgccgccagcgtggaggagaccgccgacagcaccctgtgccacatcctgaacctgtacagaagagccacctggctgcaccaggccctgagagagggcaccagagtgcagagcgtggagcagatcagagaggtggccagcggcgccgccagaatcagaggcgagaccctgggcatcatcggcctgggcagagtgggccaggccgtggccctgagagccaaggccttcggcttcaacgtgctgttctacgacccctacctgagcgacggcgtggagagagccctgggcctgcagagagtgagcaccctgcaggacctgctgttccacagcgactgcgtgaccctgcactgcggcctgaacgagcacaaccaccacctgatcaacgacttcaccgtgaagcagatgagacagggcgccttcctggtgaacaccgccagaggcggcctggtggacgagaaggccctggcccaggccctgaaggagggcagaatcagaggcgccgccctggacgtgcacgagagcgagcccttcagcttcagccagggccccctgaaggacgcccccaacctgatctgcaccccccacgccgcctggtacagcgagcaggccagcatcgagatgagagaggaggccgccagagagatcagaagagccatcaccggcagaatccccgacagcctgaagaactgcgtgaacaaggaccacctgaccgccgccacccactgggccagcatggaccccgccgtggtgcaccccgagctgaacggcgccgcctacagatacccccccggcgtggtgggcgtggcccccaccggcatccccgccgccgtggagggcatcgtgcccagcgccatgagcctgagccacggcctgccccccgtggcccaccccccccacgcccccagccccggccagaccgtgaagcccgaggccgacagagaccacgccagcgaccagctgtag

SEQ ID NO: 10176 - DNA, 1290 bp, synthetic construct
  misc_feature 1..1290: note = Description of Artificial Sequence: Synthetic coding sequence
  source 1..1290: mol_type = other DNA
atgagcggcgtgagaccccccatcatgaacggccccctgcaccccagacccctggtggccctgctggacggcagagactgcaccgtggagatgcccatcctgaaggacgtggccaccgtggccttctgcgacgcccagagcacccaggagatccacgagaaggtgctgaacgaggccgtgggcgccctgatgtaccacaccatcaccctgaccagagaggacctggagaagttcaaggccctgagaatcatcgtgagaatcggcagcggcttcgacaacatcgacatcaagagcgccggcgacctgggcatcgccgtgtgcaacgtgcccgccgccagcgtggaggagaccgccgacagcaccctgtgccacatcctgaacctgtacagaagagccacctggctgcaccaggccctgagagagggcaccagagtgcagagcgtggagcagatcagagaggtggccagcggcgccgccagaatcagaggcgagaccctgggcatcatcggcctgggcagagtgggccaggccgtggccctgagagccaaggccttcggcttcaacgtgctgttctacgacccctacctgagcgacggcgtggagagagccctgggcctgcagagagtgagcaccctgcaggacctgctgttccacagcgactgcgtgaccctgcactgcggcctgaacgagcacaaccaccacctgatcaacgacttcaccgtgaagcagatgagacagggcgccttcctggtgaacaccgccagaggcggcctggtggacgagaaggccctggcccaggccctgaaggagggcagaatcagaggcgccgccctggacgtgcacgagagcgagcccttcagcttcagccagggccccctgaaggacgcccccaacctgatctgcaccccccacgccgcctggtacagcgagcaggccagcatcgagatgagagaggaggccgccagagagatcagaagagccatcaccggcagaatccccgacagcctgaagaactgcgtgaacaaggaccacctgaccgccgccacccactgggccagcatggaccccgccgtggtgcaccccgagctgaacggcgccgcctacagatacccccccggcgtggtgggcgtggcccccaccggcatccccgccgccgtggagggcatcgtgcccagcgccatgagcctgagccacggcctgccccccgtggcccaccccccccacgcccccagccccggccagaccgtgaagcccgaggccgacagagaccacgccagcgaccagctgtag

SEQ ID NO: 10177 - DNA, 438 bp, synthetic construct
  misc_feature 1..438: note = Description of Artificial Sequence: Synthetic coding sequence
  source 1..438: mol_type = other DNA
atgagcggcgtgagaccccccatcatgaacggccccctgcaccccagacccctggtggccctgctggacggcagagactgcaccgtggagatgcccatcctgaaggacgtggccaccgtggccttctgcgacgcccagagcacccaggagatccacgagaaggtgctgaacgaggccgtgggcgccctgatgtaccacaccatcaccctgaccagagaggacctggagaagttcaaggccctgagaatcatcgtgagaatcggcagcggcttcgacaacatcgacatcaagagcgccggcgacctgggcatcgccgtgtgcaacgtgcccgccgccagcgtggaggagaccgccgacagcaccctgtgccacatcctgaacctgtacagaagagccacctggctgcaccaggccctgagagagggcaccagagtgtag

SEQ ID NO: 10178 - DNA, 516 bp, synthetic construct
  misc_feature 1..516: note = Description of Artificial Sequence: Synthetic coding sequence
  source 1..516: mol_type = other DNA
atgagcggcgtgagaccccccatcatgaacggccccctgcaccccagacccctggtggccctgctggacggcagagactgcaccgtggagatgcccatcctgaaggacgtggccaccgtggccttctgcgacgcccagagcacccaggagatccacgagaaggtgctgaacgaggccgtgggcgccctgatgtaccacaccatcaccctgaccagagaggacctggagaagttcaaggccctgagaatcatcgtgagaatcggcagcggcttcgacaacatcgacatcaagagcgccggcgacctgggcatcgccgtgtgcaacgtgcccgccgccagcgtggaggagaccgccgacagcaccctgtgccacatcctgaacctgtacagaagagccacctggctgcaccaggccctgagagagggcaccagagtgcagagcgtggagcagatcagagaggtggccagcggcgccgccagaatcagaggcgagaccctgggcatcatcggcctgtag

SEQ ID NO: 10179 - DNA, 2958 bp, synthetic construct
  misc_feature 1..2958: note = Description of Artificial Sequence: Synthetic coding sequence
  source 1..2958: mol_type = other DNA
atgcccgtgcccagcagacacatcaacatcggcagaagccagagctgggacgccgccggctggtacgagggcccctgggagaacgccgagagcctgagacccctgggcagaagaagcagcctgacctacggcaccgccgagggcacctggttcgagcccaaccacagaccccaggacgccgccctgcccgtggccgccgagccctacctgtacagagaggccgtgtacaacagcgtggccgccagaaagggcagcacccccgacttcaccttctacgacagcagacaggccgtgatgagcggcagaagccccctgctgcccagagagtactacagcgaccccagcggcgccgccagagtgcccaaggagccccccctgtacagagaccccggcgtgagcagacccgtgcccagctacggcgtgctgggcagcagaaccagctgggaccccatgcagggcagaagccccgccctgcaggacgccggccacctgtacagagaccccggcggcaagatgatcccccagggcagacagacccagagcagagccgccagccccggcagatacggcagagagcagcccgacaccagatacggcgccgaggtgcccgcctaccccctgagccaggtgttcagcgacatcagcgagagacccatcgaccccgcccccgccagacaggtggcccccacctgcctggtggtggaccccagcagcgccgccgcccccgagggcagcaccggcgtggcccccggcgccctgaacagaggctacggccccgccagagagagcatccccagcaagatggcctacgagacctacgaggccgacctgagcaccttccagggccccggcggcaagagaaccgtgctgcccgagttcctggccttcctgagagccgagggcctggccgaggccaccctgggcgccctgctgcagcagggcttcgacagccccgccgtgctggccaccctggaggacgccgacatcaagagcgtggcccccaacctgggccaggccagagtgctgagcagactggccaacagctgcagaaccgagatgcagctgagaagacaggacagaggcggccccctgcccagagccagaagcagcagcttcagccacagaagcgagctgctgcacggcgacctggccagcctgggcgccgccgcccccctgcagaccgccagccccagagccggcgaccccgccagaagacccagcagcgcccccagccagcacctgctggagaccgccgccacctacagcgcccccggcgtgggcacccacgccccccacttccccagcaacagcggctacagcagccccaccccctgcgccctgaccgccagactgagccccacctaccccctgcaggccggcgtggccctgaccaaccccggccccagcaaccccctgcaccccggccccagaaccgcctacagcaccgcctacaccgtgcccatggagctgctgaagagagagagaaacgtggccgccagccccctgcccagcccccacggcagcccccaggtgctgagaaagcccggcgcccccctgggccccagcaccctgccccccgccagccagagcctgcacaccccccacagcccctaccagaaggtggccagaagaaccggcgcccccatcatcgtgagcaccatgctggcccccgagcccagcatcagaccccagatcatgaacggccccctgcaccccagacccctggtggccctgctggacggcagagactgcaccgtggagatgcccatcctgaaggacctggccaccgtggccttctgcgacgcccagagcacccaggagatccacgagaaggtgctgaacgaggccgtgggcgccatgatgtaccacaccatcaccctgaccagagaggacctggagaagttcaaggccctgagagtgatcgtgagaatcggcagcggctacgacaacgtggacatcaaggccgccggcgagctgggcatcgccgtgtgcaacatccccagcgccgccgtggaggagaccgccgacagcaccatctgccacatcctgaacctgtacagaagaaacacctggctgtaccaggccctgagagagggcaccagagtgcagagcgtggagcagatcagagaggtggccagcggcgccgccagaatcagaggcgagaccctgggcctgatcggcttcggcagaaccggccaggccgtggccgtgagagccaaggccttcggcttcagcgtgatcttctacgacccctacctgcaggacggcatcgagagaagcctgggcgtgcagagagtgtacaccctgcaggacctgctgtaccagagcgactgcgtgagcctgcactgcaacctgaacgagcacaaccaccacctgatcaacgacttcaccatcaagcagatgagacagggcgccttcctggtgaacgccgccagaggcggcctggtggacgagaaggccctggcccaggccctgaaggagggcagaatcagaggcgccgccctggacgtgcacgagagcgagcccttcagcttcgcccagggccccctgaaggacgcccccaacctgatctgcaccccccacaccgcctggtacagcgagcaggccagcctggagatgagagaggccgccgccaccgagatcagaagagccatcaccggcagaatccccgagagcctgagaaactgcgtgaacaaggagttcttcgtgaccagcgccccctggagcgtgatcgaccagcaggccatccaccccgagctgaacggcgccacctacagatacccccccggcatcgtgggcgtggcccccggcggcctgcccgccgccatggagggcatcatccccggcggcatccccgtgacccacaacctgcccaccgtggcccaccccagccaggcccccagccccaaccagcccaccaagcacggcgacaacagagagcaccccaacgagcagtag

SEQ ID NO: 10180 - DNA, 1338 bp, synthetic construct
  misc_feature 1..1338: note = Description of Artificial Sequence: Synthetic coding sequence
  source 1..1338: mol_type = other DNA
atggccctggtggacaagcacaaggtgaagagacagagactggacagaatctgcgagggcatcagaccccagatcatgaacggccccctgcaccccagacccctggtggccctgctggacggcagagactgcaccgtggagatgcccatcctgaaggacctggccaccgtggccttctgcgacgcccagagcacccaggagatccacgagaaggtgctgaacgaggccgtgggcgccatgatgtaccacaccatcaccctgaccagagaggacctggagaagttcaaggccctgagagtgatcgtgagaatcggcagcggctacgacaacgtggacatcaaggccgccggcgagctgggcatcgccgtgtgcaacatccccagcgccgccgtggaggagaccgccgacagcaccatctgccacatcctgaacctgtacagaagaaacacctggctgtaccaggccctgagagagggcaccagagtgcagagcgtggagcagatcagagaggtggccagcggcgccgccagaatcagaggcgagaccctgggcctgatcggcttcggcagaaccggccaggccgtggccgtgagagccaaggccttcggcttcagcgtgatcttctacgacccctacctgcaggacggcatcgagagaagcctgggcgtgcagagagtgtacaccctgcaggacctgctgtaccagagcgactgcgtgagcctgcactgcaacctgaacgagcacaaccaccacctgatcaacgacttcaccatcaagcagatgagacagggcgccttcctggtgaacgccgccagaggcggcctggtggacgagaaggccctggcccaggccctgaaggagggcagaatcagaggcgccgccctggacgtgcacgagagcgagcccttcagcttcgcccagggccccctgaaggacgcccccaacctgatctgcaccccccacaccgcctggtacagcgagcaggccagcctggagatgagagaggccgccgccaccgagatcagaagagccatcaccggcagaatccccgagagcctgagaaactgcgtgaacaaggagttcttcgtgaccagcgccccctggagcgtgatcgaccagcaggccatccaccccgagctgaacggcgccacctacagatacccccccggcatcgtgggcgtggcccccggcggcctgcccgccgccatggagggcatcatccccggcggcatccccgtgacccacaacctgcccaccgtggcccaccccagccaggcccccagccccaaccagcccaccaagcacggcgacaacagagagcaccccaacgagcagtag

SEQ ID NO: 10181 - DNA, 1338 bp, synthetic construct; identical to SEQ ID NO: 10180
  misc_feature 1..1338: note = Description of Artificial Sequence: Synthetic coding sequence
  source 1..1338: mol_type = other DNA

SEQ ID NO: 10182 - DNA, 1338 bp, synthetic construct; identical to SEQ ID NO: 10180
  misc_feature 1..1338: note = Description of Artificial Sequence: Synthetic coding sequence
  source 1..1338: mol_type = other DNA

SEQ ID NO: 10183 - DNA, 12 bp, synthetic construct
  misc_feature 1..12: note = Description of Artificial Sequence: Synthetic coding sequence
  source 1..12: mol_type = other DNA
atggccctgtag

SEQ ID NO: 10184 - DNA, 1338 bp, synthetic construct; identical to SEQ ID NO: 10180
  misc_feature 1..1338: note = Description of Artificial Sequence: Synthetic coding sequence
  source 1..1338: mol_type = other DNA

SEQ ID NO: 10185 - DNA, 2331 bp, synthetic construct
  misc_feature 1..2331: note = Description of Artificial Sequence: Synthetic coding sequence
  source 1..2331: mol_type = other DNA
atgagcagcaccagaagccagaacccccacggcctgaagcagatcggcctggaccagatctgggacgacctgagagccggcatccagcaggtgtacaccagacagagcatggccaagagcagatacatggagctgtacacccacgtgtacaactactgcaccagcgtgcaccagagcaaccaggccagaggcgccggcgtgccccccagcaagagcaagaagggccagacccccggcggcgcccagttcgtgggcctggagctgtacaagagactgaaggagttcctgaagaactacctgaccaacctgctgaaggacggcgaggacctgatggacgagagcgtgctgaagttctacacccagcagtgggaggactacagattcagcagcaaggtgctgaacggcatctgcgcctacctgaacagacactgggtgagaagagagtgcgacgagggcagaaagggcatctacgagatctacagcctggccctggtgacctggagagactgcctgttcagacccctgaacaagcaggtgaccaacgccgtgctgaagctgatcgagaaggagagaaacggcgagaccatcaacaccagactgatcagcggcgtggtgcagagctacgtggagctgggcctgaacgaggacgacgccttcgccaagggccccaccctgaccgtgtacaaggagagcttcgagagccagttcctggccgacaccgagagattctacaccagagagagcaccgagttcctgcagcagaaccccgtgaccgagtacatgaagaaggccgaggccagactgctggaggagcagagaagagtgcaggtgtacctgcacgagagcacccaggacgagctggccagaaagtgcgagcaggtgctgatcgagaagcacctggagatcttccacaccgagttccagaacctgctggacgccgacaagaacgaggacctgggcagaatgtacaacctggtgagcagaatccaggacggcctgggcgagctgaagaagctgctggagacccacatccacaaccagggcctggccgccatcgagaagtgcggcgaggccgccctgaacgaccccaagatgtacgtgcagaccgtgctggacgtgcacaagaagtacaacgccctggtgatgagcgccttcaacaacgacgccggcttcgtggccgccctggacaaggcctgcggcagattcatcaacaacaacgccgtgaccaagatggcccagagcagcagcaagagccccgagctgctggccagatactgcgacagcctgctgaagaagagcagcaagaaccccgaggaggccgagctggaggacaccctgaaccaggtgatggtggtgttcaagtacatcgaggacaaggacgtgttccagaagttctacgccaagatgctggccaagagactggtgcaccagaacagcgccagcgacgacgccgaggccagcatgatcagcaagctgaagcaggcctgcggcttcgagtacaccagcaagctgcagagaatgttccaggacatcggcgtgagcaaggacctgaacgagcagttcaagaagcacctgaccaacagcgagcccctggacctggacttcagcatccaggtgctgagcagcggcagctggcccttccagcagagctgcaccttcgccctgcccagcgagctggagagaagctaccagagattcaccgccttctacgccagcagacacagcggcagaaagctgacctggctgtaccagctgagcaagggcgagctggtgaccaactgcttcaagaacagatacaccctgcaggccagcaccttccagatggccatcctgctgcagtacaacaccgaggacgcctacaccgtgcagcagctgaccgacagcacccagatcaagatggacatcctggcccaggtgctgcagatcctgctgaagagcaagctgctggtgctggaggacgagaacgccaacgtggacgaggtggagctgaagcccgacaccctgatcaagctgtacctgggctacaagaacaagaagctgagagtgaacatcaacgtgcccatgaagaccgagcagaagcaggagcaggagaccacccacaagaacatcgaggaggacagaaagctgctgatccaggccgccatcgtgagaatcatgaagatgagaaaggtgctgaagcaccagcagctgctgggcgaggtgctgacccagctgagcagcagattcaagcccagagtgcccgtgatcaagaagtgcatcgacatcctgatcgagaaggagtacctggagagagtggacggcgagaaggacacctacagctacctggcctag

SEQ ID NO: 10186 - DNA, 2331 bp, synthetic construct; identical to SEQ ID NO: 10185
  misc_feature 1..2331: note = Description of Artificial Sequence: Synthetic coding sequence
  source 1..2331: mol_type = other DNA

SEQ ID NO: 10187 - DNA, 2112 bp, synthetic construct
  misc_feature 1..2112: note = Description of Artificial Sequence: Synthetic coding sequence
  source 1..2112: mol_type = other DNA
atgagcagcaccagaagccagaacccccacggcctgaagcagatcggcctggaccagatctgggacgacctgagagccggcatccagcaggtgtacaccagacagagcatggccaagagcagatacatggagctgtacacccagcagtgggaggactacagattcagcagcaaggtgctgaacggcatctgcgcctacctgaacagacactgggtgagaagagagtgcgacgagggcagaaagggcatctacgagatctacagcctggccctggtgacctggagagactgcctgttcagacccctgaacaagcaggtgaccaacgccgtgctgaagctgatcgagaaggagagaaacggcgagaccatcaacaccagactgatcagcggcgtggtgcagagctacgtggagctgggcctgaacgaggacgacgccttcgccaagggccccaccctgaccgtgtacaaggagagcttcgagagccagttcctggccgacaccgagagattctacaccagagagagcaccgagttcctgcagcagaaccccgtgaccgagtacatgaagaaggccgaggccagactgctggaggagcagagaagagtgcaggtgtacctgcacgagagcacccaggacgagctggccagaaagtgcgagcaggtgctgatcgagaagcacctggagatcttccacaccgagttccagaacctgctggacgccgacaagaacgaggacctgggcagaatgtacaacctggtgagcagaatccaggacggcctgggcgagctgaagaagctgctggagacccacatccacaaccagggcctggccgccatcgagaagtgcggcgaggccgccctgaacgaccccaagatgtacgtgcagaccgtgctggacgtgcacaagaagtacaacgccctggtgatgagcgccttcaacaacgacgccggcttcgtggccgccctggacaaggcctgcggcagattcatcaacaacaacgccgtgaccaagatggcccagagcagcagcaagagccccgagctgctggccagatactgcgacagcctgctgaagaagagcagcaagaaccccgaggaggccgagctggaggacaccctgaaccaggtgatggtggtgttcaagtacatcgaggacaaggacgtgttccagaagttctacgccaagatgctggccaagagactggtgcaccagaacagcgccagcgacgacgccgaggccagcatgatcagcaagctgaagcaggcctgcggcttcgagtacaccagcaagctgcagagaatgttccaggacatcggcgtgagcaaggacctgaacgagcagttcaagaagcacctgaccaacagcgagcccctggacctggacttcagcatccaggtgctgagcagcggcagctggcccttccagcagagctgcaccttcgccctgcccagcgagctggagagaagctaccagagattcaccgccttctacgccagcagacacagcggcagaaagctgacctggctgtaccagctgagcaagggcgagctggtgaccaactgcttcaagaacagatacaccctgcaggccagcaccttccagatggccatcctgctgcagtacaacaccgaggacgcctacaccgtgcagcagctgaccgacagcacccagatcaagatggacatcctggcccaggtgctgcagatcctgctgaagagcaagctgctggtgctggaggacgagaacgccaacgtggacgaggtggagctgaagcccgacaccctgatcaagctgtacctgggctacaagaacaagaagctgagagtgaacatcaacgtgcccatgaagaccgagcagaagcaggagcaggagaccacccacaagaacatcgaggaggacagaaagctgctgatccaggccgccatcgtgagaatcatgaagatgagaaaggtgctgaagcaccagcagctgctgggcgaggtgctgacccagctgagcagcagattcaagcccagagtgcccgtgatcaagaagtgcatcgacatcctgatcgagaaggagtacctggagagagtggacggcgagaaggacacctacagctacctggcctag

SEQ ID NO: 10188 - DNA, 1824 bp, synthetic construct
  misc_feature 1..1824: note = Description of Artificial Sequence: Synthetic coding sequence
  source 1..1824: mol_type = other DNA
atggagctgtacacccacgtgtacaactactgcaccagcgtgcaccagagcaaccaggccagaggcgccggcgtgccccccagcaagagcaagaagggccagacccccggcggcgcccagttcgtgggcctggagctgtacaagagactgaaggagttcctgaagaactacctgaccaacctgctgaaggacggcgaggacctgatggacgagagcgtgctgaagttctacacccagcagtgggaggactacagattcagcagcaaggtgctgaacggcatctgcgcctacctgaacagacactgggtgagaagagagtgcgacgagggcagaaagggcatctacgagatctacagcctggccctggtgacctggagagactgcctgttcagacccctgaacaagcaggtgaccaacgccgtgctgaagctgatcgagaaggagagaaacggcgagaccatcaacaccagactgatcagcggcgtggtgcagagctacgtggagctgggcctgaacgaggacgacgccttcgccaagggccccaccctgaccgtgtacaaggagagcttcgagagccagttcctggccgacaccgagagattctacaccagagagagcaccgagttcctgcagcagaaccccgtgaccgagtacatgaagaaggccgaggccagactgctggaggagcagagaagagtgcaggtgtacctgcacgagagcacccaggacgagctggccagaaagtgcgagcaggtgctgatcgagaagcacctggagatcttccacaccgagttccagaacctgctggacgccgacaagaacgaggacctgggcagaatgtacaacctggtgagcagaatccaggacggcctgggcgagctgaagaagctgctggagacccacatccacaaccagggcctggccgccatcgagaagtgcggcgaggccgccctgaacgaccccaagatgtacgtgcagaccgtgctggacgtgcacaagaagtacaacgccctggtgatgagcgccttcaacaacgacgccggcttcgtggccgccctggacaaggcctgcggcagattcatcaacaacaacgccgtgaccaagatggcccagagcagcagcaagagccccgagctgctggccagatactgcgacagcctgctgaagaagagcagcaagaaccccgaggaggccgagctggaggacaccctgaaccaggtgatggtggtgttcaagtacatcgaggacaaggacgtgttccagaagttctacgccaagatgctggccaagagactggtgcaccagaacagcgccagcgacgacgccgaggccagcatgatcagcaagctgaagcaggcctgcggcttcgagtacaccagcaagctgcagagaatgttccaggacatcggcgtgagcaaggacctgaacgagcagttcaagaagcacctgaccaacagcgagcccctggacctggacttcagcatccaggtgctgagcagcggcagctggcccttccagcagagctgcaccttcgccctgcccagcgagctggagagaagctaccagagattcaccgccttctacgccagcagacacagcggcagaaagctgacctggctgtaccagctgagcaagggcgagctggtgaccaactgcttcaagaacagatacaccctgcaggccagcaccttccagatggccatcctgctgcagtacaacaccgaggacgcctacaccgtgcagcagctgaccgacagcacccagatcaagatggacatcctggcccaggtgctgcagatcctgctgaagagcaagctgctgtag

SEQ ID NO: 10189 - DNA, 2121 bp, synthetic construct
  misc_feature 1..2121: note = Description of Artificial Sequence: Synthetic coding sequence
  source 1..2121: mol_type = other DNA
atgagcctgaagcccagagtggtggacttcgacgagacctggaacaagctgctgaccaccatcaaggccgtggtgatgctggagtacgtggagagagccacctggaacgacagattcagcgacatctacgccctgtgcgtggcctaccccgagcccctgggcgagagactgtacaccgagaccaagatcttcctggagaaccacgtgagacacctgcacaagagagtgctggagagcgaggagcaggtgctggtgatgtaccacagatactgggaggagtacagcaagggcgccgactacatggactgcctgtacagatacctgaacacccagttcatcaagaagaacaagctgaccgaggccgacctgcagtacggctacggcggcgtggacatgaacgagcccctgatggagatcggcgagctggccctggacatgtggagaaagctgatggtggagcccctgcaggccatcctgatcagaatgctgctgagagagatcaagaacgacagaggcggcgaggaccccaaccagaaggtgatccacggcgtgatcaacagcttcgtgcacgtggagcagtacaagaagaagttccccctgaagttctaccaggagatcttcgagagccccttcctgaccgagaccggcgagtactacaagcaggaggccagcaacctgctgcaggagagcaactgcagccagtacatggagaaggtgctgggcagactgaaggacgaggagatcagatgcagaaagtacctgcaccccagcagctacaccaaggtgatccacgagtgccagcagagaatggtggccgaccacctgcagttcctgcacgccgagtgccacaacatcatcagacaggagaagaagaacgacatggccaacatgtacgtgctgctgagagccgtgagcaccggcctgccccacatgatccaggagctgcagaaccacatccacgacgagggcctgagagccaccagcaacctgacccaggagaacatgcccaccctgttcgtggagagcgtgctggaggtgcacggcaagttcgtgcagctgatcaacaccgtgctgaacggcgaccagcacttcatgagcgccctggacaaggccctgaccagcgtggtgaactacagagagcccaagagcgtgtgcaaggcccccgagctgctggccaagtactgcgacaacctgctgaagaagagcgccaagggcatgaccgagaacgaggtggaggacagactgaccagcttcatcaccgtgttcaagtacatcgacgacaaggacgtgttccagaagttctacgccagaatgctggccaagagactgatccacggcctgagcatgagcatggacagcgaggaggccatgatcaacaagctgaagcaggcctgcggctacgagttcaccagcaagctgcacagaatgtacaccgacatgagcgtgagcgccgacctgaacaacaagttcaacaacttcatcaagaaccaggacaccgtgatcgacctgggcatcagcttccagatctacgtgctgcaggccggcgcctggcccctgacccaggcccccagcagcaccttcgccatcccccaggagctggagaagagcgtgcagatgttcgagctgttctacagccagcacttcagcggcagaaagctgacctggctgcactacctgtgcaccggcgaggtgaagatgaactacctgggcaagccctacgtggccatggtgaccacctaccagatggccgtgctgctggccttcaacaacagcgagaccgtgagctacaaggagctgcaggacagcacccagatgaacgagaaggagctgaccaagaccatcaagagcctgctggacgtgaagatgatcaaccacgacagcgagaaggaggacatcgacgccgagagcagcttcagcctgaacatgaacttcagcagcaagagaaccaagttcaagatcaccaccagcatgcagaaggacaccccccaggtgatcagccagagcagagccagattcaaccccagcatcagcatgatcaagaagtgcatcgaggtgctgatcgacaagcagtacatcgagagaagccaggccagcgccgacgagtacagctacgtggcctag

SEQ ID NO: 10190 - DNA, 2121 bp, synthetic construct; identical to SEQ ID NO: 10189
  misc_feature 1..2121: note = Description of Artificial Sequence: Synthetic coding sequence
  source 1..2121: mol_type = other DNA

SEQ ID NO: 10191 - DNA, 2238 bp, synthetic construct
  misc_feature 1..2238: note = Description of Artificial Sequence: Synthetic coding sequence
  source 1..2238: mol_type = other DNA
atgagcctgaagcccagagtggtggacttcgacgagacctggaacaagctgctgaccaccatcaaggccgtggtgatgctggagtacgtggagagagccacctggaacgacagattcagcgacatctacgccctgtgcgtggcctaccccgagcccctgggcgagagactgtacaccgagaccaagatcttcctggagaaccacgtgagacacctgcacaagagagtgctggagagcgaggagcaggtgctggtgatgtaccacagatactgggaggagtacagcaagggcgccgactacatggactgcctgtacagatacctgaacacccagttcatcaagaagaacaagctgaccgaggccgacctgcagtacggctacggcggcgtggacatgaacgagcccctgatggagatcggcgagctggccctggacatgtggagaaagctgatggtggagcccctgcaggccatcctgatcagaatgctgctgagagagatcaagaacgacagaggcggcgaggaccccaaccagaaggtgatccacggcgtgatcaacagcttcgtgcacgtggagcagtacaagaagaagttccccctgaagttctaccaggagatcttcgagagccccttcctgaccgagaccggcgagtactacaagcaggaggccagcaacctgctgcaggagagcaactgcagccagtacatggagaaggtgctgggcagactgaaggacgaggagatcagatgcagaaagtacctgcaccccagcagctacaccaaggtgatccacgagtgccagcagagaatggtggccgaccacctgcagttcctgcacgccgagtgccacaacatcatcagacaggagaagaagaacgacatggccaacatgtacgtgctgctgagagccgtgagcaccggcctgccccacatgatccaggagctgcagaaccacatccacgacgagggcctgagagccaccagcaacctgacccaggagaacatgcccaccctgttcgtggagagcgtgctggaggtgcacggcaagttcgtgcagctgatcaacaccgtgctgaacggcgaccagcacttcatgagcgccctggacaaggccctgaccagcgtggtgaactacagagagcccaagagcgtgtgcaaggcccccgagctgctggccaagtactgcgacaacctgctgaagaagagcgccaagggcatgaccgagaacgaggtggaggacagactgaccagcttcatcaccgtgttcaagtacatcgacgacaaggacgtgttccagaagttctacgccagaatgctggccaagagactgatccacggcctgagcatgagcatggacagcgaggaggccatgatcaacaagctgaagcaggcctgcggctacgagttcaccagcaagctgcacagaatgtacaccgacatgagcgtgagcgccgacctgaacaacaagttcaacaacttcatcaagaaccaggacaccgtgatcgacctgggcatcagcttccagatctacgtgctgcaggccggcgcctggcccctgacccaggcccccagcagcaccttcgccatcccccaggagctggagaagagcgtgcagatgttcgagctgttctacagccagcacttcagcggcagaaagctgacctggctgcactacctgtgcaccggcgaggtgaagatgaactacctgggcaagccctacgtggccatggtgaccacctaccagatggccgtgctgctggccttcaacaacagcgagaccgtgagctacaaggagctgcaggacagcacccagatgaacgagaaggagctgaccaagaccatcaagagcctgctggacgtgaagatgatcaaccacgacagcgagaaggaggacatcgacgccgagagcagcttcagcctgaacatgaacttcagcagcaagagaaccaagttcaagatcaccaccagcatgcagaaggacaccccccaggagatggagcagaccagaagcgccgtggacgaggacagaaagatgtacctgcaggccgccatcgtgagaatcatgaaggccagaaaggtgctgagacacaacgccctgatccaggaggtgatcagccagagcagagccagattcaaccccagcatcagcatgatcaagaagtgcatcgaggtgctgatcgacaagcagtacatcgagagaagccaggccagcgccgacgagtacagctacgtggcctag

SEQ ID NO: 10192 - DNA, 2238 bp, synthetic construct; identical to SEQ ID NO: 10191
  misc_feature 1..2238: note = Description of Artificial Sequence: Synthetic coding sequence
  source 1..2238: mol_type = other DNA

SEQ ID NO: 10193 - DNA, 2238 bp, synthetic construct; identical to SEQ ID NO: 10191
  misc_feature 1..2238: note = Description of Artificial Sequence: Synthetic coding sequence
  source 1..2238: mol_type = other DNA

SEQ ID NO: 10194 - DNA, 2067 bp, synthetic construct
  misc_feature 1..2067: note = Description of Artificial Sequence: Synthetic coding sequence
  source 1..2067: mol_type = other DNA
atgctgtacgtgtggcccatcctgaaccccctggagaaggacttcatccagaagctgagattcttctggaagatcatgttcggcatctgcatcagatactgggaggagtacagcaagggcgccgactacatggactgcctgtacagatacctgaacacccagttcatcaagaagaacaagctgaccgaggccgacctgcagtacggctacggcggcgtggacatgaacgagcccctgatggagatcggcgagctggccctggacatgtggagaaagctgatggtggagcccctgcaggccatcctgatcagaatgctgctgagagagatcaagaacgacagaggcggcgaggaccccaaccagaaggtgatccacggcgtgatcaacagcttcgtgcacgtggagcagtacaagaagaagttccccctgaagttctaccaggagatcttcgagagccccttcctgaccgagaccggcgagtactacaagcaggaggccagcaacctgctgcaggagagcaactgcagccagtacatggagaaggtgctgggcagactgaaggacgaggagatcagatgcagaaagtacctgcaccccagcagctacaccaaggtgatccacgagtgccagcagagaatggtggccgaccacctgcagttcctgcacgccgagtgccacaacatcatcagacaggagaagaagaacgacatggccaacatgtacgtgctgctgagagccgtgagcaccggcctgccccacatgatccaggagctgcagaaccacatccacgacgagggcctgagagccaccagcaacctgacccaggagaacatgcccaccctgttcgtggagagcgtgctggaggtgcacggcaagttcgtgcagctgatcaacaccgtgctgaacggcgaccagcacttcatgagcgccctggacaaggccctgaccagcgtggtgaactacagagagcccaagagcgtgtgcaaggcccccgagctgctggccaagtactgcgacaacctgctgaagaagagcgccaagggcatgaccgagaacgaggtggaggacagactgaccagcttcatcaccgtgttcaagtacatcgacgacaaggacgtgttccagaagttctacgccagaatgctggccaagagactgatccacggcctgagcatgagcatggacagcgaggaggccatgatcaacaagctgaagcaggcctgcggctacgagttcaccagcaagctgcacagaatgtacaccgacatgagcgtgagcgccgacctgaacaacaagttcaacaacttcatcaagaaccaggacaccgtgatcgacctgggcatcagcttccagatctacgtgctgcaggccggcgcctggcccctgacccaggcccccagcagcaccttcgccatcccccaggagctggagaagagcgtgcagatgttcgagctgttctacagccagcacttcagcggcagaaagctgacctggctgcactacctgtgcaccggcgaggtgaagatgaactacctgggcaagccctacgtggccatggtgaccacctaccagatggccgtgctgctggccttcaacaacagcgagaccgtgagctacaaggagctgcaggacagcacccagatgaacgagaaggagctgaccaagaccatcaagagcctgctggacgtgaagatgatcaaccacgacagcgagaaggaggacatcgacgccgagagcagcttcagcctgaacatgaacttcagcagcaagagaaccaagttcaagatcaccaccagcatgcagaaggacaccccccaggagatggagcagaccagaagcgccgtggacgaggacagaaagatgtacctgcaggccgccatcgtgagaatcatgaaggccagaaaggtgctgagacacaacgccctgatccaggaggtgatcagccagagcagagccagattcaaccccagcatcagcatgatcaagaagtgcatcgaggtgctgatcgacaagcagtacatcgagagaagccaggccagcgccgacgagtacagctacgtggcctag

SEQ ID NO: 10195 - DNA, 651 bp, synthetic construct
  misc_feature 1..651: note = Description of Artificial Sequence: Synthetic coding sequence
  source 1..651: mol_type = other DNA
atgagcctgaagcccagagtggtggacttcgacgagacctggaacaagctgctgaccaccatcaaggccgtggtgatgctggagtacgtggagagagccacctggaacgacagattcagcgacatctacgccctgtgcgtggcctaccccgagcccctgggcgagagactgtacaccgagaccaagatcttcctggagaaccacgtgagacacctgcacaagagagtgctggagagcgaggagcaggtgctggtgatgtaccacagatactgggaggagtacagcaagggcgccgactacatggactgcctgtacagatacctgaacacccagttcatcaagaagaacaagctgaccgaggccgacctgcagtacggctacggcggcgtggacatgaacgagcccctgatggagatcggcgagctggccctggacatgtggagaaagctgatggtggagcccctgcaggccatcctgatcagaatgctgctgagagagatcaagaacgacagaggcggcgaggaccccaaccagaaggtgatccacggcgtgatcaacagcttcgtgcacgtggagcagtacaagaagaagttccccctgaagttctaccaggagatcttcgagagccccttcctgaccgagaccggctag

SEQ ID NO: 10196 - DNA, 2295 bp, synthetic construct
  misc_feature 1..2295: note = Description of Artificial Sequence: Synthetic coding sequence
  source 1..2295: mol_type = other DNA
atgtacagagtgacctggagcaccttctggctgagattccagcactacacctgcaccatgagcctgaagcccagagtggtggacttcgacgagacctggaacaagctgctgaccaccatcaaggccgtggtgatgctggagtacgtggagagagccacctggaacgacagattcagcgacatctacgccctgtgcgtggcctaccccgagcccctgggcgagagactgtacaccgagaccaagatcttcctggagaaccacgtgagacacctgcacaagagagtgctggagagcgaggagcaggtgctggtgatgtaccacagatactgggaggagtacagcaagggcgccgactacatggactgcctgtacagatacctgaacacccagttcatcaagaagaacaagctgaccgaggccgacctgcagtacggctacggcggcgtggacatgaacgagcccctgatggagatcggcgagctggccctggacatgtggagaaagctgatggtggagcccctgcaggccatcctgatcagaatgctgctgagagagatcaagaacgacagaggcggcgaggaccccaaccagaaggtgatccacggcgtgatcaacagcttcgtgcacgtggagcagtacaagaagaagttccccctgaagttctaccaggagatcttcgagagccccttcctgaccgagaccggcgagtactacaagcaggaggccagcaacctgctgcaggagagcaactgcagccagtacatggagaaggtgctgggcagactgaaggacgaggagatcagatgcagaaagtacctgcaccccagcagctacaccaaggtgatccacgagtgccagcagagaatggtggccgaccacctgcagttcctgcacgccgagtgccacaacatcatcagacaggagaagaagaacgacatggccaacatgtacgtgctgctgagagccgtgagcaccggcctgccccacatgatccaggagctgcagaaccacatccacgacgagggcctgagagccaccagcaacctgacccaggagaacatgcccaccctgttcgtggagagcgtgctggaggtgcacggcaagttcgtgcagctgatcaacaccgtgctgaacggcgaccagcacttcatgagcgccctggacaaggccctgaccagcgtggtgaactacagagagcccaagagcgtgtgcaaggcccccgagctgctggccaagtactgcgacaacctgctgaagaagagcgccaagggcatgaccgagaacgaggtggaggacagactgaccagcttcatcaccgtgttcaagtacatcgacgacaaggacgtgttccagaagttctacgccagaatgctggccaagagactgatccacggcctgagcatgagcatggacagcgaggaggccatgatcaacaagctgaagcaggcctgcggctacgagttcaccagcaagctgcacagaatgtacaccgacatgagcgtgagcgccgacctgaacaacaagttcaacaacttcatcaagaaccaggacaccgtgatcgacctgggcatcagcttccagatctacgtgctgcaggccggcgcctggcccctgacccaggcccccagcagcaccttcgccatcccccaggagctggagaagagcgtgcagatgttcgagctgttctacagccagcacttcagcggcagaaagctgacctggctgcactacctgtgcaccggcgaggtgaagatgaactacctgggcaagccctacgtggccatggtgaccacctaccagatggccgtgctgctggccttcaacaacagcgagaccgtgagctacaaggagctgcaggacagcacccagatgaacgagaaggagctgaccaagaccatcaagagcctgctggacgtgaagatgatcaaccacgacagcgagaaggaggacatcgacgccgagagcagcttcagcctgaacatgaacttcagcagcaagagaaccaagttcaagatcaccaccagcatgcagaaggacaccccccaggagatggagcagaccagaagcgccgtggacgaggacagaaagatgtacctgcaggccgccatcgtgagaatcatgaaggccagaaaggtgctgagacacaacgccctgatccaggaggtgatcagccagagcagagccagattcaaccccagcatcagcatgatcaagaagtgcatcgaggtgctgatcgacaagcagtacatcgagagaagccaggccagcgccgacgagtacagctacgtggcctag

SEQ ID NO: 10197 - DNA, 2307 bp, synthetic construct
  misc_feature 1..2307: note = Description of Artificial Sequence: Synthetic coding sequence
  source 1..2307: mol_type = other DNA
atgagcaacctgagcaagggcaccggcagcagaaaggacaccaagatgagaatcagagccttccccatgaccatggacgagaagtacgtgaacagcatctgggacctgctgaagaacgccatccaggagatccagagaaagaacaacagcggcctgagcttcgaggagctgtacagaaacgcctacaccatggtgctgcacaagcacggcgagaagctgtacaccggcctgagagaggtggtgaccgagcacctgatcaacaaggtgagagaggacgtgctgaacagcctgaacaacaacttcctgcagaccctgaaccaggcctggaacgaccaccagaccgccatggtgatgatcagagacatcctgatgtacatggacagagtgtacgtgcagcagaacaacgtggagaacgtgtacaacctgggcctgatcatcttcagagaccaggtggtgagatacggctgcatcagagaccacctgagacagaccctgctggacatgatcgccagagagagaaagggcgaggtggtggacagaggcgccatcagaaacgcctgccagatgctgatgatcctgggcctggagggcagaagcgtgtacgaggaggacttcgaggcccccttcctggagatgagcgccgagttcttccagatggagagccagaagttcctggccgagaacagcgccagcgtgtacatcaagaaggtggaggccagaatcaacgaggagatcgagagagtgatgcactgcctggacaagagcaccgaggagcccatcgtgaaggtggtggagagagagctgatcagcaagcacatgaagaccatcgtggagatggagaacagcggcctggtgcacatgctgaagaacggcaagaccgaggacctgggctgcatgtacaagctgttcagcagagtgcccaacggcctgaagaccatgtgcgagtgcatgagcagctacctgagagagcagggcaaggccctggtgagcgaggagggcgagggcaagaaccccgtggactacatccagggcctgctggacctgaagagcagattcgacagattcctgctggagagcttcaacaacgacagactgttcaagcagaccatcgccggcgacttcgagtacttcctgaacctgaacagcagaagccccgagtacctgagcctgttcatcgacgacaagctgaagaagggcgtgaagggcctgaccgagcaggaggtggagaccatcctggacaaggccatggtgctgttcagattcatgcaggagaaggacgtgttcgagagatactacaagcagcacctggccagaagactgctgaccaacaagagcgtgagcgacgacagcgagaagaacatgatcagcaagctgaagaccgagtgcggctgccagttcaccagcaagctggagggcatgttcagagacatgagcatcagcaacaccaccatggacgagttcagacagcacctgcaggccaccggcgtgagcctgggcggcgtggacctgaccgtgagagtgctgaccaccggctactggcccacccagagcgccacccccaagtgcaacatcccccccgcccccagacacgccttcgagatcttcagaagattctacctggccaagcacagcggcagacagctgaccctgcagcaccacatgggcagcgccgacctgaacgccaccttctacggccccgtgaagaaggaggacggcagcgaggtgggcgtgggcggcgcccaggtgaccggcagcaacaccagaaagcacatcctgcaggtgagcaccttccagatgaccatcctgatgctgttcaacaacagagagaagtacaccttcgaggagatccagcaggagaccgacatccccgagagagagctggtgagagccctgcagagcctggcctgcggcaagcccacccagagagtgctgaccaaggagcccaagagcaaggagatcgagaacggccacatcttcaccgtgaacgaccagttcaccagcaagctgcacagagtgaagatccagaccgtggccgccaagcagggcgagagcgaccccgagagaaaggagaccagacagaaggtggacgacgacagaaagcacgagatcgaggccgccatcgtgagaatcatgaagagcagaaagaagatgcagcacaacgtgctggtggccgaggtgacccagcagctgaaggccagattcctgcccagccccgtggtgatcaagaagagaatcgagggcctgatcgagagagagtacctggccagaacccccgaggacagaaaggtgtacacctacgtggcctag

SEQ ID NO: 10198 - DNA, 2109 bp, synthetic construct
  misc_feature 1..2109: note = Description of Artificial Sequence: Synthetic coding sequence
  source 1..2109: mol_type = other DNA
atgagcaacctgagcaagggcaccggcagcagaaaggacaccaagatgagaatcagagccttccccgtgagagaggacgtgctgaacagcctgaacaacaacttcctgcagaccctgaaccaggcctggaacgaccaccagaccgccatggtgatgatcagagacatcctgatgtacatggacagagtgtacgtgcagcagaacaacgtggagaacgtgtacaacctgggcctgatcatcttcagagaccaggtggtgagatacggctgcatcagagaccacctgagacagaccctgctggacatgatcgccagagagagaaagggcgaggtggtggacagaggcgccatcagaaacgcctgccagatgctgatgatcctgggcctggagggcagaagcgtgtacgaggaggacttcgaggcccccttcctggagatgagcgccgagttcttccagatggagagccagaagttcctggccgagaacagcgccagcgtgtacatcaagaaggtggaggccagaatcaacgaggagatcgagagagtgatgcactgcctggacaagagcaccgaggagcccatcgtgaaggtggtggagagagagctgatcagcaagcacatgaagaccatcgtggagatggagaacagcggcctggtgcacatgctgaagaacggcaagaccgaggacctgggctgcatgtacaagctgttcagcagagtgcccaacggcctgaagaccatgtgcgagtgcatgagcagctacctgagagagcagggcaaggccctggtgagcgaggagggcgagggcaagaaccccgtggactacatccagggcctgctggacctgaagagcagattcgacagattcctgctggagagcttcaacaacgacagactgttcaagcagaccatcgccggcgacttcgagtacttcctgaacctgaacagcagaagccccgagtacctgagcctgttcatcgacgacaagctgaagaagggcgtgaagggcctgaccgagcaggaggtggagaccatcctggacaaggccatggtgctgttcagattcatgcaggagaaggacgtgttcgagagatactacaagcagcacctggccagaagactgctgaccaacaagagcgtgagcgacgacagcgagaagaacatgatcagcaagctgaagaccgagtgcggctgccagttcaccagcaagctggagggcatgttcagagacatgagcatcagcaacaccaccatggacgagttcagacagcacctgcaggccaccggcgtgagcctgggcggcgtggacctgaccgtgagagtgctgaccaccggctactggcccacccagagcgccacccccaagtgcaacatcccccccgcccccagacacgccttcgagatcttcagaagattctacctggccaagcacagcggcagacagctgaccctgcagcaccacatgggcagcgccgacctgaacgccaccttctacggccccgtgaagaaggaggacggcagcgaggtgggcgtgggcggcgcccaggtgaccggcagcaacaccagaaagcacatcctgcaggtgagcaccttccagatgaccatcctgatgctgttcaacaacagagagaagtacaccttcgaggagatccagcaggagaccgacatccccgagagagagctggtgagagccctgcagagcctggcctgcggcaagcccacccagagagtgctgaccaaggagcccaagagcaaggagatcgagaacggccacatcttcaccgtgaacgaccagttcaccagcaagctgcacagagtgaagatccagaccgtggccgccaagcagggcgagagcgaccccgagagaaaggagaccagacagaaggtggacgacgacagaaagcacgagatcgaggccgccatcgtgagaatcatgaagagcagaaagaagatgcagcacaacgtgctggtggccgaggtgacccagcagctgaaggccagattcctgcccagccccgtggtgatcaagaagagaatcgagggcctgatcgagagagagtacctggccagaacccccgaggacagaaaggtgtacacctacgtggcctag

SEQ ID NO: 10199 - DNA, 2235 bp, synthetic construct
  misc_feature 1..2235: note = Description of Artificial Sequence: Synthetic coding sequence
  source 1..2235: mol_type = other DNA
atggacgagaagtacgtgaacagcatctgggacctgctgaagaacgccatccaggagatccagagaaagaacaacagcggcctgagcttcgaggagctgtacagaaacgcctacaccatggtgctgcacaagcacggcgagaagctgtacaccggcctgagagaggtggtgaccgagcacctgatcaacaaggtgagagaggacgtgctgaacagcctgaacaacaacttcctgcagaccctgaaccaggcctggaacgaccaccagaccgccatggtgatgatcagagacatcctgatgtacatggacagagtgtacgtgcagcagaacaacgtggagaacgtgtacaacctgggcctgatcatcttcagagaccaggtggtgagatacggctgcatcagagaccacctgagacagaccctgctggacatgatcgccagagagagaaagggcgaggtggtggacagaggcgccatcagaaacgcctgccagatgctgatgatcctgggcctggagggcagaagcgtgtacgaggaggacttcgaggcccccttcctggagatgagcgccgagttcttccagatggagagccagaagttcctggccgagaacagcgccagcgtgtacatcaagaaggtggaggccagaatcaacgaggagatcgagagagtgatgcactgcctggacaagagcaccgaggagcccatcgtgaaggtggtggagagagagctgatcagcaagcacatgaagaccatcgtggagatggagaacagcggcctggtgcacatgctgaagaacggcaagaccgaggacctgggctgcatgtacaagctgttcagcagagtgcccaacggcctgaagaccatgtgcgagtgcatgagcagctacctgagagagcagggcaaggccctggtgagcgaggagggcgagggcaagaaccccgtggactacatccagggcctgctggacctgaagagcagattcgacagattcctgctggagagcttcaacaacgacagactgttcaagcagaccatcgccggcgacttcgagtacttcctgaacctgaacagcagaagccccgagtacctgagcctgttcatcgacgacaagctgaagaagggcgtgaagggcctgaccgagcaggaggtggagaccatcctggacaaggccatggtgctgttcagattcatgcaggagaaggacgtgttcgagagatactacaagcagcacctggccagaagactgctgaccaacaagagcgtgagcgacgacagcgagaagaacatgatcagcaagctgaagaccgagtgcggctgccagttcaccagcaagctggagggcatgttcagagacatgagcatcagcaacaccaccatggacgagttcagacagcacctgcaggccaccggcgtgagcctgggcggcgtggacctgaccgtgagagtgctgaccaccggctactggcccacccagagcgccacccccaagtgcaacatcccccccgcccccagacacgccttcgagatcttcagaagattctacctggccaagcacagcggcagacagctgaccctgcagcaccacatgggcagcgccgacctgaacgccaccttctacggccccgtgaagaaggaggacggcagcgaggtgggcgtgggcggcgcccaggtgaccggcagcaacaccagaaagcacatcctgcaggtgagcaccttccagatgaccatcctgatgctgttcaacaacagagagaagtacaccttcgaggagatccagcaggagaccgacatccccgagagagagctggtgagagccctgcagagcctggcctgcggcaagcccacccagagagtgctgaccaaggagcccaagagcaaggagatcgagaacggccacatcttcaccgtgaacgaccagttcaccagcaagctgcacagagtgaagatccagaccgtggccgccaagcagggcgagagcgaccccgagagaaaggagaccagacagaaggtggacgacgacagaaagcacgagatcgaggccgccatcgtgagaatcatgaagagcagaaagaagatgcagcacaacgtgctggtggccgaggtgacccagcagctgaaggccagattcctgcccagccccgtggtgatcaagaagagaatcgagggcctgatcgagagagagtacctggccagaacccccgaggacagaaaggtgtacacctacgtggcctag

SEQ ID NO: 10200 - DNA, 2235 bp, synthetic construct; identical to SEQ ID NO: 10199
  misc_feature 1..2235: note = Description of Artificial Sequence: Synthetic coding sequence
  source 1..2235: mol_type = other DNA

SEQ ID NO: 10201 - DNA, 1398 bp, synthetic construct
  misc_feature 1..1398: note = Description of Artificial Sequence: Synthetic coding sequence
  source 1..1398: mol_type = other DNA
atggagaccggcttccccgccatcatgtaccccggcagcttcatcggcggctggggcgaggagtacctgagctgggagggccccggcctgcccgacttcgtgttccagcagcagcccgtggagagcgaggccatgcactgcagcaaccccaagagcggcgtggtgctggccaccgtggccagaggccccgacgcctgccagatcctgaccagagcccccctgggccaggaccccccccagagaaccgtgctgggcctgctgaccgccaacggccagtacagaagaacctgcggccagggcatcaccagaatcagatgctacagcggcagcgagaacgccttcccccccgccggcaagaaggccctgcccgactgcggcgtgcaggagccccccaagcagggcttcgacatctacatggacgagctggagcagggcgacagagacagctgcagcgtgagagagggcatggccttcgaggacgtgtacgaggtggacaccggcaccctgaagagcgacctgcacttcctgctggacttcaacaccgtgagccccatgctggtggacagcagcctgctgagccagagcgaggacatcagcagcctgggcaccgacgtgatcaacgtgaccgagtacgccgaggagatctaccagtacctgagagaggccgagatcagacacagacccaaggcccactacatgaagaagcagcccgacatcaccgagggcatgagaaccatcctggtggactggctggtggaggtgggcgaggagtacaagctgagagccgagaccctgtacctggccgtgaacttcctggacagattcctgagctgcatgagcgtgctgagaggcaagctgcagctggtgggcaccgccgccatgctgctggccagcaagtacgaggagatctacccccccgaggtggacgagttcgtgtacatcaccgacgacacctacaccaagagacagctgctgaagatggagcacctgctgctgaaggtgctggccttcgacctgaccgtgcccaccaccaaccagttcctgctgcagtacctgagaagacagggcgtgtgcgtgagaaccgagaacctggccaagtacgtggccgagctgagcctgctggaggccgaccccttcctgaagtacctgcccagcctgatcgccgccgccgccttctgcctggccaactacaccgtgaacaagcacttctggcccgagaccctggccgccttcaccggctacagcctgagcgagatcgtgccctgcctgagcgagctgcacaaggcctacctggacatcccccacagaccccagcaggccatcagagagaagtacaaggccagcaagtacctgtgcgtgagcctgatggagccccccgccgtgctgctgctgcagtag

SEQ ID NO: 10202 - DNA, 1395 bp, synthetic construct
  misc_feature 1..1395: note = Description of Artificial Sequence: Synthetic coding sequence
  source 1..1395: mol_type = other DNA
atggagaccggcttccccgccatcatgtaccccggcagcttcatcggcggctggggcgaggagtacctgagctgggagggccccggcctgcccgacttcgtgttccagcagcccgtggagagcgaggccatgcactgcagcaaccccaagagcggcgtggtgctggccaccgtggccagaggccccgacgcctgccagatcctgaccagagcccccctgggccaggaccccccccagagaaccgtgctgggcctgctgaccgccaacggccagtacagaagaacctgcggccagggcatcaccagaatcagatgctacagcggcagcgagaacgccttcccccccgccggcaagaaggccctgcccgactgcggcgtgcaggagccccccaagcagggcttcgacatctacatggacgagctggagcagggcgacagagacagctgcagcgtgagagagggcatggccttcgaggacgtgtacgaggtggacaccggcaccctgaagagcgacctgcacttcctgctggacttcaacaccgtgagccccatgctggtggacagcagcctgctgagccagagcgaggacatcagcagcctgggcaccgacgtgatcaacgtgaccgagtacgccgaggagatctaccagtacctgagagaggccgagatcagacacagacccaaggcccactacatgaagaagcagcccgacatcaccgagggcatgagaaccatcctggtggactggctggtggaggtgggcgaggagtacaagctgagagccgagaccctgtacctggccgtgaacttcctggacagattcctgagctgcatgagcgtgctgagaggcaagctgcagctggtgggcaccgccgccatgctgctggccagcaagtacgaggagatctacccccccgaggtggacgagttcgtgtacatcaccgacgacacctacaccaagagacagctgctgaagatggagcacctgctgctgaaggtgctggccttcgacctgaccgtgcccaccaccaaccagttcctgctgcagtacctgagaagacagggcgtgtgcgtgagaaccgagaacctggccaagtacgtggccgagctgagcctgctggaggccgaccccttcctgaagtacctgcccagcctgatcgccgccgccgccttctgcctggccaactacaccgtgaacaagcacttctggcccgagaccctggccgccttcaccggctacagcctgagcgagatcgtgccctgcctgagcgagctgcacaaggcctacctggacatcccccacagaccccagcaggccatcagagagaagtacaaggccagcaagtacctgtgcgtgagcctgatggagccccccgccgtgctgctgctgcagtag

SEQ ID NO: 10203 - DNA, 1266 bp, synthetic construct
  misc_feature 1..1266: note = Description of Artificial Sequence: Synthetic coding sequence
  source 1..1266: mol_type = other DNA
atgcactgcagcaaccccaagagcggcgtggtgctggccaccgtggccagaggccccgacgcctgccagatcctgaccagagcccccctgggccaggaccccccccagagaaccgtgctgggcctgctgaccgccaacggccagtacagaagaacctgcggccagggcatcaccagaatcagatgctacagcggcagcgagaacgccttcccccccgccggcaagaaggccctgcccgactgcggcgtgcaggagccccccaagcagggcttcgacatctacatggacgagctggagcagggcgacagagacagctgcagcgtgagagagggcatggccttcgaggacgtgtacgaggtggacaccggcaccctgaagagcgacctgcacttcctgctggacttcaacaccgtgagccccatgctggtggacagcagcctgctgagccagagcgaggacatcagcagcctgggcaccgacgtgatcaacgtgaccgagtacgccgaggagatctaccagtacctgagagaggccgagatcagacacagacccaaggcccactacatgaagaagcagcccgacatcaccgagggcatgagaaccatcctggtggactggctggtggaggtgggcgaggagtacaagctgagagccgagaccctgtacctggccgtgaacttcctggacagattcctgagctgcatgagcgtgctgagaggcaagctgcagctggtgggcaccgccgccatgctgctggccagcaagtacgaggagatctacccccccgaggtggacgagttcgtgtacatcaccgacgacacctacaccaagagacagctgctgaagatggagcacctgctgctgaaggtgctggccttcgacctgaccgtgcccaccaccaaccagttcctgctgcagtacctgagaagacagggcgtgtgcgtgagaaccgagaacctggccaagtacgtggccgagctgagcctgctggaggccgaccccttcctgaagtacctgcccagcctgatcgccgccgccgccttctgcctggccaactacaccgtgaacaagcacttctggcccgagaccctggccgccttcaccggctacagcctgagcgagatcgtgccctgcctgagcgagctgcacaaggcctacctggacatcccccacagaccccagcaggccatcagagagaagtacaaggccagcaagtacctgtgcgtgagcctgatggagccccccgccgtgctgctgctgcagtag

SEQ ID NO: 10204 - DNA, 1266 bp, synthetic construct; identical to SEQ ID NO: 10203
  misc_feature 1..1266: note = Description of Artificial Sequence: Synthetic coding sequence
  source 1..1266: mol_type = other DNA

SEQ ID NO: 10205 - DNA, 1299 bp, synthetic construct
  misc_feature 1..1299: note = Description of Artificial Sequence: Synthetic coding sequence
  source 1..1299: mol_type = other DNA
atgctgggcaacagcgcccccggccccgccaccagagaggccggcagcgccctgctggccctgcagcagaccgccctgcaggaggaccaggagaacatcaaccccgagaaggccgcccccgtgcagcagcccagaaccagagccgccctggccgtgctgaagagcggcaaccccagaggcctggcccagcagcagagacccaagaccagaagagtggcccccctgaaggacctgcccgtgaacgacgagcacgtgaccgtgcccccctggaaggccaacagcaagcagcccgccttcaccatccacgtggacgaggccgagaaggaggcccagaagaagcccgccgagagccagaagatcgagagagaggacgccctggccttcaacagcgccatcagcctgcccggccccagaaagcccctggtgcccctggactaccccatggacggcagcttcgagagcccccacaccatggacatgagcatcatcctggaggacgagaagcccgtgagcgtgaacgaggtgcccgactaccacgaggacatccacacctacctgagagagatggaggtgaagtgcaagcccaaggtgggctacatgaagaagcagcccgacatcaccaacagcatgagagccatcctggtggactggctggtggaggtgggcgaggagtacaagctgcagaacgagaccctgcacctggccgtgaactacatcgacagattcctgagcagcatgagcgtgctgagaggcaagctgcagctggtgggcaccgccgccatgctgctggccagcaagttcgaggagatctacccccccgaggtggccgagttcgtgtacatcaccgacgacacctacaccaagaagcaggtgctgagaatggagcacctggtgctgaaggtgctgaccttcgacctggccgcccccaccgtgaaccagttcctgacccagtacttcctgcaccagcagcccgccaactgcaaggtggagagcctggccatgttcctgggcgagctgagcctgatcgacgccgacccctacctgaagtacctgcccagcgtgatcgccggcgccgccttccacctggccctgtacaccgtgaccggccagagctggcccgagagcctgatcagaaagaccggctacaccctggagagcctgaagccctgcctgatggacctgcaccagacctacctgaaggccccccagcacgcccagcagagcatcagagagaagtacaagaacagcaagtaccacggcgtgagcctgctgaacccccccgagaccctgaacctgtag

SEQ ID NO: 10206 - DNA, 1302 bp, synthetic construct
  misc_feature 1..1302: note = Description of Artificial Sequence: Synthetic coding sequence
  source 1..1302: mol_type = other DNA
atggccctgagagtgaccagaaacagcaagatcaacgccgagaacaaggccaagatcaacatggccggcgccaagagagtgcccaccgcccccgccgccaccagcaagcccggcctgagacccagaaccgccctgggcgacatcggcaacaaggtgagcgagcagctgcaggccaagatgcccatgaagaaggaggccaagcccagcgccaccggcaaggtgatcgacaagaagctgcccaagcccctggagaaggtgcccatgctggtgcccgtgcccgtgagcgagcccgtgcccgagcccgagcccgagcccgagcccgagcccgtgaaggaggagaagctgagccccgagcccatcctggtggacaccgccagccccagccccatggagaccagcggctgcgcccccgccgaggaggacctgtgccaggccttcagcgacgtgatcctggccgtgaacgacgtggacgccgaggacggcgccgaccccaacctgtgcagcgagtacgtgaaggacatctacgcctacctgagacagctggaggaggagcaggccgtgagacccaagtacctgctgggcagagaggtgaccggcaacatgagagccatcctgatcgactggctggtgcaggtgcagatgaagttcagactgctgcaggagaccatgtacatgaccgtgagcatcatcgacagattcatgcagaacaactgcgtgcccaagaagatgctgcagctggtgggcgtgaccgccatgttcatcgccagcaagtacgaggagatgtacccccccgagatcggcgacttcgccttcgtgaccgacaacacctacaccaagcaccagatcagacagatggagatgaagatcctgagagccctgaacttcggcctgggcagacccctgcccctgcacttcctgagaagagccagcaagatcggcgaggtggacgtggagcagcacaccctggccaagtacctgatggagctgaccatgctggactacgacatggtgcacttcccccccagccagatcgccgccggcgccttctgcctggccctgaagatcctggacaacggcgagtggacccccaccctgcagcactacctgagctacaccgaggagagcctgctgcccgtgatgcagcacctggccaagaacgtggtgatggtgaaccagggcctgaccaagcacatgaccgtgaagaacaagtacgccaccagcaagcacgccaagatcagcaccctgccccagctgaacagcgccctggtgcaggacctggccaaggccgtggccaaggtgtag

SEQ ID NO: 10207 - DNA, 1191 bp, synthetic construct
  misc_feature 1..1191: note = Description of Artificial Sequence: Synthetic coding sequence
  source 1..1191: mol_type = other DNA
atggccctgagagtgaccagaaacagcaagatcaacgccgagaacaaggccaagatcaacatggccggcgccaagagagtgcccaccgcccccgccgccaccagcaagcccggcctgagacccagaaccgccctgggcgacatcggcaacaaggtgagcgagcagctgcaggccaagatgcccatgaagaaggaggccaagcccagcgccaccggcaaggtgatcgacaagaagctgcccaagcccctggagaaggtgcccatgctggtgcccgtgcccgtgagcgagcccgtgcccgagcccgagcccgagcccgagcccgagcccgtgaaggaggagaagctgagccccgagcccatcctggtggacaccgccagccccagccccatggagaccagcggctgcgcccccgccgaggaggacctgtgccaggccttcagcgacgtgatcctggccgtgaacgacgtggacgccgaggacggcgccgaccccaacctgtgcagcgagtacgtgaaggacatctacgcctacctgagacagctggaggaggagcaggccgtgagacccaagtacctgctgggcagagaggtgaccggcaacatgagagccatcctgatcgactggctggtgcaggtgcagatgaagttcagactgctgcaggagaccatgtacatgaccgtgagcatcatcgacagattcatgcagaacaactgcgtgcccaagaagatgctgcagctggtgggcgtgaccgccatgttcatcgccagcaagtacgaggagatgtacccccccgagatcggcgacttcgccttcgtgaccgacaacacctacaccaagcaccagatcagacagatggagatgaagatcctgagagccctgaacttcggcctgggcagacccctgcccctgcacttcctgagaagagccagcaagatcggcgaggtggacgtggagcagcacaccctggccaagtacctgatggagctgaccatgctggactacgacatggtgcacttcccccccagccagatcgccgccggcgccttctgcctggccctgaagatcctggacaacggcgagtggaccgtgaagaacaagtacgccaccagcaagcacgccaagatcagcaccctgccccagctgaacagcgccctggtgcaggacctggccaaggccgtggccaaggtgtag

SEQ ID NO: 10208 - DNA, 1206 bp, synthetic construct
  misc_feature 1..1206: note = Description of Artificial Sequence: Synthetic coding sequence
  source 1..1206: mol_type = other DNA
atggccctgagagtgaccagaaacagcaagatcaacgccgagaacaaggccaagatcaacatggccggcgccaagagagtgcccaccgcccccgccgccaccagcaagcccggcctgagacccagaaccgccctgggcgacatcggcaacaaggtgagcgagcagctgcaggccaagatgcccatgaagaaggaggccaagcccagcgccaccggcaaggtgatcgacaagaagctgcccaagcccctggagaaggtgcccatgctggtgcccgtgcccgtgagcgagcccgtgcccgagcccgagcccgagcccgagcccgagcccgtgaaggaggagaagctgagccccgagcccatcctggtggacaccgccagccccagccccatggagaccagcggctgcgcccccgccgaggaggacctgtgccaggccttcagcgacgtgatcctggccgtgaacgacgtggacgccgaggacggcgccgaccccaacctgtgcagcgagtacgtgaaggacatctacgcctacctgagacagctggaggaggagcaggccgtgagacccaagtacctgctgggcagagaggtgaccggcaacatgagagccatcctgatcgactggctggtgcaggtgcagatgaagttcagactgctgcaggagaccatgtacatgaccgtgagcatcatcgacagattcatgcagaacaactgcgtgcccaagaagatgctgcagctggtgggcgtgaccgccatgttcatcgccagcaagtacgaggagatgtacccccccgagatcggcgacttcgccttcgtgaccgacaacacctacaccaagcaccagatcagacagatggagatgaagatcctgagagccctgaacttcggcctgggcagacccctgcccctgcacttcctgagaagagccagcaagatcggcgaggtggacgtggagcagcacaccctggccaagtacctgatggagctgaccatgctggactacgacatggtgcacttcccccccagccagatcgccgccggcgccttctgcctggccctgaagatcctggacaacggcgagtggacccccaccctgcagcactacctgagctacaccgaggagagcctgctgcccgtgatgcagcacctggccaagaacgtggtgatggtgaaccagggcctgaccaagcacatggtgagccagtag

SEQ ID NO: 10209 - DNA, 1197 bp, synthetic construct
  misc_feature 1..1197: note = Description of Artificial Sequence: Synthetic coding sequence
  source 1..1197: mol_type = other DNA
atggccctgctgagaagacccaccgtgagcagcgacctggagaacatcgacaccggcgtgaacagcaaggtgaagagccacgtgaccatcagaagaaccgtgctggaggagatcggcaacagagtgaccaccagagccgcccaggtggccaagaaggcccagaacaccaaggtgcccgtgcagcccaccaagaccaccaacgtgaacaagcagctgaagcccaccgccagcgtgaagcccgtgcagatggagaagctggcccccaagggccccagccccacccccgaggacgtgagcatgaaggaggagaacctgtgccaggccttcagcgacgccctgctgtgcaagatcgaggacatcgacaacgaggactgggagaacccccagctgtgcagcgactacgtgaaggacatctaccagtacctgagacagctggaggtgctgcagagcatcaacccccacttcctggacggcagagacatcaacggcagaatgagagccatcctggtggactggctggtgcaggtgcacagcaagttcagactgctgcaggagaccctgtacatgtgcgtgggcatcatggacagattcctgcaggtgcagcccgtgagcagaaagaagctgcagctggtgggcatcaccgccctgctgctggccagcaagtacgaggagatgttcagccccaacatcgaggacttcgtgtacatcaccgacaacgcctacaccagcagccagatcagagagatggagaccctgatcctgaaggagctgaagttcgagctgggcagacccctgcccctgcacttcctgagaagagccagcaaggccggcgaggtggacgtggagcagcacaccctggccaagtacctgatggagctgaccctgatcgactacgacatggtgcactaccaccccagcaaggtggccgccgccgccagctgcctgagccagaaggtgctgggccagggcaagtggaacctgaagcagcagtactacaccggctacaccgagaacgaggtgctggaggtgatgcagcacatggccaagaacgtggtgaaggtgaacgagaacctgaccaagttcatcgccatcaagaacaagtacgccagcagcaagctgctgaagatcagcatgatcccccagctgaacagcaaggccgtgaaggacctggccagccccctgatcggcagaagctag

SEQ ID NO: 10210 - DNA, 432 bp, synthetic construct
  misc_feature 1..432: note = Description of Artificial Sequence: Synthetic coding sequence
  source 1..432: mol_type = other DNA
atggccggcaacttctggcagagcagccactacctgcagtggatcctggacaagcaggacctgctgaaggagagacagaaggacctgaagttcctgagcgaggaggagtactggaagctgcagatcttcttcaccaacgtgatccaggccctgggcgagcacctgaagctgagacagcaggtgatcgccaccgccaccgtgtacttcaagagattctacgccagatacagcctgaagagcatcgaccccgtgctgatggcccccacctgcgtgttcctggccagcaaggtggaggagttcggcgtggtgagcaacaccagactgatcgccgccgccaccagcgtgtgcaagtgcaagaagtacatctgcttcaaggacgtgatcctgaagaaggcccccgagtacatcgacttcttcttcttcagcctgtag

SEQ ID NO: 10211 - DNA, 852 bp, synthetic construct
  misc_feature 1..852: note = Description of Artificial Sequence: Synthetic coding sequence
  source 1..852: mol_type = other DNA
atggccggcaacttctggcagagcagccactacctgcagtggatcctggacaagcaggacctgctgaaggagagacagaaggacctgaagttcctgagcgaggaggagtactggaagctgcagatcttcttcaccaacgtgatccaggccctgggcgagcacctgaagctgagacagcaggtgatcgccaccgccaccgtgtacttcaagagattctacgccagatacagcctgaagagcatcgaccccgtgctgatggcccccacctgcgtgttcctggccagcaaggtggaggagttcggcgtggtgagcaacaccagactgatcgccgccgccaccagcgtgctgaagaccagattcagctacgccttccccaaggagttcccctacagaatgaaccacatcctggagtgcgagttctacctgctggagctgatggactgctgcctgatcgtgtaccacccctacagacccctgctgcagtacgtgcaggacatgggccaggaggacatgctgctgcccctggcctggagaatcgtgaacgacacctacagaaccgacctgtgcctgctgtacccccccttcatgatcgccctggcctgcctgcacgtggcctgcgtggtgcagcagaaggacgccagacagtggttcgccgagctgagcgtggacatggagaagatcctggagatcatcagagtgatcctgaagctgtacgagcagtggaagaacttcgacgagagaaaggagatggccaccatcctgagcaagatgcccaagcccaagcccccccccaacagcgagggcgagcagggccccaacggcagccagaacagcagctacagccagagctag

SEQ ID NO: 10212 - DNA, 597 bp, synthetic construct
  misc_feature 1..597: note = Description of Artificial Sequence: Synthetic coding sequence
  source 1..597: mol_type = other DNA
atggcccccacctgcgtgttcctggccagcaaggtggaggagttcggcgtggtgagcaacaccagactgatcgccgccgccaccagcgtgctgaagaccagattcagctacgccttccccaaggagttcccctacagaatgaaccacatcctggagtgcgagttctacctgctggagctgatggactgctgcctgatcgtgtaccacccctacagacccctgctgcagtacgtgcaggacatgggccaggaggacatgctgctgcccctggcctggagaatcgtgaacgacacctacagaaccgacctgtgcctgctgtacccccccttcatgatcgccctggcctgcctgcacgtggcctgcgtggtgcagcagaaggacgccagacagtggttcgccgagctgagcgtggacatggagaagatcctggagatcatcagagtgatcctgaagctgtacgagcagtggaagaacttcgacgagagaaaggagatggccaccatcctgagcaagatgcccaagcccaagcccccccccaacagcgagggcgagcagggccccaacggcagccagaacagcagctacagccagagctag

SEQ ID NO: 10213 - DNA, 597 bp, synthetic construct; identical to SEQ ID NO: 10212
  misc_feature 1..597: note = Description of Artificial Sequence: Synthetic coding sequence
  source 1..597: mol_type = other DNA

SEQ ID NO: 10214 - DNA, 489 bp, synthetic construct
  misc_feature 1..489: note = Description of Artificial Sequence: Synthetic coding sequence
  source 1..489: mol_type = other DNA
atggcccccacctgcgtgttcctggccagcaaggtggaggagttcggcgtggtgagcaacaccagactgatcgccgccgccaccagcgtgctgaagaccagattcagctacgccttccccaaggagttcccctacagaatgaaccacatcctggagtgcgagttctacctgctggagctgatggactgctgcctgatcgtgtaccacccctacagacccctgctgcagtacgtgcaggacatgggccaggaggacatgctgctgcccctggcctggagaatcgtgaacgacacctacagaaccgacctgtgcctgctgtacccccccttcatgatcgccctggcctgcctgcacgtggcctgcgtggtgcagcagaaggacgccagacagtggttcgccgagctgagcgtggacatggagaagatcctggagatcatcagagtgatcctgaagctgtacgagcagtggaagaacttcgacgagagatag

SEQ ID NO: 10215 - DNA, 2283 bp, synthetic construct
  misc_feature 1..2283: note = Description of Artificial Sequence: Synthetic coding sequence
  source 1..2283: mol_type = other DNA
atgagcaccgtggaggaggacagcgacaccgtgaccgtggagaccgtgaacagcgtgaccctgacccaggacaccgagggcaacctgatcctgcactgcccccagaacgaggccgacgagatcgacagcgaggacagcatcgagcccccccacaagagactgtgcctgagcagcgaggacgaccagagcatcgacgacagcaccccctgcatcagcgtggtggccctgcccctgagcgagaacgaccagagcttcgaggtgaccatgaccgccaccaccgaggtggccgacgacgaggtgaccgagggcaccgtgacccagatccagatcctgcagaacgagcagctggacgagatcagccccctgggcaacgaggaggtgagcgccgtgagccaggcctggttcaccaccaaggaggacaaggacagcctgaccaacaagggccacaagtggaagcagggcatgtggagcaaggaggagatcgacatcctgatgaacaacatcgagagatacctgaaggccagaggcatcaaggacgccaccgagatcatcttcgagatgagcaaggacgagagaaaggacttctacagaaccatcgcctggggcctgaacagacccctgttcgccgtgtacagaagagtgctgagaatgtacgacgacagaaaccacgtgggcaagtacacccccgaggagatcgagaagctgaaggagctgagaatcaagcacggcaacgactgggccaccatcggcgccgccctgggcagaagcgccagcagcgtgaaggacagatgcagactgatgaaggacacctgcaacaccggcaagtggaccgaggaggaggagaagagactggccgaggtggtgcacgagctgaccagcaccgagcccggcgacatcgtgacccagggcgtgagctgggccgccgtggccgagagagtgggcaccagaagcgagaagcagtgcagaagcaagtggctgaactacctgaactggaagcagagcggcggcaccgagtggaccaaggaggacgagatcaacctgatcctgagaatcgccgagctggacgtggccgacgagaacgacatcaactgggacctgctggccgagggctggagcagcgtgagaagcccccagtggctgagaagcaagtggtggaccatcaagagacagatcgccaaccacaaggacgtgagcttccccgtgctgatcaagggcctgaagcagctgcacgagaaccagaagaacaaccccaccctgctggagaacaagagcggcagcggcgtgcccaacagcaacaccaacagcagcgtgcagcacgtgcagatcagagtggccagactggaggacaacaccgccatcagcagcagccccatggccgccctgcagatccccgtgcagatcacccacgtgagcagcgccgacagccccgccaccgtggacagcgagaccatcaccctgaacagcggcaccctgcagaccttcgagatcctgcccagcttccacctgcagcccaccggcacccccggcacctacctgctgcagaccagcagcagccagggcctgcccctgaccctgaccgccagccccaccgtgaccctgaccgccgccgcccccgccagccccgagcagatcatcgtgcacgccctgagccccgagcacctgctgaacaccagcgacaacgtgaccgtgcagtgccacacccccagagtgatcatccagaccgtggccaccgaggacatcaccagcagcatcagccaggccgagctgaccgtggacagcgacatccagagcagcgacttccccgagccccccgacgccctggaggccgacaccttccccgacgagatccaccaccccaagatgaccgtggagcccagcttcaacgacgcccacgtgagcaagttcagcgaccagaacagcaccgagctgatgaacagcgtgatggtgagaaccgaggaggagatcagcgacaccgacctgaagcaggaggagagccccagcgacctggccagcgcctacgtgaccgagggcctggagagccccaccatcgaggagcaggtggaccagaccatcgacgacgagaccatcctgatcgtgcccagcccccacggcttcatccaggccagcgacgtgatcgacaccgagagcgtgctgcccctgaccaccctgaccgaccccatcctgcagcaccaccaggaggagagcaacatcatcggcagcagcctgggcagccccgtgagcgaggacagcaaggacgtggaggacctggtgaactgccactag

SEQ ID NO: 10216 - DNA, 858 bp, synthetic construct
  misc_feature 1..858: note = Description of Artificial Sequence: Synthetic coding sequence
  source 1..858: mol_type = other DNA
atgagcaccgtggaggaggacagcgacaccgtgaccgtggagaccgtgaacagcgtgaccctgacccaggacaccgagggcaacctgatcctgcactgcccccagaacgaggccgacgagatcgacagcgaggacagcatcgagcccccccacaagagactgtgcctgagcagcgaggacgaccagagcatcgacgacagcaccccctgcatcagcgtggtggccctgcccctgagcgagaacgaccagagcttcgaggtgaccatgaccgccaccaccgaggtggccgacgacgaggtgaccgagggcaccgtgacccagatccagatcctgcagaacgagcagctggacgagatcagccccctgggcaacgaggaggtgagcgccgtgagccaggcctggttcaccaccaaggaggacaaggacagcctgaccaacaagggccacaagtggaagcagggcatgtggagcaaggaggagatcgacatcctgatgaacaacatcgagagatacctgaaggccagaggcatcaaggacgccaccgagatcatcttcgagatgagcaaggacgagagaaaggacttctacagaaccatcgcctggggcctgaacagacccctgttcgccgtgtacagaagagtgctgagaatgtacgacgacagaaaccacgtgggcaagtacacccccgaggagatcgagaagctgaaggagaagaaggccatcgccgcctgcttcttcttcacccacagacagctgtggacccccaagaagggccacaccttcaagctgtggctgagcaagtactgctgcccccagctgcccaaccagagcaacggcaagaagaagaacgaggagtag

SEQ ID NO: 10217 - DNA, 2283 bp, synthetic construct; identical to SEQ ID NO: 10215
  misc_feature 1..2283: note = Description of Artificial Sequence: Synthetic coding sequence
  source 1..2283: mol_type = other DNA

SEQ ID NO: 10218 - DNA, 735 bp, synthetic construct
  misc_feature 1..735: note = Description of Artificial Sequence: Synthetic coding sequence
  source 1..735: mol_type = other DNA
atgagcaccgtggaggaggacagcgacaccgtgaccgtggagaccgtgaacagcgtgaccctgacccaggacaccgagggcaacctgatcctgcactgcccccagaacgtgagcgagaacgaccagagcttcgaggtgaccatgaccgccaccaccgaggtggccgacgacgaggtgaccgagggcaccgtgacccagatccagatcctgcagaacgagcagctggacgagatcagccccctgggcaacgaggaggtgagcgccgtgagccaggcctggttcaccaccaaggaggacaaggacagcctgaccaacaagggccacaagtggaagcagggcatgtggagcaaggaggagatcgacatcctgatgaacaacatcgagagatacctgaaggccagaggcatcaaggacgccaccgagatcatcttcgagatgagcaaggacgagagaaaggacttctacagaaccatcgcctggggcctgaacagacccctgttcgccgtgtacagaagagtgctgagaatgtacgacgacagaaaccacgtgggcaagtacacccccgaggagatcgagaagctgaaggagaagaaggccatcgccgcctgcttcttcttcacccacagacagctgtggacccccaagaagggccacaccttcaagctgtggctgagcaagtactgctgcccccagctgcccaaccagagcaacggcaagaagaagaacgaggagtag

SEQ ID NO: 10219 - DNA, 819 bp, synthetic construct
  misc_feature 1..819: note = Description of Artificial Sequence: Synthetic coding sequence
  source 1..819: mol_type = other DNA
atgagcaccgtggaggaggacagcgacaccgtgaccgtggagaccgtgaacagcgtgaccctgacccaggacaccgagggcaacctgatcctgcactgcccccagaacgaggccgacgagatcgacagcgaggacagcatcgagcccccccacaagagactgtgcctgagcagcgaggacgaccagagcatcgacgacagcaccccctgcatcagcgtggtggccctgcccctgagcgagaacgaccagagcttcgaggtgaccatgaccgccaccaccgaggtggccgacgacgaggtgaccgagggcaccgtgacccagatccagatcctgcagaacgagcagctggacgagatcagccccctgggcaacgaggaggtgagcgccgtgagccaggcctggttcaccaccaaggaggacaaggacagcctgaccaacaagggccacaagtggaagcagggcatgtggagcaaggaggagatcgacatcctgatgaacaacatcgagagatacctgaaggccagaggcatcaaggacgccaccgagatcatcttcgagatgagcaaggacgagagaaaggacttctacagaaccatcgcctggggcctgaacagacccctgttcgccgtgtacagaagagtgctgagaatgtacgacgacagaaaccacgtgggcaagtacacccccgaggagatcgagaagctgaaggagcagctgtggacccccaagaagggccacaccttcaagctgtggctgagcaagtactgctgcccccagctgcccaaccagagcaacggcaagaagaagaacgaggagtag

SEQ ID NO: 10220 - DNA, 2073 bp, synthetic construct
  misc_feature 1..2073: note = Description of Artificial Sequence: Synthetic coding sequence
  source 1..2073: mol_type = other DNA
atgagcaccgtggaggaggacagcgacaccgtgaccgtggagaccgtgaacagcgtgaccctgacccaggacaccgagggcaacctgatcctgcactgcccccagaacgaggccgacgagatcgacagcgaggacagcatcgagcccccccacaagagactgtgcctgagcagcgaggacgaccagagcatcgacgacagcaccccctgcatcagcgtggtggccctgcccctgagcgagaacgaccagagcttcgaggtgaccatgaccgccaccaccgaggtggccgacgacgaggtgaccgagggcaccgtgacccagatccagatcctgcagaacgagcagctggacgagatcagccccctgggcaacgaggaggtgagcgccgtgagccaggcctggttcaccaccaaggaggacaaggacagcctgaccaacaagggccacaagtggaagcagggcatgtggagcaaggaggagatcgacatcctgatgaacaacatcgagagatacctgaaggccagaggcatcaaggacgccaccgagatcatcttcgagatgagcaaggacgagagaaaggacttctacagaaccatcgcctggggcctgaacagacccctgttcgccgtgtacagaagagtgctgagaatgtacgacgacagaaaccacgtgggcaagtacacccccgaggagatcgagaagctgaaggagctgagaatcaagcacggcaacgactgggccaccatcggcgccgccctgggcagaagcgccagcagcgtgaaggacagatgcagactgatgaaggacacctgcaacaccggcaagtggaccgaggaggaggagaagagactggccgaggtggtgcacgagctgaccagcaccgagcccggcgacatcgtgacccagggcgtgagctgggccgccgtggccgagagagtgggcaccagaagcgagaagcagtgcagaagcaagtggctgaactacctgaactggaagcagagcggcggcaccgagtggaccaaggaggacgagatcaacctgatcctgagaatcgccgagctggacgtggccgacgagaacgacatcaactgggacctgctggccgagggctggagcagcgtgagaagcccccagtggctgagaagcaagtggtggaccatcaagagacagatcgccaaccacaaggacgtgagcttccccgccagcgccgacagccccgccaccgtggacagcgagaccatcaccctgaacagcggcaccctgcagaccttcgagatcctgcccagcttccacctgcagcccaccggcacccccggcacctacctgctgcagaccagcagcagccagggcctgcccctgaccctgaccgccagccccaccgtgaccctgaccgccgccgcccccgccagccccgagcagatcatcgtgcacgccctgagccccgagcacctgctgaacaccagcgacaacgtgaccgtgcagtgccacacccccagagtgatcatccagaccgtggccaccgaggacatcaccagcagcatcagccaggccgagctgaccgtggacagcgacatccagagcagcgacttccccgagccccccgacgccctggaggccgacaccttccccgacgagatccaccaccccaagatgaccgtggagcccagcttcaacgacgcccacgtgagcaagttcagcgaccagaacagcaccgagctgatgaacagcgtgatggtgagaaccgaggaggagatcagcgacaccgacctgaagcaggaggagagccccagcgacctggccagcgcctacgtgaccgagggcctggagagccccaccatcgaggagcaggtggaccagaccatcgacgacgagaccatcctgatcgtgcccagcccccacggcttcatccaggccagcgacgtgatcgacaccgagagcgtgctgcccctgaccaccctgaccgaccccatcctgcagcaccaccaggaggagagcaacatcatcggcagcagcctgggcagccccgtgagcgaggacagcaaggacgtggaggacctggtgaactgccactag

SEQ ID NO: 10221 - DNA, 1485 bp, synthetic construct
  misc_feature 1..1485: note = Description of Artificial Sequence: Synthetic coding sequence
  source 1..1485: mol_type = other DNA
atgaaggacacctgcaacaccggcaagtggaccgaggaggaggagaagagactggccgaggtggtgcacgagctgaccagcaccgagcccggcgacatcgtgacccagggcgtgagctgggccgccgtggccgagagagtgggcaccagaagcgagaagcagtgcagaagcaagtggctgaactacctgaactggaagcagagcggcggcaccgagtggaccaaggaggacgagatcaacctgatcctgagaatcgccgagctggacgtggccgacgagaacgacatcaactgggacctgctggccgagggctggagcagcgtgagaagcccccagtggctgagaagcaagtggtggaccatcaagagacagatcgccaaccacaaggacgtgagcttccccgtgctgatcaagggcctgaagcagctgcacgagaaccagaagaacaaccccaccctgctggagaacaagagcggcagcggcgtgcccaacagcaacaccaacagcagcgtgcagcacgtgcagatcagagtggccagactggaggacaacaccgccatcagcagcagccccatggccgccctgcagatccccgtgcagatcacccacgtgagcagcgccgacagccccgccaccgtggacagcgagaccatcaccctgaacagcggcaccctgcagaccttcgagatcctgcccagcttccacctgcagcccaccggcacccccggcacctacctgctgcagaccagcagcagccagggcctgcccctgaccctgaccgccagccccaccgtgaccctgaccgccgccgcccccgccagccccgagcagatcatcgtgcacgccctgagccccgagcacctgctgaacaccagcgacaacgtgaccgtgcagtgccacacccccagagtgatcatccagaccgtggccaccgaggacatcaccagcagcatcagccaggccgagctgaccgtggacagcgacatccagagcagcgacttccccgagccccccgacgccctggaggccgacaccttccccgacgagatccaccaccccaagatgaccgtggagcccagcttcaacgacgcccacgtgagcaagttcagcgaccagaacagcaccgagctgatgaacagcgtgatggtgagaaccgaggaggagatcagcgacaccgacctgaagcaggaggagagccccagcgacctggccagcgcctacgtgaccgagggcctggagagccccaccatcgaggagcaggtggaccagaccatcgacgacgagaccatcctgatcgtgcccagcccccacggcttcatccaggccagcgacgtgatcgacaccgagagcgtgctgcccctgaccaccctgaccgaccccatcctgcagcaccaccaggaggagagcaacatcatcggcagcagcctgggcagccccgtgagcgaggacagcaaggacgtggaggacctggtgaactgccactag

SEQ ID NO: 10222 - DNA, 111 bp, synthetic construct
  misc_feature 1..111: note = Description of Artificial Sequence: Synthetic coding sequence
  source 1..111: mol_type = other DNA
atgagcaccgtggaggaggacagcgacaccgtgaccgtggagaccgtgaacagcgtgaccctgacccaggacaccgagggcaacctgatcctgcactgcccccagaactag

SEQ ID NO: 10223 - DNA, 33 bp, synthetic construct
  misc_feature 1..33: note = Description of Artificial Sequence: Synthetic coding sequence
  source 1..33: mol_type = other DNA
atgaccgccaccaccgaggtggccgacgactag

SEQ ID NO: 10224 - DNA, 111 bp, synthetic construct; identical to SEQ ID NO: 10222
  misc_feature 1..111: note = Description of Artificial Sequence: Synthetic coding sequence
  source 1..111: mol_type = other DNA

SEQ ID NO: 10225 - DNA, 735 bp, synthetic construct; identical to SEQ ID NO: 10218
  misc_feature 1..735: note = Description of Artificial Sequence: Synthetic coding sequence
  source 1..735: mol_type = other DNA

SEQ ID NO: 10226 - DNA, 582 bp, synthetic construct
  misc_feature 1..582: note = Description of Artificial Sequence: Synthetic coding sequence
  source 1..582: mol_type = other DNA
atgagcaccgtggaggaggacagcgacaccgtgaccgtggagaccgtgaacagcgtgaccctgacccaggacaccgagggcaacctgatcctgcactgcccccagaacgaggccgacgagatcgacagcgaggacagcatcgagcccccccacaagagactgtgcctgagcagcgaggacgaccagagcatcgacgacagcaccccctgcatcagcgtggtggccctgcccctgagcgagaacgaccagagcttcgaggtgaccatgaccgccaccaccgaggtggccgacgacgaggtgaccgagggcaccgtgacccagatccagatcctgcagaacgagcagctggacgagatcagccccctgggcaacgaggaggtgagcgccgtgagccaggcctggttcaccaccaaggaggacaaggacagcctgaccaacaagggccacaagtggaagcagggcatgtggagcaaggaggagatcgacatcctgatgaacaacatcgagagatacctgaaggccagaggcatcaaggacgccaccgagatcatcttcgagatgagcaaggacgagagaaagtag

SEQ ID NO: 10227 - DNA, 84 bp, synthetic construct
  misc_feature 1..84: note = Description of Artificial Sequence: Synthetic coding sequence
  source 1..84: mol_type = other DNA
atgagcaccgtggaggaggacagcgacaccgtgaccgtggagaccgtgaacagcgtgaccctgacccaggacaccgagggctag

SEQ ID NO: 10228 - DNA, 444 bp, synthetic construct
  misc_feature 1..444: note = Description of Artificial Sequence: Synthetic coding sequence
  source 1..444: mol_type = other DNA
atgagcaccgtggaggaggacagcgacaccgtgaccgtggagaccgtgaacagcgtgaccctgacccaggacaccgagggcaacctgatcctgcactgcccccagaacgaggccgacgagatcgacagcgaggacagcatcgagcccccccacaagagactgtgcctgagcagcgaggacgaccagagcatcgacgacagcaccccctgcatcagcgtggtggccctgcccctgagcgagaacgaccagagcttcgaggtgaccatgaccgccaccaccgaggtggccgacgacgaggtgaccgagggcaccgtgacccagatccagatcctgcagaacgagcagctggacgagatcagccccctgggcaacgaggaggtgagcgccgtgagccaggcctggttcaccaccaaggaggacaaggacagcctgaccaacaagtag

SEQ ID NO: 10229 - DNA, 222 bp, synthetic construct
  misc_feature 1..222: note = Description of Artificial Sequence: Synthetic coding sequence
  source 1..222: mol_type = other DNA
atgagcaccgtggaggaggacagcgacaccgtgaccgtggagaccgtgaacagcgtgaccctgacccaggacaccgagggcaacctgatcctgcactgcccccagaacgaggccgacgagatcgacagcgaggacagcatcgagcccccccacaagagactgtgcctgagcagcgaggacgaccagagcatcgacgacagcaccccctgcatcagcgtgtag

SEQ ID NO: 10230 - DNA, 2019 bp, synthetic construct
  misc_feature 1..2019: note = Description of Artificial Sequence: Synthetic coding sequence
  source 1..2019: mol_type = other DNA
atgaccgccaccaccgaggtggccgacgacgaggtgaccgagggcaccgtgacccagatccagatcctgcagaacgagcagctggacgagatcagccccctgggcaacgaggaggtgagcgccgtgagccaggcctggttcaccaccaaggaggacaaggacagcctgaccaacaagggccacaagtggaagcagggcatgtggagcaaggaggagatcgacatcctgatgaacaacatcgagagatacctgaaggccagaggcatcaaggacgccaccgagatcatcttcgagatgagcaaggacgagagaaaggacttctacagaaccatcgcctggggcctgaacagacccctgttcgccgtgtacagaagagtgctgagaatgtacgacgacagaaaccacgtgggcaagtacacccccgaggagatcgagaagctgaaggagctgagaatcaagcacggcaacgactgggccaccatcggcgccgccctgggcagaagcgccagcagcgtgaaggacagatgcagactgatgaaggacacctgcaacaccggcaagtggaccgaggaggaggagaagagactggccgaggtggtgcacgagctgaccagcaccgagcccggcgacatcgtgacccagggcgtgagctgggccgccgtggccgagagagtgggcaccagaagcgagaagcagtgcagaagcaagtggctgaactacctgaactggaagcagagcggcggcaccgagtggaccaaggaggacgagatcaacctgatcctgagaatcgccgagctggacgtggccgacgagaacgacatcaactgggacctgctggccgagggctggagcagcgtgagaagcccccagtggctgagaagcaagtggtggaccatcaagagacagatcgccaaccacaaggacgtgagcttccccgtgctgatcaagggcctgaagcagctgcacgagaaccagaagaacaaccccaccctgctggagaacaagagcggcagcggcgtgcccaacagcaacaccaacagcagcgtgcagcacgtgcagatcagagtggccagactggaggacaacaccgccatcagcagcagccccatggccgccctgcagatccccgtgcagatcacccacgtgagcagcgccgacagccccgccaccgtggacagcgagaccatcaccctgaacagcggcaccctgcagaccttcgagatcctgcccagcttccacctgcagcccaccggcacccccggcacctacctgctgcagaccagcagcagccagggcctgcccctgaccctgaccgccagccccaccgtgaccctgaccgccgccgcccccgccagccccgagcagatcatcgtgcacgccctgagccccgagcacctgctgaacaccagcgacaacgtgaccgtgcagtgccacacccccagagtgatcatccagaccgtggccaccgaggacatcaccagcagcatcagccaggccgagctgaccgtggacagcgacatccagagcagcgacttccccgagccccccgacgccctggaggccgacaccttccccgacgagatccaccaccccaagatgaccgtggagcccagcttcaacgacgcccacgtgagcaagttcagcgaccagaacagcaccgagctgatgaacagcgtgatggtgagaaccgaggaggagatcagcgacaccgacctgaagcaggaggagagccccagcgacctggccagcgcctacgtgaccgagggcctggagagccccaccatcgaggagcaggtggaccagaccatcgacgacgagaccatcctgatcgtgcccagcccccacggcttcatccaggccagcgacgtgatcgacaccgagagcgtgctgcccctgaccaccctgaccgaccccatcctgcagcaccaccaggaggagagcaacatcatcggcagcagcctgggcagccccgtgagcgaggacagcaaggacgtggaggacctggtgaactgccactag

SEQ ID NO: 10231 - DNA, 291 bp, synthetic construct
  misc_feature 1..291: note = Description of Artificial Sequence: Synthetic coding sequence
  source 1..291: mol_type = other DNA
atgagcaccgtggaggaggacagcgacaccgtgaccgtggagaccgtgaacagcgtgaccctgacccaggacaccgagggcaacctgatcctgcactgcccccagaacgaggccgacgagatcgacagcgaggacagcatcgagcccccccacaagagactgtgcctgagcagcgaggacgaccagagcatcgacgacagcaccccctgcatcagcgtggtggccctgcccctgagcgagaacgaccagagcttcgaggtgaccatgaccgccaccaccgaggtggcctag

SEQ ID NO: 10232 - DNA, 171 bp, synthetic construct
  misc_feature 1..171: note = Description of Artificial Sequence: Synthetic coding sequence
  source 1..171: mol_type = other DNA
atgagcaccgtggaggaggacagcgacaccgtgaccgtggagaccgtgaacagcgtgaccctgacccaggacaccgagggcaacctgatcctgcactgcccccagaacgaggccgacgagatcgacagcgaggacagcatcgagcccccccacaagagactgtgcctgtag

SEQ ID NO: 10233 - DNA, 858 bp, synthetic construct; identical to SEQ ID NO: 10216
  misc_feature 1..858: note = Description of Artificial Sequence: Synthetic coding sequence
  source 1..858: mol_type = other DNA

SEQ ID NO: 10234 - DNA, 150 bp, synthetic construct
  misc_feature 1..150: note = Description of Artificial Sequence: Synthetic coding sequence
  source 1..150: mol_type = other DNA
atgagcaccgtggaggaggacagcgacaccgtgaccgtggagaccgtgaacagcgtgaccctgacccaggacaccgagggcaacctgatcctgcactgcccccagaacgaggccgacgagatcgacagcgaggacagcatcgagccctag

SEQ ID NO: 10235 - DNA, 330 bp, synthetic construct
  misc_feature 1..330: note = Description of Artificial Sequence: Synthetic coding sequence
  source 1..330: mol_type = other DNA
atgagcaccgtggaggaggacagcgacaccgtgaccgtggagaccgtgaacagcgtgaccctgacccaggacaccgagggcaacctgatcctgcactgcccccagaacgaggccgacgagatcgacagcgaggacagcatcgagcccccccacaagagactgtgcctgagcagcgaggacgaccagagcatcgacgacagcaccccctgcatcagcgtggtggccctgcccctgagcgagaacgaccagagcttcgaggtgaccatgaccgccaccaccgaggtggccgacgacgaggtgaccgagggcaccgtgacccagatccagtag

SEQ ID NO: 10236 - DNA, 276 bp, synthetic construct
  misc_feature 1..276: note = Description of Artificial Sequence: Synthetic coding sequence
  source 1..276: mol_type = other DNA
atgagcaccgtggaggaggacagcgacaccgtgaccgtggagaccgtgaacagcgtgaccctgacccaggacaccgagggcaacctgatcctgcactgcccccagaacgaggccgacgagatcgacagcgaggacagcatcgagcccccccacaagagactgtgcctgagcagcgaggacgaccagagcatcgacgacagcaccccctgcatcagcgtggtggccctgcccctgagcgagaacgaccagagcttcgaggtgaccatgaccgcctag

SEQ ID NO: 10237 - DNA, 1647 bp, synthetic construct
  misc_feature 1..1647: note = Description of Artificial Sequence: Synthetic coding sequence
  source 1..1647: mol_type = other DNA
atggccaccggcgccaacgccacccccctggacttccccagcaagaagagaaagagaagcagatggaaccaggacaccatggagcagaagaccgtgatccccggcatgcccaccgtgatcccccccggcctgaccagagagcaggagagagcctacatcgtgcagctgcagatcgaggacctgaccagaaagctgagaaccggcgacctgggcatcccccccaaccccgaggacagaagccccagccccgagcccatctacaacagcgagggcaagagactgaacaccagagagttcagaaccagaaagaagctggaggaggagagacacaacctgatcaccgagatggtggccctgaaccccgacttcaagccccccgccgactacaagccccccgccaccagagtgagcgacaaggtgatgatcccccaggacgagtaccccgagatcaacttcgtgggcctgctgatcggccccagaggcaacaccctgaagaacatcgagaaggagtgcaacgccaagatcatgatcagaggcaagggcagcgtgaaggagggcaaggtgggcagaaaggacggccagatgctgcccggcgaggacgagcccctgcacgccctggtgaccgccaacaccatggagaacgtgaagaaggccgtggagcagatcagaaacatcctgaagcagggcatcgagacccccgaggaccagaacgacctgagaaagatgcagctgagagagctggccagactgaacggcaccctgagagaggacgacaacagaatcctgagaccctggcagagcagcgagaccagaagcatcaccaacaccaccgtgtgcaccaagtgcggcggcgccggccacatcgccagcgactgcaagttccagagacccggcgacccccagagcgcccaggacaaggccagaatggacaaggagtacctgagcctgatggccgagctgggcgaggcccccgtgcccgccagcgtgggcagcaccagcggccccgccaccacccccctggccagcgcccccagacccgccgcccccgccaacaacccccccccccccagcctgatgagcaccacccagagcagacccccctggatgaacagcggccccagcgagagcagaccctaccacggcatgcacggcggcggccccggcggccccggcggcggcccccacagcttcccccaccccctgcccagcctgaccggcggccacggcggccaccccatgcagcacaaccccaacggccccccccccccctggatgcagcccccccccccccccatgaaccagggcccccacccccccggccaccacggccccccccccatggaccagtacctgggcagcacccccgtgggcagcggcgtgtacagactgcaccagggcaagggcatgatgccccccccccccatgggcatgatgcccccccccccccccccccccagcggccagcccccccccccccccagcggccccctgcccccctggcagcagcagcagcagcagcccccccccccccccccccccagcagcagcatggccagcagcacccccctgccctggcagcagagaagcctgcccgccgccgccatggccagagccatgagagtgagaaccttcagagcccactggtag

SEQ ID NO: 10238 - DNA, 486 bp, synthetic construct
  misc_feature 1..486: note = Description of Artificial Sequence: Synthetic coding sequence
  source 1..486: mol_type = other DNA
atggagcaccagctgctgtgctgcgaggtggagaccatcagaagagcctaccccgacgccaacctgctgaacgacagagtgctgagagccatgctgaaggccgaggagacctgcgcccccagcgtgagctacttcaagtgcgtgcagaccttcgtggccctgtgcgccaccgacgtgaagttcatcagcaacccccccagcatggtggccgccggcagcgtggtggccgccgtgcagggcctgaacctgagaagccccaacaacttcctgagctactacagactgaccagattcctgagcagagtgatcaagtgcgaccccgactgcctgagagcctgccaggagcagatcgaggccctgctggagagcagcctgagacaggcccagcagaacatggaccccaaggccgccgaggaggaggaggaggaggaggaggaggtggacctggcctgcacccccaccgacgtgagagacgtggacatctag

SEQ ID NO: 10239 - DNA, 870 bp, synthetic construct
  misc_feature 1..870: note = Description of Artificial Sequence: Synthetic coding sequence
  source 1..870: mol_type = other DNA
atggagctgctgtgccacgaggtggaccccgtgagaagagccgtgagagacagaaacctgctgagagacgacagagtgctgcagaacctgctgaccatcgaggagagatacctgccccagtgcagctacttcaagtgcgtgcagaaggacatccagccctacatgagaagaatggtggccacctggatgctggaggtgtgcgaggagcagaagtgcgaggaggaggtgttccccctggccatgaactacctggacagattcctggccggcgtgcccacccccaagagccacctgcagctgctgggcgccgtgtgcatgttcctggccagcaagctgaaggagaccagccccctgaccgccgagaagctgtgcatctacaccgacaacagcatcaagccccaggagctgctggagtgggagctggtggtgctgggcaagctgaagtggaacctggccgccgtgaccccccacgacttcatcgagcacatcctgagaaagctgccccagcagagagagaagctgagcctgatcagaaagcacgcccagaccttcatcgccctgtgcgccaccgacttcaagttcgccatgtacccccccagcatgatcgccaccggcagcgtgggcgccgccatctgcggcctgcagcaggacgaggaggtgagcagcctgacctgcgacgccctgaccgagctgctggccaagatcaccaacaccgacgtggactgcctgaaggcctgccaggagcagatcgaggccgtgctgctgaacagcctgcagcagtacagacaggaccagagagacggcagcaagagcgaggacgagctggaccaggccagcacccccaccgacgtgagagacatcgacctgtag

SEQ ID NO: 10240 - DNA, 729 bp, synthetic construct
  misc_feature 1..729: note = Description of Artificial Sequence: Synthetic coding sequence
  source 1..729: mol_type = other DNA
atgaagagcgccggcggcagcggcagaagcctgctgcccagccccagagtgtgcgaggagcagagatgcgaggaggaggtgttccccctggccatgaactacctggacagatacctgagctgcgtgcccaccagaaaggcccagctgcagctgctgggcgccgtgtgcatgctgctggccagcaagctgagagagaccacccccctgaccatcgagaagctgtgcatctacaccgaccacgccgtgagccccagacagctgagagactgggaggtgctggtgctgggcaagctgaagtgggacctggccgccgtgatcgcccacgacttcctggccttcatcctgcacagactgagcctgcccagagacagacaggccctggtgaagaagcacgcccagaccttcctggccctgtgcgccaccgactacaccttcgccatgtacccccccagcatgatcgccaccggcagcatcggcgccgccgtgcagggcctgggcgcctgcagcatgagcggcgacgagctgaccgagctgctggccggcatcaccggcaccgaggtggactgcctgagagcctgccaggagcagatcgaggccgccctgagagagagcctgagagaggccagccagaccagcagcagccccgcccccaaggcccccagaggcagcagcagccagggccccagccagaccagcacccccaccgacgtgaccgccatccacctgtag

SEQ ID NO: 10241 - DNA, 636 bp, synthetic construct
  misc_feature 1..636: note = Description of Artificial Sequence: Synthetic coding sequence
  source 1..636: mol_type = other DNA
atgaactacctggacagatacctgagctgcgtgcccaccagaaaggcccagctgcagctgctgggcgccgtgtgcatgctgctggccagcaagctgagagagaccacccccctgaccatcgagaagctgtgcatctacaccgaccacgccgtgagccccagacagctgagagactgggaggtgctggtgctgggcaagctgaagtgggacctggccgccgtgatcgcccacgacttcctggccttcatcctgcacagactgagcctgcccagagacagacaggccctggtgaagaagcacgcccagaccttcctggccctgtgcgccaccgactacaccttcgccatgtacccccccagcatgatcgccaccggcagcatcggcgccgccgtgcagggcctgggcgcctgcagcatgagcggcgacgagctgaccgagctgctggccggcatcaccggcaccgaggtggactgcctgagagcctgccaggagcagatcgaggccgccctgagagagagcctgagagaggccagccagaccagcagcagccccgcccccaaggcccccagaggcagcagcagccagggccccagccagaccagcacccccaccgacgtgaccgccatccacctgtag

SEQ ID NO: 10242 - DNA, 879 bp, synthetic construct
  misc_feature 1..879: note = Description of Artificial Sequence: Synthetic coding sequence
  source 1..879: mol_type = other DNA
atggagctgctgtgctgcgagggcaccagacacgcccccagagccggccccgaccccagactgctgggcgaccagagagtgctgcagagcctgctgagactggaggagagatacgtgcccagagccagctacttccagtgcgtgcagagagagatcaagccccacatgagaaagatgctggcctactggatgctggaggtgtgcgaggagcagagatgcgaggaggaggtgttccccctggccatgaactacctggacagatacctgagctgcgtgcccaccagaaaggcccagctgcagctgctgggcgccgtgtgcatgctgctggccagcaagctgagagagaccacccccctgaccatcgagaagctgtgcatctacaccgaccacgccgtgagccccagacagctgagagactgggaggtgctggtgctgggcaagctgaagtgggacctggccgccgtgatcgcccacgacttcctggccttcatcctgcacagactgagcctgcccagagacagacaggccctggtgaagaagcacgcccagaccttcctggccctgtgcgccaccgactacaccttcgccatgtacccccccagcatgatcgccaccggcagcatcggcgccgccgtgcagggcctgggcgcctgcagcatgagcggcgacgagctgaccgagctgctggccggcatcaccggcaccgaggtggactgcctgagagcctgccaggagcagatcgaggccgccctgagagagagcctgagagaggccagccagaccagcagcagccccgcccccaaggcccccagaggcagcagcagccagggccccagccagaccagcacccccaccgacgtgaccgccatccacctgtag

SEQ ID NO: 10243 - DNA, 663 bp, synthetic construct
  misc_feature 1..663: note = Description of Artificial Sequence: Synthetic coding sequence
  source 1..663: mol_type = other DNA
atggagctgctgtgctgcgagggcaccagacacgcccccagagccggccccgaccccagactgctgggcgaccagagagtgctgcagagcctgctgagactggaggagagatacgtgcccagagccagctacttccagtgcgtgcagagagagatcaagccccacatgagaaagatgctggcctactggatgctggaggactgggaggtgctggtgctgggcaagctgaagtgggacctggccgccgtgatcgcccacgacttcctggccttcatcctgcacagactgagcctgcccagagacagacaggccctggtgaagaagcacgcccagaccttcctggccctgtgcgccaccgactacaccttcgccatgtacccccccagcatgatcgccaccggcagcatcggcgccgccgtgcagggcctgggcgcctgcagcatgagcggcgacgagctgaccgagctgctggccggcatcaccggcaccgaggtggactgcctgagagcctgccaggagcagatcgaggccgccctgagagagagcctgagagaggccagccagaccagcagcagccccgcccccaaggcccccagaggcagcagcagccagggccccagccagaccagcacccccaccgacgtgaccgccatccacctgtag

SEQ ID NO: 10244 - DNA, 291 bp, synthetic construct
  misc_feature 1..291: note = Description of Artificial Sequence: Synthetic coding sequence
  source 1..291: mol_type = other DNA
atgtacccccccagcatgatcgccaccggcagcatcggcgccgccgtgcagggcctgggcgcctgcagcatgagcggcgacgagctgaccgagctgctggccggcatcaccggcaccgaggtggactgcctgagagcctgccaggagcagatcgaggccgccctgagagagagcctgagagaggccagccagaccagcagcagccccgcccccaaggcccccagaggcagcagcagccagggccccagccagaccagcacccccaccgacgtgaccgccatccacctgtag

SEQ ID NO: 10245 - DNA, 132 bp, synthetic construct
  misc_feature 1..132: note = Description of Artificial Sequence: Synthetic coding sequence
  source 1..132: mol_type = other DNA
atgaactacctggacagatacctgagctgcgtgcccaccagaaaggcccagctgcagctgctgggcgccgtgtgcatgctgctggccagcaagctgagagagaccacccccctgaccatcgagaagctgtag

SEQ ID NO: 10246 - DNA, 357 bp, synthetic construct
  misc_feature 1..357: note = Description of Artificial Sequence: Synthetic coding sequence
  source 1..357: mol_type = other DNA
atgaactacctggacagatacctgagctgcgtgcccaccagaaaggcccagctgcagctgctgggcgccgtgtgcatgctgctggccagcaagctgagagagaccacccccctgaccatcgagaagctgtgcatctacaccgaccacgccgtgagccccagacagctgagagactgggaggtgctggtgctgggcaagctgaagtgggacctggccgccgtgatcgcccacgacttcctggccttcatcctgcacagactgagcctgcccagagacagacaggccctggtgaagaagcacgcccagaccttcctggccctgtgcgccaccgactacaccttcgccatgtacccctag

SEQ ID NO: 10247 - DNA, 33 bp, synthetic construct
  misc_feature 1..33: note = Description of Artificial Sequence: Synthetic coding sequence
  source 1..33: mol_type = other DNA
atgtacccccccagcatgatcgccaccggctag

SEQ ID NO: 10248 - DNA, 636 bp, synthetic construct; identical to SEQ ID NO: 10241
  misc_feature 1..636: note = Description of Artificial Sequence: Synthetic coding sequence
  source 1..636: mol_type = other DNA

SEQ ID NO: 10249 - DNA, 1233 bp, synthetic construct
  misc_feature 1..1233: note = Description of Artificial Sequence: Synthetic coding sequence
  source 1..1233: mol_type = other DNA
atgcccagagagagaagagagagagacgccaaggagagagacaccatgaaggaggacggcggcgccgagttcagcgccagaagcagaaagagaaaggccaacgtgaccgtgttcctgcaggaccccgacgaggagatggccaagatcgacagaaccgccagagaccagtgcggcagccagccctgggacaacaacgccgtgtgcgccgacccctgcagcctgatccccacccccgacaaggaggacgacgacagagtgtaccccaacagcacctgcaagcccagaatcatcgcccccagcagaggcagccccctgcccgtgctgagctgggccaacagagaggaggtgtggaagatcatgctgaacaaggagaagacctacctgagagaccagcacttcctggagcagcaccccctgctgcagcccaagatgagagccatcctgctggactggctgatggaggtgtgcgaggtgtacaagctgcacagagagaccttctacctggcccaggacttcttcgacagatacatggccacccaggagaacgtggtgaagaccctgctgcagctgatcggcatcagcagcctgttcatcgccgccaagctggaggagatctacccccccaagctgcaccagttcgcctacgtgaccgacggcgcctgcagcggcgacgagatcctgaccatggagctgatgatcatgaaggccctgaagtggagactgagccccctgaccatcgtgagctggctgaacgtgtacatgcaggtggcctacctgaacgacctgcacgaggtgctgctgccccagtacccccagcagatcttcatccagatcgccgagctgctggacctgtgcgtgctggacgtggactgcctggagttcccctacggcatcctggccgccagcgccctgtaccacttcagcagcagcgagctgatgcagaaggtgagcggctaccagtggtgcgacatcgagaactgcgtgaagtggatggtgcccttcgccatggtgatcagagagaccggcagcagcaagctgaagcacttcagaggcgtggccgacgaggacgcccacaacatccagacccacagagacagcctggacctgctggacaaggccagagccaagaaggccatgctgagcgagcagaacagagccagccccctgcccagcggcctgctgacccccccccagagcggcaagaagcagagcagcggccccgagatggcctag

SEQ ID NO: 10250 - DNA, 1104 bp, synthetic construct
  misc_feature 1..1104: note = Description of Artificial Sequence: Synthetic coding sequence
  source 1..1104: mol_type = other DNA
atgcccagagagagaagagagagagacgccaaggagagagacaccatgaaggaggacggcggcgccgagttcagcgccagaagcagaaagagaaaggccaacgtgaccgtgttcctgcaggaccccgacgaggagatggccaagatcgacagaaccgccagagaccagtgcggcagccagccctgggacaacaacgccgtgtgcgccgacccctgcagcctgatccccacccccgacaaggaggacgacgacagagtgtaccccaacagcacctgcaagcccagaatcatcgcccccagcagaggcagccccctgcccgtgctgagctgggccaacagagaggaggtgtggaagatcatgctgaacaaggagaagacctacctgagagaccagcacttcctggagcagcaccccctgctgcagcccaagatgagagccatcctgctggactggctgatggaggtgagcctgagcctgcccgagatctacccccccaagctgcaccagttcgcctacgtgaccgacggcgcctgcagcggcgacgagatcctgaccatggagctgatgatcatgaaggccctgaagtggagactgagccccctgaccatcgtgagctggctgaacgtgtacatgcaggtggcctacctgaacgacctgcacgaggtgctgctgccccagtacccccagcagatcttcatccagatcgccgagctgctggacctgtgcgtgctggacgtggactgcctggagttcccctacggcatcctggccgccagcgccctgtaccacttcagcagcagcgagctgatgcagaaggtgagcggctaccagtggtgcgacatcgagaactgcgtgaagtggatggtgcccttcgccatggtgatcagagagaccggcagcagcaagctgaagcacttcagaggcgtggccgacgaggacgcccacaacatccagacccacagagacagcctggacctgctggacaaggccagagccaagaaggccatgctgagcgagcagaacagagccagccccctgcccagcggcctgctgacccccccccagagcggcaagaagcagagcagcggccccgagatggcctag

SEQ ID NO: 10251 - DNA, 1188 bp, synthetic construct
  misc_feature 1..1188: note = Description of Artificial Sequence: Synthetic coding sequence
  source 1..1188: mol_type = other DNA
atgaaggaggacggcggcgccgagttcagcgccagaagcagaaagagaaaggccaacgtgaccgtgttcctgcaggaccccgacgaggagatggccaagatcgacagaaccgccagagaccagtgcggcagccagccctgggacaacaacgccgtgtgcgccgacccctgcagcctgatccccacccccgacaaggaggacgacgacagagtgtaccccaacagcacctgcaagcccagaatcatcgcccccagcagaggcagccccctgcccgtgctgagctgggccaacagagaggaggtgtggaagatcatgctgaacaaggagaagacctacctgagagaccagcacttcctggagcagcaccccctgctgcagcccaagatgagagccatcctgctggactggctgatggaggtgtgcgaggtgtacaagctgcacagagagaccttctacctggcccaggacttcttcgacagatacatggccacccaggagaacgtggtgaagaccctgctgcagctgatcggcatcagcagcctgttcatcgccgccaagctggaggagatctacccccccaagctgcaccagttcgcctacgtgaccgacggcgcctgcagcggcgacgagatcctgaccatggagctgatgatcatgaaggccctgaagtggagactgagccccctgaccatcgtgagctggctgaacgtgtacatgcaggtggcctacctgaacgacctgcacgaggtgctgctgccccagtacccccagcagatcttcatccagatcgccgagctgctggacctgtgcgtgctggacgtggactgcctggagttcccctacggcatcctggccgccagcgccctgtaccacttcagcagcagcgagctgatgcagaaggtgagcggctaccagtggtgcgacatcgagaactgcgtgaagtggatggtgcccttcgccatggtgatcagagagaccggcagcagcaagctgaagcacttcagaggcgtggccgacgaggacgcccacaacatccagacccacagagacagcctggacctgctggacaaggccagagccaagaaggccatgctgagcgagcagaacagagccagccccctgcccagcggcctgctgacccccccccagagcggcaagaagcagagcagcggccccgagatggcctag

SEQ ID NO: 10252 - DNA, 2106 bp, synthetic construct
  misc_feature 1..2106: note = Description of Artificial Sequence: Synthetic coding sequence
  source 1..2106: mol_type = other DNA
agaaccagctggcccagcgagctggccgccgagaagggcaacttcgaggccgccgtgaagctgggcatcgcctacctgtacaacgagggcctgagcgtgagcgacgaggccagagccgaggtgaacggcctgaaggccagcagattcttcagcctggccgagagactgaacgtgggcgccgcccccttcatctggctgttcatcagacccccctggagcgtgagcggcagctgctgcaaggccgtggtgcacgagagcctgagagccgagtgccagctgcagagaacccacaaggccagcatcctgcactgcctgggcagagtgctgagcctgttcgaggacgaggagaagcagcagcaggcccacgacctgttcgaggaggccgcccaccagggctgcctgaccagcagctacctgctgtgggagagcgacagaagaaccgacgtgagcgaccccggcagatgcctgcacagcttcagaaagctgagagactacgccgccaagggctgctgggaggcccagctgagcctggccaaggcctgcgccaacgccaaccagctgggcctggaggtgagagccagcagcgagatcgtgtgccagctgttccaggccagccaggccgtgagcaagcagcaggtgttcagcgtgcagaagggcctgaacgacaccatgagatacatcctgatcgactggctggtggaggtggccaccatgaaggacttcaccagcctgtgcctgcacctgaccgtggagtgcgtggacagatacctgagaagaagactggtgcccagatacagactgcagctgctgggcatcgcctgcatggtgatctgcaccagattcatcagcaaggagatcctgaccatcagagaggccgtgtggctgaccgacaacacctacaagtacgaggacctggtgagaatgatgggcgagatcgtgagcgccctggagggcaagatcagagtgcccaccgtggtggactacaaggaggtgctgctgaccctggtgcccgtggagctgagaacccagcacctgtgcagcttcctgtgcgagctgagcctgctgcacaccagcctgagcgcctacgcccccgccagactggccgccgccgccctgctgctggccagactgacccacggccagacccagccctggaccacccagctgtgggacctgaccggcttcagctacgaggacctgatcccctgcgtgctgagcctgcacaagaagtgcttccacgacgacgcccccaaggactacagacaggtgagcctgaccgccgtgaagcagagattcgaggacaagagatacggcgagatcagccaggaggaggtgctgagctacagccagctgtgcgccgccctgggcgtgacccaggacagccccgacccccccaccttcctgagcaccggcgagatccacgccttcctgagcagccccagcggcagaagaaccaagagaaagagagagaacagcctgcaggaggacagaggcagcttcgtgaccacccccaccgccgagctgagcagccaggaggagaccctgctgggcagcttcctggactggagcctggactgctgcagcggctacgagggcgaccaggagagcgagggcgagaaggagggcgacgtgaccgcccccagcggcatcctggacgtgaccgtggtgtacctgaaccccgagcagcactgctgccaggagagcagcgacgaggaggcctgccccgaggacaagggcccccaggacccccaggccctggccctggacacccagatccccgccacccccggccccaagcccctggtgagaaccagcagagagcccggcaaggacgtgaccaccagcggctacagcagcgtgagcaccgccagccccaccagcagcgtggacggcggcctgggcgccctgccccagcccaccagcgtgctgagcctggacagcgacagccacacccagccctgccaccaccaggccagaaagagctgcctgcagtgcagaccccccagcccccccgagagcagcgtgccccagcagcaggtgaagagaatcaacctgtgcatccacagcgaggaggaggacatgaacctgggcctggtgagactgtag

SEQ ID NO: 10253 - DNA, 2361 bp, synthetic construct
  misc_feature 1..2361: note = Description of Artificial Sequence: Synthetic coding sequence
  source 1..2361: mol_type = other DNA
atgggcagcggcggcgtggtgcactgcagatgcgccaagtgcttctgctaccccaccaagagaagaatcagaagaagacccagaaacctgaccatcctgagcctgcccgaggacgtgctgttccacatcctgaagtggctgagcgtggaggacatcctggccgtgagagccgtgcacagccagctgaaggacctggtggacaaccacgccagcgtgtgggcctgcgccagcttccaggagctgtggcccagccccggcaacctgaagctgttcgagagagccgccgagaagggcaacttcgaggccgccgtgaagctgggcatcgcctacctgtacaacgagggcctgagcgtgagcgacgaggccagagccgaggtgaacggcctgaaggccagcagattcttcagcctggccgagagactgaacgtgggcgccgcccccttcatctggctgttcatcagacccccctggagcgtgagcggcagctgctgcaaggccgtggtgcacgagagcctgagagccgagtgccagctgcagagaacccacaaggccagcatcctgcactgcctgggcagagtgctgagcctgttcgaggacgaggagaagcagcagcaggcccacgacctgttcgaggaggccgcccaccagggctgcctgaccagcagctacctgctgtgggagagcgacagaagaaccgacgtgagcgaccccggcagatgcctgcacagcttcagaaagctgagagactacgccgccaagggctgctgggaggcccagctgagcctggccaaggcctgcgccaacgccaaccagctgggcctggaggtgagagccagcagcgagatcgtgtgccagctgttccaggccagccaggccgtgagcaagcagcaggtgttcagcgtgcagaagggcctgaacgacaccatgagatacatcctgatcgactggctggtggaggtggccaccatgaaggacttcaccagcctgtgcctgcacctgaccgtggagtgcgtggacagatacctgagaagaagactggtgcccagatacagactgcagctgctgggcatcgcctgcatggtgatctgcaccagattcatcagcaaggagatcctgaccatcagagaggccgtgtggctgaccgacaacacctacaagtacgaggacctggtgagaatgatgggcgagatcgtgagcgccctggagggcaagatcagagtgcccaccgtggtggactacaaggaggtgctgctgaccctggtgcccgtggagctgagaacccagcacctgtgcagcttcctgtgcgagctgagcctgctgcacaccagcctgagcgcctacgcccccgccagactggccgccgccgccctgctgctggccagactgacccacggccagacccagccctggaccacccagctgtgggacctgaccggcttcagctacgaggacctgatcccctgcgtgctgagcctgcacaagaagtgcttccacgacgacgcccccaaggactacagacaggtgagcctgaccgccgtgaagcagagattcgaggacaagagatacggcgagatcagccaggaggaggtgctgagctacagccagctgtgcgccgccctgggcgtgacccaggacagccccgacccccccaccttcctgagcaccggcgagatccacgccttcctgagcagccccagcggcagaagaaccaagagaaagagagagaacagcctgcaggaggacagaggcagcttcgtgaccacccccaccgccgagctgagcagccaggaggagaccctgctgggcagcttcctggactggagcctggactgctgcagcggctacgagggcgaccaggagagcgagggcgagaaggagggcgacgtgaccgcccccagcggcatcctggacgtgaccgtggtgtacctgaaccccgagcagcactgctgccaggagagcagcgacgaggaggcctgccccgaggacaagggcccccaggacccccaggccctggccctggacacccagatccccgccacccccggccccaagcccctggtgagaaccagcagagagcccggcaaggacgtgaccaccagcggctacagcagcgtgagcaccgccagccccaccagcagcgtggacggcggcctgggcgccctgccccagcccaccagcgtgctgagcctggacagcgacagccacacccagccctgccaccaccaggccagaaagagctgcctgcagtgcagaccccccagcccccccgagagcagcgtgccccagcagcaggtgaagagaatcaacctgtgcatccacagcgaggaggaggacatgaacctgggcctggtgagactgtag

SEQ ID NO: 10254 - DNA, 888 bp, synthetic construct
  misc_feature 1..888: note = Description of Artificial Sequence: Synthetic coding sequence
  source 1..888: mol_type = other DNA
atgatcgaggtgctgaccaccaccgacagccagaagctgctgcaccagctgaacgccctgctggagcaggagagcagatgccagcccaaggtgtgcggcctgagactgatcgagagcgcccacgacaacggcctgagaatgaccgccagactgagagacttcgaggtgaaggacctgctgagcctgacccagttcttcggcttcgacaccgagaccttcagcctggccgtgaacctgctggacagattcctgagcaagatgaaggtgcagcccaagcacctgggctgcgtgggcctgagctgcttctacctggccgtgaagagcatcgaggaggagagaaacgtgcccctggccaccgacctgatcagaatcagccagtacagattcaccgtgagcgacctgatgagaatggagaagatcgtgctggagaaggtgtgctggaaggtgaaggccaccaccgccttccagttcctgcagctgtactacagcctgctgcaggagaacctgcccctggagagaagaaacagcatcaacttcgagagactggaggcccagctgaaggcctgccactgcagaatcatcttcagcaaggccaagcccagcgtgctggccctgagcatcatcgccctggagatccaggcccagaagtgcgtggagctgaccgagggcatcgagtgcctgcagaagcacagcaagatcaacggcagagacctgaccttctggcaggagctggtgagcaagtgcctgaccgagtacagcagcaacaagtgcagcaagcccaacgtgcagaagctgaagtggatcgtgagcggcagaaccgccagacagctgaagcacagctactacagaatcacccacctgcccaccatccccgagatggtgccctag

SEQ ID NO: 10255 - DNA, 888 bp, synthetic construct; identical to SEQ ID NO: 10254
  misc_feature 1..888: note = Description of Artificial Sequence: Synthetic coding sequence
  source 1..888: mol_type = other DNA

SEQ ID NO: 10256 - DNA, 411 bp, synthetic construct
  misc_feature 1..411: note = Description of Artificial Sequence: Synthetic coding sequence
  source 1..411: mol_type = other DNA
atgatcgaggtgctgaccaccaccgacagccagaagctgctgcaccagctgaacgccctgctggagcaggagagcagatgccagcccaaggtgtgcggcctgagactgatcgagagcgcccacgacaacggcctgagaatgaccgccagactgagagacttcgaggtgaaggacctgctgagcctgacccagttcttcggcttcgacaccgagaccttcagcctggccgtgaacctgctggacagattcctgagcaagatgaaggtgcagcccaagcacctgggctgcgtgggcctgagctgcttctacctggccgtgaagagcatcgaggaggagagaaacgtgcccctggccaccgacctgatcagaatcagccagtacagattcaccgtgagcgacctgatgagatag

SEQ ID NO: 10257 - DNA, 411 bp, synthetic construct; identical to SEQ ID NO: 10256
  misc_feature 1..411: note = Description of Artificial Sequence: Synthetic coding sequence
  source 1..411: mol_type = other DNA

SEQ ID NO: 10258 - DNA, 504 bp, synthetic construct
  misc_feature 1..504: note = Description of Artificial Sequence: Synthetic coding sequence
  source 1..504: mol_type = other DNA
atgagcgccaaggacctgatgagaatggagaagatcgtgctggagaaggtgtgctggaaggtgaaggccaccaccgccttccagttcctgcagctgtactacagcctgctgcaggagaacctgcccctggagagaagaaacagcatcaacttcgagagactggaggcccagctgaaggcctgccactgcagaatcatcttcagcaaggccaagcccagcgtgctggccctgagcatcatcgccctggagatccaggcccagaagtgcgtggagctgaccgagggcatcgagtgcctgcagaagcacagcaagatcaacggcagagacctgaccttctggcaggagctggtgagcaagtgcctgaccgagtacagcagcaacaagtgcagcaagcccaacgtgcagaagctgaagtggatcgtgagcggcagaaccgccagacagctgaagcacagctactacagaatcacccacctgcccaccatccccgagatggtgccctag

SEQ ID NO: 10259 - DNA, 348 bp, synthetic construct
  misc_feature 1..348: note = Description of Artificial Sequence: Synthetic coding sequence
  source 1..348: mol_type = other DNA
atgatcgaggtgctgaccaccaccgacagccagaagctgctgcaccagctgaacgccctgctggagcaggagagcagatgccagcccaaggtgtgcggcctgagactgatcgagagcgcccacgacaacggcctgagaatgaccgccagactgagagacttcgaggtgaaggacctgctgagcctgacccagttcttcggcttcgacaccgagaccttcagcctggccgtgaacctgctggacagattcctgagcaagatgaaggtgcagcccaagcacctgggctgcgtgggcctgagctgcttctacctggccgtgaagagcatcgaggaggagagaaacgtgtag

SEQ ID NO: 10260 - DNA, 486 bp, synthetic construct
  misc_feature 1..486: note = Description of Artificial Sequence: Synthetic coding sequence
  source 1..486: mol_type = other DNA
atgagaatggagaagatcgtgctggagaaggtgtgctggaaggtgaaggccaccaccgccttccagttcctgcagctgtactacagcctgctgcaggagaacctgcccctggagagaagaaacagcatcaacttcgagagactggaggcccagctgaaggcctgccactgcagaatcatcttcagcaaggccaagcccagcgtgctggccctgagcatcatcgccctggagatccaggcccagaagtgcgtggagctgaccgagggcatcgagtgcctgcagaagcacagcaagatcaacggcagagacctgaccttctggcaggagctggtgagcaagtgcctgaccgagtacagcagcaacaagtgcagcaagcccaacgtgcagaagctgaagtggatcgtgagcggcagaaccgccagacagctgaagcacagctactacagaatcacccacctgcccaccatccccgagatggtgccctag

SEQ ID NO: 10261 - DNA, 486 bp, synthetic construct; identical to SEQ ID NO: 10260
  misc_feature 1..486: note = Description of Artificial Sequence: Synthetic coding sequence
  source 1..486: mol_type = other DNA

SEQ ID NO: 10262 - DNA, 105 bp, synthetic construct
  misc_feature 1..105: note = Description of Artificial Sequence: Synthetic coding sequence
  source 1..105: mol_type = other DNA
atgatcgaggtgctgaccaccaccgacagccagaagctgctgcaccagctgaacgccctgctggagcaggagagcagatgccagcccaagagacacttcctgtag

SEQ ID NO: 10263 - DNA, 1035 bp, synthetic construct
  misc_feature 1..1035: note = Description of Artificial Sequence: Synthetic coding sequence
  source 1..1035: mol_type = other DNA
atgaaggacctgggcgccgagcacctggccggccacgagggcgtgcagctgctgggcctgctgaacgtgtacctggagcaggaggagagattccagcccagagagaagggcctgagcctgatcgaggccacccccgagaacgacaacaccctgtgccccggcctgagaaacgccaaggtggaggacctgagaagcctggccaacttcttcggcagctgcaccgagaccttcgtgctggccgtgaacatcctggacagattcctggccctgatgaaggtgaagcccaagcacctgagctgcatcggcgtgtgcagcttcctgctggccgccagaatcgtggaggaggactgcaacatccccagcacccacgacgtgatcagaatcagccagtgcaagtgcaccgccagcgacatcaagagaatggagaagatcatcagcgagaagctgcactacgagctggaggccaccaccgccctgaacttcctgcacctgtaccacaccatcatcctgtgccacaccagcgagagaaaggagatcctgagcctggacaagctggaggcccagctgaaggcctgcaactgcagactgatcttcagcaaggccaagcccagcgtgctggccctgtgcctgctgaacctggaggtggagaccctgaagagcgtggagctgctggagatcctgctgctggtgaagaagcacagcaagatcaacgacaccgagttcttctactggagagagctggtgagcaagtgcctggccgagtacagcagccccgagtgctgcaagcccgacctgaagaagctggtgtggatcgtgagcagaagaaccgcccagaacctgcacaacagctactacagcgtgcccgagctgcccaccatccccgagggcggctgcttcgacgagagcgagagcgaggacagctgcgaggacatgagctgcggcgaggagagcctgagcagcagcccccccagcgaccaggagtgcaccttcttcttcaacttcaaggtggcccagaccctgtgcttccccagctag

SEQ ID NO: 10264 - DNA, 1035 bp, synthetic construct
  misc_feature 1..1035: note = Description of Artificial Sequence: Synthetic coding sequence
  source 1..1035: mol_type = other DNA
atgaaggacctgggcgccgagcacctggccggccacgagggcgtgcagctgctgggcctgctgaacgtgtacctggagcaggaggagagattccagcccagagagaagggcctgagcctgatcgaggccacccccgagaacgacaacaccctgtgccccggcctgagaaacgccaaggtggaggacctgagaagcctggccaacttcttcggcagctgcaccgagaccttcgtgctggccgtgaacatcctggacagattcctggccctgatgaaggtgaagcccaagcacctgagctgcatcggcgtgtgcagcttcctgctggccgccagaatcgtggaggaggactgcaacatccccagcacccacgacgtgatcagaatcagccagtgcaagtgcaccgccagcgacatcaagagaatggagaagatcatcagcgagaagctgcactacgagctggaggccaccaccgccctgaacttcctgcacctgtaccacaccatcatcctgtgccacaccagcgagagaaaggagatcctgagcctggacaagctggaggcccagctgaaggcctgcaactgcagactgatcttcagcaaggccaagcccagcgtgctggccctgtgcctgctgaacctggaggtggagaccctgaagagcgtggagctgctggagatcctgctgctggtgaagaagcacagcaagatcaacgacaccgagttcttctactggagagagctggtgagcaagtgcctggccgagtacagcagccccgagtgctgcaagcccgacctgaagaagctggtgtggatcgtgagcagaagaaccgcccagaacctgcacaacagctactacagcgtgcccgagctgcccaccatccccgagggcggctgcttcgacgagagcgagagcagcgtggcccaggccggcgtgcagtggcccgacctgagcagcttccagcccccccccaccagattcaagagattcagctgcctgagcctgagaagcagctgggactacagcagctggacctag

SEQ ID NO: 10265 - DNA, 1035 bp, synthetic construct; identical to SEQ ID NO: 10263
  misc_feature 1..1035: note = Description of Artificial Sequence: Synthetic coding sequence
  source 1..1035: mol_type = other DNA

SEQ ID NO: 10266 - DNA, 1035 bp, synthetic construct; identical to SEQ ID NO: 10263
  misc_feature 1..1035: note = Description of Artificial Sequence: Synthetic coding sequence
  source 1..1035: mol_type = other DNA

SEQ ID NO: 10267 - DNA, 483 bp, synthetic construct
  misc_feature 1..483: note = Description of Artificial Sequence: Synthetic coding sequence
  source 1..483: mol_type = other DNA
atgaaggacctgggcgccgagcacctggccggccacgagggcgtgcagctgctgggcctgctgaacgtgtacctggagcaggaggagagattccagcccagagagaagggcctgagcctgatcgaggccacccccgagaacgacaacaccctgtgccccggcctgagaaacgccaaggtggaggacctgagaagcctggccaacttcttcggcagctgcaccgagaccttcgtgctggccgtgaacatcctggacagattcctggccctgatgaaggtgaagcccaagcacctgagctgcatcggcgtgtgcagcttcctgctggccgccagaatcgtggaggaggactgcaacatccccagcacccacgacgtgatcagaatcagccagtgcaagtgcaccgccagcgacatcaagagaatggagaagatcatcagcgagaagctgcactacgagctggaggccaccaccgccctgaactag

SEQ ID NO: 10268 - DNA, 972 bp, synthetic construct
  misc_feature 1..972: note = Description of Artificial Sequence: Synthetic coding sequence
  source 1..972: mol_type = other DNA
atgtaccacaacagcagccagaagagacactggaccttcagcagcgaggagcagctggccagactgagagccgacgccaacagaaagttcagatgcaaggccgtggccaacggcaaggtgctgcccaacgaccccgtgttcctggagccccacgaggagatgaccctgtgcaagtactacgagaagagactgctggagttctgcagcgtgttcaagcccgccatgcccagaagcgtggtgggcaccgcctgcatgtacttcaagagattctacctgaacaacagcgtgatggagtaccaccccagaatcatcatgctgacctgcgccttcctggcctgcaaggtggacgagttcaacgtgagcagcccccagttcgtgggcaacctgagagagagccccctgggccaggagaaggccctggagcagatcctggagtacgagctgctgctgatccagcagctgaacttccacctgatcgtgcacaacccctacagacccttcgagggcttcctgatcgacctgaagaccagataccccatcctggagaaccccgagatcctgagaaagaccgccgacgacttcctgaacagaatcgccctgaccgacgcctacctgctgtacacccccagccagatcgccctgaccgccatcctgagcagcgccagcagagccggcatcaccatggagagctacctgagcgagagcctgatgctgaaggagaacagaacctgcctgagccagctgctggacatcatgaagagcatgagaaacctggtgaagaagtacgagccccccagaagcgaggaggtggccgtgctgaagcagaagctggagagatgccacagcgccgagctggccctgaacgtgatcaccaagaagagaaagggctacgaggacgacgactacgtgagcaagaagagcaagcacgaggaggaggagtggaccgacgacgacctggtggagagcctgtag

SEQ ID NO: 10269 - DNA, 768 bp, synthetic construct
  misc_feature 1..768: note = Description of Artificial Sequence: Synthetic coding sequence
  source 1..768: mol_type = other DNA
atgcccagaagcgtggtgggcaccgcctgcatgtacttcaagagattctacctgaacaacagcgtgatggagtaccaccccagaatcatcatgctgacctgcgccttcctggcctgcaaggtggacgagttcaacgtgagcagcccccagttcgtgggcaacctgagagagagccccctgggccaggagaaggccctggagcagatcctggagtacgagctgctgctgatccagcagctgaacttccacctgatcgtgcacaacccctacagacccttcgagggcttcctgatcgacctgaagaccagataccccatcctggagaaccccgagatcctgagaaagaccgccgacgacttcctgaacagaatcgccctgaccgacgcctacctgctgtacacccccagccagatcgccctgaccgccatcctgagcagcgccagcagagccggcatcaccatggagagctacctgagcgagagcctgatgctgaaggagaacagaacctgcctgagccagctgctggacatcatgaagagcatgagaaacctggtgaagaagtacgagccccccagaagcgaggaggtggccgtgctgaagcagaagctggagagatgccacagcgccgagctggccctgaacgtgatcaccaagaagagaaagggctacgaggacgacgactacgtgagcaagaagagcaagcacgaggaggtgtgcttcacccccaagatgaacagcaagctgttcctgctgtacatcctggtgtag

SEQ ID NO: 10270 - DNA, 750 bp, synthetic construct
  misc_feature 1..750: note = Description of Artificial Sequence: Synthetic coding sequence
  source 1..750: mol_type = other DNA
atgcccagaagcgtggtgggcaccgcctgcatgtacttcaagagattctacctgaacaacagcgtgatggagtaccaccccagaatcatcatgctgacctgcgccttcctggcctgcaaggtggacgagttcaacgtgagcagcccccagttcgtgggcaacctgagagagagccccctgggccaggagaaggccctggagcagatcctggagtacgagctgctgctgatccagcagctgaacttccacctgatcgtgcacaacccctacagacccttcgagggcttcctgatcgacctgaagaccagataccccatcctggagaaccccgagatcctgagaaagaccgccgacgacttcctgaacagaatcgccctgaccgacgcctacctgctgtacacccccagccagatcgccctgaccgccatcctgagcagcgccagcagagccggcatcaccatggagagctacctgagcgagagcctgatgctgaaggagaacagaacctgcctgagccagctgctggacatcatgaagagcatgagaaacctggtgaagaagtacgagccccccagaagcgaggaggtggccgtgctgaagcagaagctggagagatgccacagcgccgagctggccctgaacgtgatcaccaagaagagaaagggctacgaggacgacgactacgtgagcaagaagagcaagcacgaggaggaggagtggaccgacgacgacctggtggagagcctgtag

SEQ ID NO: 10271 - DNA, 1053 bp, synthetic construct
  misc_feature 1..1053: note = Description of Artificial Sequence: Synthetic coding sequence
  source 1..1053: mol_type = other DNA
atggtgaccccctgccccaccagccccagcagccccgccgccagagccggcagaagagacaacgaccagaacctgagagcccccgtgaagaagagcagaagacccagactgagaagaaagcagcccctgcaccccctgaacccctgccccctgcccggcgacagcggcatctgcgacctgttcgagagccccagcagcggcagcgacggcgccgagagccccagcgccgccagaggcggcagccccctgcccggccccgcccagcccgtggcccagctggacctgcagaccttcagagactacggccagagctgctacgccttcagaaaggcccaggagagccacttccaccccagagaggccctggccagacagccccaggtgaccgccgagagcagatgcaagctgctgagctggctgatccccgtgcacagacagttcggcctgagcttcgagagcctgtgcctgaccgtgaacaccctggacagattcctgaccaccacccccgtggccgccgactgcttccagctgctgggcgtgaccagcctgctgatcgcctgcaagcaggtggaggtgcacccccccagagtgaagcagctgctggccctgtgctgcggcgccttcagcagacagcagctgtgcaacctggagtgcatcgtgctgcacaagctgcacttcaccctgggcgcccccaccatcagcttcttcctggagcacttcacccacgccagagtggaggccggccaggccgaggccagcgaggccctggaggcccaggccctggccagaggcgtggccgagctgagcctggccgactacgccttcaccagctacagccccagcctgctggccatctgctgcctggccctggccgacagaatgctgagagtgagcagacccgtggacctgagactgggcgaccaccccgaggccgccctggaggactgcatgggcaagctgcagctgctggtggccatcaacagcaccagcctgacccacatgctgcccgtgcagatctgcgagaagtgcagcctgccccccagcagcaagtag

SEQ ID NO: 10272 - DNA, 2181 bp, synthetic construct
  misc_feature 1..2181: note = Description of Artificial Sequence: Synthetic coding sequence
  source 1..2181: mol_type = other DNA
atggagggcgagagaaagaacaacaacaagagatggtacttcaccagagagcagctggagaacagccccagcagaagattcggcgtggaccccgacaaggagctgagctacagacagcaggccgccaacctgctgcaggacatgggccagagactgaacgtgagccagctgaccatcaacaccgccatcgtgtacatgcacagattctacatgatccagagcttcacccagttccccggcaacagcgtggcccccgccgccctgttcctggccgccaaggtggaggagcagcccaagaagctggagcacgtgatcaaggtggcccacacctgcctgcacccccaggagagcctgcccgacaccagaagcgaggcctacctgcagcaggtgcaggacctggtgatcctggagagcatcatcctgcagaccctgggcttcgagctgaccatcgaccacccccacacccacgtggtgaagtgcacccagctggtgagagccagcaaggacctggcccagaccagctacttcatggccaccaacagcctgcacctgaccaccttcagcctgcagtacaccccccccgtggtggcctgcgtgtgcatccacctggcctgcaagtggagcaactgggagatccccgtgagcaccgacggcaagcactggtgggagtacgtggacgccaccgtgaccctggagctgctggacgagctgacccacgagttcctgcagatcctggagaagacccccaacagactgaagagaatctggaactggagagcctgcgaggccgccaagaagaccaaggccgacgacagaggcaccgacgagaagaccagcgagcagaccatcctgaacatgatcagccagagcagcagcgacaccaccatcgccggcctgatgagcatgagcaccagcaccaccagcgccgtgcccagcctgcccgtgagcgaggagagcagcagcaacctgaccagcgtggagatgctgcccggcaagagatggctgagcagccagcccagcttcaagctggagcccacccagggccacagaaccagcgagaacctggccctgaccggcgtggaccacagcctgccccaggacggcagcaacgccttcatcagccagaagcagaacagcaagagcgtgcccagcgccaaggtgagcctgaaggagtacagagccaagcacgccgaggagctggccgcccagaagagacagctggagaacatggaggccaacgtgaagagccagtacgcctacgccgcccagaacctgctgagccaccacgacagccacagcagcgtgatcctgaagatgcccatcgagggcagcgagaaccccgagagacccttcctggagaaggccgacaagaccgccctgaagatgagaatccccgtggccggcggcgacaaggccgccagcagcaagcccgaggagatcaagatgagaatcaaggtgcacgccgccgccgacaagcacaacagcgtggaggacagcgtgaccaagagcagagagcacaaggagaagcacaagacccaccccagcaaccaccaccaccaccacaaccaccacagccacaagcacagccacagccagctgcccgtgggcaccggcaacaagagacccggcgaccccaagcacagcagccagaccagcaacctggcccacaagacctacagcctgagcagcagcttcagcagcagcagcagcaccagaaagagaggccccagcgaggagaccggcggcgccgtgttcgaccaccccgccaagatcgccaagagcaccaagagcagcagcctgaacttcagcttccccagcctgcccaccatgggccagatgcccggccacagcagcgacaccagcggcctgagcttcagccagcccagctgcaagaccagagtgccccacagcaagctggacaagggccccaccggcgccaacggccacaacaccacccagaccatcgactaccaggacaccgtgaacatgctgcacagcctgctgagcgcccagggcgtgcagcccacccagcccaccgccttcgagttcgtgagaccctacagcgactacctgaaccccagaagcggcggcatcagcagcagaagcggcaacaccgacaagcccagacccccccccctgcccagcgagccccccccccccctgccccccctgcccaagtag

SEQ ID NO: 10273 - DNA, 723 bp, synthetic construct
  misc_feature 1..723: note = Description of Artificial Sequence: Synthetic coding sequence
  source 1..723: mol_type = other DNA
atggaggactacaccaagatcgagaagatcggcgagggcacctacggcgtggtgtacaagggcagacacaagaccaccggccaggtggtggccatgaagaagatcagactggagagcgaggaggagggcgtgcccagcaccgccatcagagagatcagcctgctgaaggagctgagacaccccaacatcgtgagcctgcaggacgtgctgatgcaggacagcagactgtacctgatcttcgagttcctgagcatggacctgaagaagtacctggacagcatcccccccggccagtacatggacagcagcctggtgaaggtggtgaccctgtggtacagaagccccgaggtgctgctgggcagcgccagatacagcacccccgtggacatctggagcatcggcaccatcttcgccgagctggccaccaagaagcccctgttccacggcgacagcgagatcgaccagctgttcagaatcttcagagccctgggcacccccaacaacgaggtgtggcccgaggtggagagcctgcaggactacaagaacaccttccccaagtggaagcccggcagcctggccagccacgtgaagaacctggacgagaacggcctggacctgctgagcaagatgctgatctacgaccccgccaagagaatcagcggcaagatggccctgaaccacccctacttcaacgacctggacaaccagatcaagaagatgtag

SEQ ID NO: 10274 - DNA, 723 bp, synthetic construct; identical to SEQ ID NO: 10273
  misc_feature 1..723: note = Description of Artificial Sequence: Synthetic coding sequence
  source 1..723: mol_type = other DNA

SEQ ID NO: 10275 - DNA, 894 bp, synthetic construct
  misc_feature 1..894: note = Description of Artificial Sequence: Synthetic coding sequence
  source 1..894: mol_type = other DNA
atggaggactacaccaagatcgagaagatcggcgagggcacctacggcgtggtgtacaagggcagacacaagaccaccggccaggtggtggccatgaagaagatcagactggagagcgaggaggagggcgtgcccagcaccgccatcagagagatcagcctgctgaaggagctgagacaccccaacatcgtgagcctgcaggacgtgctgatgcaggacagcagactgtacctgatcttcgagttcctgagcatggacctgaagaagtacctggacagcatcccccccggccagtacatggacagcagcctggtgaagagctacctgtaccagatcctgcagggcatcgtgttctgccacagcagaagagtgctgcacagagacctgaagccccagaacctgctgatcgacgacaagggcaccatcaagctggccgacttcggcctggccagagccttcggcatccccatcagagtgtacacccacgaggtggtgaccctgtggtacagaagccccgaggtgctgctgggcagcgccagatacagcacccccgtggacatctggagcatcggcaccatcttcgccgagctggccaccaagaagcccctgttccacggcgacagcgagatcgaccagctgttcagaatcttcagagccctgggcacccccaacaacgaggtgtggcccgaggtggagagcctgcaggactacaagaacaccttccccaagtggaagcccggcagcctggccagccacgtgaagaacctggacgagaacggcctggacctgctgagcaagatgctgatctacgaccccgccaagagaatcagcggcaagatggccctgaaccacccctacttcaacgacctggacaaccagatcaagaagatgtag

SEQ ID NO: 10276 - DNA, 894 bp, synthetic construct
  misc_feature 1..894: note = Description of Artificial Sequence: Synthetic coding sequence
  source 1..894: mol_type = other DNA
atggaggactacaccaagatcgagaagatcggcgagggcacctacggcgtggtgtacaagggcagacacaagaccaccggccaggtggtggccatgaagaagatcagactggagagcgaggaggagggcgtgcccagcaccgccatcagagagatcagcctgctgaaggagctgagacaccccaacatcgtgagcctgcaggacgtgctgatgcaggacagcagactgtacctgatcttcgagttcctgagcatggacctgaagaagtacctggacagcatcccccccggccagtacatggacagcagcctggtgaagagctacctgtaccagatcctgcagggcatcgtgttctgccacagcagaagagtgctgcacagagacctgaagccccagaacctgctgatcgacgacaagggcaccatcaagctggccgacttcggcctggccagagccttcggcatccccatcagagtgtacacccacgaggccatcaccctgtggtacagaagccccgaggtgctgctgggcagcgccagatacagcacccccgtggacatctggagcatcggcaccatcttcgccgagctggccaccaagaagcccctgttccacggcgacagcgagatcgaccagctgttcagaatcttcagagccctgggcacccccaacaacgaggtgtggcccgaggtggagagcctgcaggactacaagaacaccttccccaagtggaagcccggcagcctggccagccacgtgaagaacctggacgagaacggcctggacctgctgagcaagatgctgatctacgaccccgccaagagaatcagcggcaagatggccctgaaccacccctacttcaacgacctggacaaccagatcaagaagatgtag

SEQ ID NO: 10277 - DNA, 570 bp, synthetic construct
  misc_feature 1..570: note = Description of Artificial Sequence: Synthetic coding sequence
  source 1..570: mol_type = other DNA
atggaggactacaccaagatcgagaagatcggcgagggcacctacggcgtggtgtacaagggcagacacaagaccaccggccaggtggtggccatgaagaagatcagactggagagcgaggaggagggcgtgcccagcaccgccatcagagagatcagcctgctgaaggagctgagacaccccaacatcgtgagcctgcaggacgtgctgatgcaggacagcagactgtacctgatcttcgagttcctgagcatggacctgaagaagtacctggacagcatcccccccggccagtacatggacagcagcctggtgaagagctacctgtaccagatcctgcagggcatcgtgttctgccacagcagaagagtgctgcacagagacctgaagccccagaacctgctgatcgacgacaagggcaccatcaagctggccgacttcggcctggccagagccttcggcatccccatcagagtgtacacccacgaggccatcaccctgtggtacagaagccccgaggtgctgctgggcagcgccagatacagcacccccgtggacatctggagctag

SEQ ID NO: 10278 - DNA, 897 bp, synthetic construct
  misc_feature 1..897: note = Description of Artificial Sequence: Synthetic coding sequence
  source 1..897: mol_type = other DNA
atggagaacttccagaaggtggagaagatcggcgagggcacctacggcgtggtgtacaaggccagaaacaagctgaccggcgaggtggtggccctgaagaagatcagactggacaccgagaccgagggcgtgcccagcaccgccatcagagagatcagcctgctgaaggagctgaaccaccccaacatcgtgaagctgctggacgtgatccacaccgagaacaagctgtacctggtgttcgagttcctgcaccaggacctgaagaagttcatggacgccagcgccctgaccggcatccccctgcccctgatcaagagctacctgttccagctgctgcagggcctggccttctgccacagccacagagtgctgcacagagacctgaagccccagaacctgctgatcaacaccgagggcgccatcaagctggccgacttcggcctggccagagccttcggcgtgcccgtgagaacctacacccacgaggtggtgaccctgtggtacagagcccccgagatcctgctgggctgcaagtactacagcaccgccgtggacatctggagcctgggctgcatcttcgccgagatggtgaccagaagagccctgttccccggcgacagcgagatcgaccagctgttcagaatcttcagaaccctgggcacccccgacgaggtggtgtggcccggcgtgaccagcatgcccgactacaagcccagcttccccaagtgggccagacaggacttcagcaaggtggtgccccccctggacgaggacggcagaagcctgctgagccagatgctgcactacgaccccaacaagagaatcagcgccaaggccgccctggcccaccccttcttccaggacgtgaccaagcccgtgccccacctgagactgtag

SEQ ID NO: 10279 - DNA, 795 bp, synthetic construct
  misc_feature 1..795: note = Description of Artificial Sequence: Synthetic coding sequence
  source 1..795: mol_type = other DNA
atggagaacttccagaaggtggagaagatcggcgagggcacctacggcgtggtgtacaaggccagaaacaagctgaccggcgaggtggtggccctgaagaagatcagactggacaccgagaccgagggcgtgcccagcaccgccatcagagagatcagcctgctgaaggagctgaaccaccccaacatcgtgaagctgctggacgtgatccacaccgagaacaagctgtacctggtgttcgagttcctgcaccaggacctgaagaagttcatggacgccagcgccctgaccggcatccccctgcccctgatcaagagctacctgttccagctgctgcagggcctggccttctgccacagccacagagtgctgcacagagacctgaagccccagaacctgctgatcaacaccgagggcgccatcaagctggccgacttcggcctggccagagccttcggcgtgcccgtgagaacctacacccacgaggtgaccagaagagccctgttccccggcgacagcgagatcgaccagctgttcagaatcttcagaaccctgggcacccccgacgaggtggtgtggcccggcgtgaccagcatgcccgactacaagcccagcttccccaagtgggccagacaggacttcagcaaggtggtgccccccctggacgaggacggcagaagcctgctgagccagatgctgcactacgaccccaacaagagaatcagcgccaaggccgccctggcccaccccttcttccaggacgtgaccaagcccgtgccccacctgagactgtag

SEQ ID NO: 10280 - DNA, 348 bp, synthetic construct
  misc_feature 1..348: note = Description of Artificial Sequence: Synthetic coding sequence
  source 1..348: mol_type = other DNA
atgagctacaagcccaacctggccgcccacatgcccgccgccgccctgaacgccgccggcagcgtgcacagccccagcaccagcatggccaccagcagccagtacagacagctgctgagcgactacggcccccccagcctgggctacacccagggcaccggcaacagccaggtgccccagagcaagtacgccgagctgctggccatcatcgaggagctgggcaaggagatcagacccacctacgccggcagcaagagcgccatggagagactgaagagaggcatcatccacgccagaggcctggtgagagagtgcctggccgagaccgagagaaacgccagaagctag

SEQ ID NO: 10281 - DNA, 912 bp, synthetic construct
  misc_feature 1..912: note = Description of Artificial Sequence: Synthetic coding sequence
  source 1..912: mol_type = other DNA
atggccaccagcagatacgagcccgtggccgagatcggcgtgggcgcctacggcaccgtgtacaaggccagagacccccacagcggccacttcgtggccctgaagagcgtgagagtgcccaacggcggcggcggcggcggcggcctgcccatcagcaccgtgagagaggtggccctgctgagaagactggaggccttcgagcaccccaacgtggtgagactgatggacgtgtgcgccaccagcagaaccgacagagagatcaaggtgaccctggtgttcgagcacgtggaccaggacctgagaacctacctggacaaggcccccccccccggcctgcccgccgagaccatcaaggacctgatgagacagttcctgagaggcctggacttcctgcacgccaactgcatcgtgcacagagacctgaagcccgagaacatcctggtgaccagcggcggcaccgtgaagctggccgacttcggcctggccagaatctacagctaccagatggccctgacccccgtggtggtgaccctgtggtacagagcccccgaggtgctgctgcagagcacctacgccacccccgtggacatgtggagcgtgggctgcatcttcgccgagatgttcagaagaaagcccctgttctgcggcaacagcgaggccgaccagctgggcaagatcttcgacctgatcggcctgccccccgaggacgactggcccagagacgtgagcctgcccagaggcgccttcccccccagaggccccagacccgtgcagagcgtggtgcccgagatggaggagagcggcgcccagctgctgctggagatgctgaccttcaacccccacaagagaatcagcgccttcagagccctgcagcacagctacctgcacaaggacgagggcaaccccgagtag

SEQ ID NO: 10282 - DNA, 336 bp, synthetic construct
  misc_feature 1..336: note = Description of Artificial Sequence: Synthetic coding sequence
  source 1..336: mol_type = other DNA
atggccaccagcagatacgagcccgtggccgagatcggcgtgggcgcctacggcaccgtgtacaaggccagagacccccacagcggccacttcgtggccctgaagagcgtgagagtgcccaacggcggcggcggcggcggcggcctgcccatcagcaccgtgagagaggtggccctgctgagaagactggaggccttcgagcaccccaacgtggtgagactgatggacgtgtgcgccaccagcagaaccgacagagagatcaagagatgcttcgtggagagcctgagcagcgtggagaccctgaagcccaccagctgggccaagagcctgacctag

SEQ ID NO: 10283 - DNA, 552 bp, synthetic construct
  misc_feature 1..552: note = Description of Artificial Sequence: Synthetic coding sequence
  source 1..552: mol_type = other DNA
atgagacagttcctgagaggcctggacttcctgcacgccaactgcatcgtgcacagagacctgaagcccgagaacatcctggtgaccagcggcggcaccgtgaagctggccgacttcggcctggccagaatctacagctaccagatggccctgacccccgtggtggtgaccctgtggtacagagcccccgaggtgctgctgcagagcacctacgccacccccgtggacatgtggagcgtgggctgcatcttcgccgagatgttcagaagaaagcccctgttctgcggcaacagcgaggccgaccagctgggcaagatcttcgacctgatcggcctgccccccgaggacgactggcccagagacgtgagcctgcccagaggcgccttcccccccagaggccccagacccgtgcagagcgtggtgcccgagatggaggagagcggcgcccagctgctgctggagatgctgaccttcaacccccacaagagaatcagcgccttcagagccctgcagcacagctacctgcacaaggacgagggcaaccccgagtag

SEQ ID NO: 10284 - skipped

SEQ ID NO: 10285 - DNA, 612 bp, synthetic construct
  misc_feature 1..612: note = Description of Artificial Sequence: Synthetic coding sequence
  source 1..612: mol_type = other DNA
atggccaccagcagatacgagcccgtggccgagatcggcgtgggcgcctacggcaccgtgtacaaggccagagacccccacagcggccacttcgtggccctgaagagcgtgagagtgcccaacggcggcggcggcggcggcggcctgcccatcagcaccgtgagagaggtggccctgctgagaagactggaggccttcgagcaccccaacgtggtgagactgatggacgtgtgcgccaccagcagaaccgacagagagatcaaggtgaccctggtgttcgagcacgtggaccaggacctgagaacctacctggacaaggcccccccccccggcctgcccgccgagaccatcaaggacctgatgagacagttcctgagaggcctggacttcctgcacgccaactgcatcgtgcacagagacctgaagcccgagaacatcctggtgaccagcggcggcaccgtgaagctggccgacttcggcctggccagaatctacagctaccagatggccctgacccccgtggtggtgaccctgtggtacagagcccccgaggtgctgctgcagagcacctacgccacccccgtggacatgtggagcgtgggctgcatctag

SEQ ID NO: 10286 - DNA, 513 bp, synthetic construct
  misc_feature 1..513: note = Description of Artificial Sequence: Synthetic coding sequence
  source 1..513: mol_type = other DNA
atggccaccagcagatacgagcccgtggccgagatcggcgtgggcgcctacggcaccgtgtacaaggccagagacccccacagcggccacttcgtggccctgaagagcgtgagagtgcccaacggcggcggcggcggcggcggcctgcccatcagcaccgtgagagaggtggccctgctgagaagactggaggccttcgagcaccccaacgtggtgagactgatggacgtgtgcgccaccagcagaaccgacagagagatcaaggtgaccctggtgttcgagcacgtggaccaggacctgagaacctacctggacaaggcccccccccccggcctgcccgccgagaccatcaaggacctgatgagacagttcctgagaggcctggacttcctgcacgccaactgcatcgtgcacagagacctgaagcccgagaacatcctggtgaccagcggcggcaccgtgaagctggccgacttcggcctggccagaatctacagctaccagatggcctag

SEQ ID NO: 10287 - DNA, 348 bp, synthetic construct
  misc_feature 1..348: note = Description of Artificial Sequence: Synthetic coding sequence
  source 1..348: mol_type = other DNA
atggccaccagcagatacgagcccgtggccgagatcggcgtgggcgcctacggcaccgtgtacaaggccagagacccccacagcggccacttcgtggccctgaagagcgtgagagtgcccaacggcggcggcggcggcggcggcctgcccatcagcaccgtgagagaggtggccctgctgagaagactggaggccttcgagcaccccaacgtggtgagactgatggacgtgtgcgccaccagcagaaccgacagagagatcaaggtgaccctggtgttcgagcacgtggaccaggacctgagaacctacctggacaaggcccccccccccggcctgcccgccgagtag

SEQ ID NO: 10288 - DNA, 924 bp, synthetic construct
  misc_feature 1..924: note = Description of Artificial Sequence: Synthetic coding sequence
  source 1..924: mol_type = other DNA
atgggcaccgtgctgagcctgagccccagctacagaaaggccaccctgttcgaggacggcgccgccaccgtgggccactacaccgccgtgcagaacagcaagaacgccaaggacaagaacctgaagagacacagcatcatcagcgtgctgccctggaagagaatcgtggccgtgagcgccaagaagaagaacagcaagaaggtgcagcccaacagcagctaccagaacaacatcacccacctgaacaacgagaacctgaagaagagcctgagctgcgccaacctgagcaccttcgcccagcccccccccgcccagccccccgccccccccgccagccagctgagcggcagccagaccggcggcagcagcagcgtgaagaaggccccccaccccgccgtgaccagcgccggcacccccaagagagtgatcgtgcaggccagcaccagcgagctgctgagatgcctgggcgagttcctgtgcagaagatgctacagactgaagcacctgagccccaccgaccccgtgctgtggctgagaagcgtggacagaagcctgctgctgcagggctggcaggaccagggcttcatcacccccgccaacgtggtgttcctgtacatgctgtgcagagacgtgatcagcagcgaggtgggcagcgaccacgagctgcaggccgtgctgctgacctgcctgtacctgagctacagctacatgggcaacgagatcagctaccccctgaagcccttcctggtggagagctgcaaggaggccttctgggacagatgcctgagcgtgatcaacctgatgagcagcaagatgctgcagatcaacgccgacccccactacttcacccaggtgttcagcgacctgaagaacgagagcggccaggaggacaagaagagactgctgctgggcctggacagatag

SEQ ID NO: 10289 - DNA, 981 bp, synthetic construct
  misc_feature 1..981: note = Description of Artificial Sequence: Synthetic coding sequence
  source 1..981: mol_type = other DNA
atggagaaggacggcctgtgcagagccgaccagcagtacgagtgcgtggccgagatcggcgagggcgcctacggcaaggtgttcaaggccagagacctgaagaacggcggcagattcgtggccctgaagagagtgagagtgcagaccggcgaggagggcatgcccctgagcaccatcagagaggtggccgtgctgagacacctggagaccttcgagcaccccaacgtggtgagactgttcgacgtgtgcaccgtgagcagaaccgacagagagaccaagctgaccctggtgttcgagcacgtggaccaggacctgaccacctacctggacaaggtgcccgagcccggcgtgcccaccgagaccatcaaggacatgatgttccagctgctgagaggcctggacttcctgcacagccacagagtggtgcacagagacctgaagccccagaacatcctggtgaccagcagcggccagatcaagctggccgacttcggcctggccagaatctacagcttccagatggccctgaccagcgtggtggtgaccctgtggtacagagcccccgaggtgctgctgcagagcagctacgccacccccgtggacctgtggagcgtgggctgcatcttcgccgagatgttcagaagaaagcccctgttcagaggcagcagcgacgtggaccagctgggcaagatcctggacgtgatcggcctgcccggcgaggaggactggcccagagacgtggccctgcccagacaggccttccacagcaagagcgcccagcccatcgagaagttcgtgaccgacatcgacgagctgggcaaggacctgctgctgaagtgcctgaccttcaaccccgccaagagaatcagcgcctacagcgccctgagccacccctacttccaggacctggagagatgcaaggagaacctggacagccacctgccccccagccagaacaccagcgagctgaacaccgcctag

SEQ ID NO: 10290 - DNA, 981 bp, synthetic construct; identical to SEQ ID NO: 10289
  misc_feature 1..981: note = Description of Artificial Sequence: Synthetic coding sequence
  source 1..981: mol_type = other DNA

SEQ ID NO: 10291 - DNA, 1041 bp, synthetic construct
  misc_feature 1..1041: note = Description of Artificial Sequence: Synthetic coding sequence
  source 1..1041: mol_type = other DNA
atggccctggacgtgaagagcagagccaagagatacgagaagctggacttcctgggcgagggccagttcgccaccgtgtacaaggccagagacaagaacaccaaccagatcgtggccatcaagaagatcaagctgggccacagaagcgaggccaaggacggcatcaacagaaccgccctgagagagatcaagctgctgcaggagctgagccaccccaacatcatcggcctgctggacgccttcggccacaagagcaacatcagcctggtgttcgacttcatggagaccgacctggaggtgatcatcaaggacaacagcctggtgctgacccccagccacatcaaggcctacatgctgatgaccctgcagggcctggagtacctgcaccagcactggatcctgcacagagacctgaagcccaacaacctgctgctggacgagaacggcgtgctgaagctggccgacttcggcctggccaagagcttcggcagccccaacagagcctacacccaccaggtggtgaccagatggtacagagcccccgagctgctgttcggcgccagaatgtacggcgtgggcgtggacatgtgggccgtgggctgcatcctggccgagctgctgctgagagtgcccttcctgcccggcgacagcgacctggaccagctgaccagaatcttcgagaccctgggcacccccaccgaggagcagtggcccgacatgtgcagcctgcccgactacgtgaccttcaagagcttccccggcatccccctgcaccacatcttcagcgccgccggcgacgacctgctggacctgatccagggcctgttcctgttcaacccctgcgccagaatcaccgccacccaggccctgaagatgaagtacttcagcaacagacccggccccacccccggctgccagctgcccagacccaactgccccgtggagaccctgaaggagcagagcaaccccgccctggccatcaagagaaagagaaccgaggccctggagcagggcggcctgcccaagaagctgatcttctag

SEQ ID NO: 10292 - DNA, 1395 bp, synthetic construct
  misc_feature 1..1395: note = Description of Artificial Sequence: Synthetic coding sequence
  source 1..1395: mol_type = other DNA
atggactacgacttcaaggtgaagctgagcagcgagagagagagagtggaggacctgttcgagtacgagggctgcaaggtgggcagaggcacctacggccacgtgtacaaggccaagagaaaggacggcaaggacgacaaggactacgccctgaagcagatcgagggcaccggcatcagcatgagcgcctgcagagagatcgccctgctgagagagctgaagcaccccaacgtgatcagcctgcagaaggtgttcctgagccacgccgacagaaaggtgtggctgctgttcgactacgccgagcacgacctgtggcacatcatcaagttccacagagccagcaaggccaacaagaagcccgtgcagctgcccagaggcatggtgaagagcctgctgtaccagatcctggacggcatccactacctgcacgccaactgggtgctgcacagagacctgaagcccgccaacatcctggtgatgggcgagggccccgagagaggcagagtgaagatcgccgacatgggcttcgccagactgttcaacagccccctgaagcccctggccgacctggaccccgtggtggtgaccttctggtacagagcccccgagctgctgctgggcgccagacactacaccaaggccatcgacatctgggccatcggctgcatcttcgccgagctgctgaccagcgagcccatcttccactgcagacaggaggacatcaagaccagcaacccctaccaccacgaccagctggacagaatcttcaacgtgatgggcttccccgccgacaaggactgggaggacatcaagaagatgcccgagcacagcaccctgatgaaggacttcagaagaaacacctacaccaactgcagcctgatcaagtacatggagaagcacaaggtgaagcccgacagcaaggccttccacctgctgcagaagctgctgaccatggaccccatcaagagaatcaccagcgagcaggccatgcaggacccctacttcctggaggaccccctgcccaccagcgacgtgttcgccggctgccagatcccctaccccaagagagagttcctgaccgaggaggagcccgacgacaagggcgacaagaagaaccagcagcagcagcagggcaacaaccacaccaacggcaccggccaccccggcaaccaggacagcagccacacccagggcccccccctgaagaaggtgagagtggtgccccccaccaccaccagcggcggcctgatcatgaccagcgactaccagagaagcaacccccacgccgcctaccccaaccccggccccagcaccagccagccccagagcagcatgggctacagcgccaccagccagcagcccccccagtacagccaccagacccacagatactag

SEQ ID NO: 10293 - DNA, 495 bp, synthetic construct
  misc_feature 1..495: note = Description of Artificial Sequence: Synthetic coding sequence
  source 1..495: mol_type = other DNA
atggactacgacttcaaggtgaagctgagcagcgagagagagagagtggaggacctgttcgagtacgagggctgcaaggtgggcagaggcacctacggccacgtgtacaaggccaagagaaaggacggcaaggacgacaaggactacgccctgaagcagatcgagggcaccggcatcagcatgagcgcctgcagagagatcgccctgctgagagagctgaagcaccccaacgtgatcagcctgcagaaggtgttcctgagccacgccgacagaaaggtgtggctgctgttcgactacgccgagcacgacctgtggcacatcatcaagttccacagagccagcaaggccaacaagaagcccgtgcagctgcccagaggcatggtgaagagcctgctgtaccagatcctggacggcatccactacctgcacgccaactgggtgctgcacagagacctgctgacctgggccctgcccgactacctgatccacctgtag

SEQ ID NO: 10294 - DNA, 1119 bp, synthetic construct
  misc_feature 1..1119: note = Description of Artificial Sequence: Synthetic coding sequence
  source 1..1119: mol_type = other DNA
atggccaagcagtacgacagcgtggagtgccccttctgcgacgaggtgagcaagtacgagaagctggccaagatcggccagggcaccttcggcgaggtgttcaaggccagacacagaaagaccggccagaaggtggccctgaagaaggtgctgatggagaacgagaaggagggcttccccatcaccgccctgagagagatcaagatcctgcagctgctgaagcacgagaacgtggtgaacctgatcgagatctgcagaaccaaggccagcccctacaacagatgcaagggcagcatctacctggtgttcgacttctgcgagcacgacctggccggcctgctgagcaacgtgctggtgaagttcaccctgagcgagatcaagagagtgatgcagatgctgctgaacggcctgtactacatccacagaaacaagatcctgcacagagacatgaaggccgccaacgtgctgatcaccagagacggcgtgctgaagctggccgacttcggcctggccagagccttcagcctggccaagaacagccagcccaacagatacaccaacagagtggtgaccctgtggtacagaccccccgagctgctgctgggcgagagagactacggcccccccatcgacctgtggggcgccggctgcatcatggccgagatgtggaccagaagccccatcatgcagggcaacaccgagcagcaccagctggccctgatcagccagctgtgcggcagcatcacccccgaggtgtggcccaacgtggacaactacgagctgtacgagaagctggagctggtgaagggccagaagagaaaggtgaaggacagactgaaggcctacgtgagagacccctacgccctggacctgatcgacaagctgctggtgctggaccccgcccagagaatcgacagcgacgacgccctgaaccacgacttcttctggagcgaccccatgcccagcgacctgaagggcatgctgagcacccacctgaccagcatgttcgagtacctggccccccccagaagaaagggcagccagatcacccagcagagcaccaaccagagcagaaaccccgccaccaccaaccagaccgagttcgagagagtgttctag

SEQ ID NO: 10295 - DNA, 1470 bp, synthetic construct
  misc_feature 1..1470: note = Description of Artificial Sequence: Synthetic coding sequence
  source 1..1470: mol_type = other DNA
atgcagagagacgccccccccagagcccccgcccccgcccccagactgcccgccccccccatcggcgccgccgccagcagcggcggcggcggcggcggcggcagcggcggcggcggcggcggcgccagcgccgcccccgccccccccggcctgagcggcaccaccagccccagaggccccggcggcggcagaagagccgaggaggccggcagcgcccccagaggcagaaagtggccctggagaagaaagtggagaggcagaggcggcgcctggagcgccgccgccgccggccccggcgccggcgccgccgccgccgccaccggcggcggcggcggcgccctggaggccgccatggccaagcagtacgacagcgtggagtgccccttctgcgacgaggtgagcaagtacgagaagctggccaagatcggccagggcaccttcggcgaggtgttcaaggccagacacagaaagaccggccagaaggtggccctgaagaaggtgctgatggagaacgagaaggagggcttccccatcaccgccctgagagagatcaagatcctgcagctgctgaagcacgagaacgtggtgaacctgatcgagatctgcagaaccaaggccagcccctacaacagatgcaagggcagcatctacctggtgttcgacttctgcgagcacgacctggccggcctgctgagcaacgtgctggtgaagttcaccctgagcgagatcaagagagtgatgcagatgctgctgaacggcctgtactacatccacagaaacaagatcctgcacagagacatgaaggccgccaacgtgctgatcaccagagacggcgtgctgaagctggccgacttcggcctggccagagccttcagcctggccaagaacagccagcccaacagatacaccaacagagtggtgaccctgtggtacagaccccccgagctgctgctgggcgagagagactacggcccccccatcgacctgtggggcgccggctgcatcatggccgagatgtggaccagaagccccatcatgcagggcaacaccgagcagcaccagctggccctgatcagccagctgtgcggcagcatcacccccgaggtgtggcccaacgtggacaactacgagctgtacgagaagctggagctggtgaagggccagaagagaaaggtgaaggacagactgaaggcctacgtgagagacccctacgccctggacctgatcgacaagctgctggtgctggaccccgcccagagaatcgacagcgacgacgccctgaaccacgacttcttctggagcgaccccatgcccagcgacctgaagggcatgctgagcacccacctgaccagcatgttcgagtacctggccccccccagaagaaagggcagccagatcacccagcagagcaccaaccagagcagaaaccccgccaccaccaaccagaccgagttcgagagagtgttctag

SEQ ID NO: 10296 - DNA, 585 bp, synthetic construct
  misc_feature 1..585: note = Description of Artificial Sequence: Synthetic coding sequence
  source 1..585: mol_type = other DNA
atgcagagagacgccccccccagagcccccgcccccgcccccagactgcccgccccccccatcggcgccgccgccagcagcggcggcggcggcggcggcggcagcggcggcggcggcggcggcgccagcgccgcccccgccccccccggcctgagcggcaccaccagccccagaggccccggcggcggcagaagagccgaggaggccggcagcgcccccagaggcagaaagtggccctggagaagaaagtggagaggcagaggcggcgcctggagcgccgccgccgccggccccggcgccggcgccgccgccgccgccaccggcggcggcggcggcgccctggaggccgccatggccaagcagtacgacagcgtggagtgccccttctgcgacgaggtgagcaagtacgagaagctggccaagatcggccagggcaccttcggcgaggtgttcaaggccagacacagaaagaccggccagaaggtggccctgaagaaggtgctgatggagaacgagaaggagggcttccccatcaccgccctgagagagatcaagatcctgcagctgctgaagcacgagaactag

SEQ ID NO: 10297 - DNA, 495 bp, synthetic construct
  misc_feature 1..495: note = Description of Artificial Sequence: Synthetic coding sequence
  source 1..495: mol_type = other DNA
atgagcgagcccgccggcgacgtgagacagaacccctgcggcagcaaggcctgcagaagactgttcggccccgtggacagcgagcagctgagcagagactgcgacgccctgatggccggctgcatccaggaggccagagagagatggaacttcgacttcgtgaccgagacccccctggagggcgacttcgcctgggagagagtgagaggcctgggcctgcccaagctgtacctgcccaccggccccagaagaggcagagacgagctgggcggcggcagaagacccggcaccagccccgccctgctgcagggcaccgccgaggaggaccacgtggacctgagcctgagctgcaccctggtgcccagaagcggcgagcaggccgagggcagccccggcggccccggcgacagccagggcagaaagagaagacagaccagcatgaccgacttctaccacagcaagagaagactgatcttcagcaagagaaagccctag

SEQ ID NO: 10298 - DNA, 495 bp, synthetic construct; identical to SEQ ID NO: 10297
  misc_feature 1..495: note = Description of Artificial Sequence: Synthetic coding sequence
  source 1..495: mol_type = other DNA

SEQ ID NO: 10299 - DNA, 495 bp, synthetic construct; identical to SEQ ID NO: 10297
  misc_feature 1..495: note = Description of Artificial Sequence: Synthetic coding sequence
  source 1..495: mol_type = other DNA

SEQ ID NO: 10300 - DNA, 597 bp, synthetic construct
  misc_feature 1..597: note = Description of Artificial Sequence: Synthetic coding sequence
  source 1..597: mol_type = other DNA
atgtggggcgtgttcagaagacagaccacccacagcagcaacccccccctgcccggccagcagagctgctgcaaccacagagacttcttctgcagcggcgccatgagcgagcccgccggcgacgtgagacagaacccctgcggcagcaaggcctgcagaagactgttcggccccgtggacagcgagcagctgagcagagactgcgacgccctgatggccggctgcatccaggaggccagagagagatggaacttcgacttcgtgaccgagacccccctggagggcgacttcgcctgggagagagtgagaggcctgggcctgcccaagctgtacctgcccaccggccccagaagaggcagagacgagctgggcggcggcagaagacccggcaccagccccgccctgctgcagggcaccgccgaggaggaccacgtggacctgagcctgagctgcaccctggtgcccagaagcggcgagcaggccgagggcagccccggcggccccggcgacagccagggcagaaagagaagacagaccagcatgaccgacttctaccacagcaagagaagactgatcttcagcaagagaaagccctag

SEQ ID NO: 10301 - DNA, 363 bp, synthetic construct
  misc_feature 1..363: note = Description of Artificial Sequence: Synthetic coding sequence
  source 1..363: mol_type = other DNA
atggacgacagcaaggtggtgggcggcaaggtgaagaagcccggcaagagaggcagaaagcccgccaagatcgacctgaaggccaagctggagagaagcagacagagcgccagagagtgcagagccagaaagaagctgagataccagtacctggaggagctggtgagcagcagagagagagccatctgcgccctgagagaggagctggagatgtacaagcagtggtgcatggccatggaccagggcaagatccccagcgagatcaaggccctgctgaccggcgaggagcagaacaagagccagcagaacagcagcagacacaccaaggccggcaagaccgacgccaacagcaacagctggtag

SEQ ID NO: 10302 - DNA, 444 bp, synthetic construct
  misc_feature 1..444: note = Description of Artificial Sequence: Synthetic coding sequence
  source 1..444: mol_type = other DNA
atggaggaggccagccagagaaagtggaacttcgacttccagaaccacaagcccctggagggcaagtacgagtggcaggaggtggagaagggcagcctgcccgagttctactacagaccccccagaccccccaagggcgcctgcaaggtgcccgcccaggagagccaggacgtgagcggcagcagacccgccgcccccctgatcggcgcccccgccaacagcgaggacacccacctggtggaccccaagaccgaccccagcgacagccagaccggcctggccgagcagtgcgccggcatcagaaagagacccgccaccgacgacagcagcacccagaacaagagagccaacagaaccgaggagaacgtgagcgacggcagccccaacgccggcagcgtggagcagacccccaagaagcccggcctgagaagaagacagacctag

SEQ ID NO: 10303 - DNA, 918 bp, synthetic construct
  misc_feature 1..918: note = Description of Artificial Sequence: Synthetic coding sequence
  source 1..918: mol_type = other DNA
atggagagactggtggccagaggcaccttccccgtgctggtgagaaccagcgcctgcagaagcctgttcggccccgtggaccacgaggagctgagcagagagctgcaggccagactggccgagctgaacgccgaggaccagaacagatgggactacgacttccagcaggacatgcccctgagaggccccggcagactgcagtggaccgaggtggacagcgacagcgtgcccgccttctacagagagaccgtgcaggtgggcagatgcagactgctgctggcccccagacccgtggccgtggccgtggccgtgagcccccccctggagcccgccgccgagagcctggacggcctggaggaggcccccgagcagctgcccagcgtgcccgtgcccgcccccgccagcacccccccccccgtgcccgtgctggcccccgcccccgcccccgcccccgcccccgtggccgcccccgtggccgcccccgtggccgtggccgtgctggcccccgcccccgcccccgcccccgcccccgcccccgcccccgcccccgtggccgcccccgcccccgcccccgcccccgcccccgcccccgcccccgcccccgcccccgcccccgacgccgccccccaggagagcgccgagcagggcgccaaccagggccagagaggccaggagcccctggccgaccagctgcacagcggcatcagcggcagacccgccgccggcaccgccgccgccagcgccaacggcgccgccatcaagaagctgagcggccccctgatcagcgacttcttcgccaagagaaagagaagcgcccccgagaagagcagcggcgacgtgcccgccccctgccccagccccagcgccgcccccggcgtgggcagcgtggagcagacccccagaaagagactgagatag

SEQ ID NO: 10304 - DNA, 951 bp, synthetic construct
  misc_feature 1..951: note = Description of Artificial Sequence: Synthetic coding sequence
  source 1..951: mol_type = other DNA
atgagcgacgccagcctgagaagcaccagcaccatggagagactggtggccagaggcaccttccccgtgctggtgagaaccagcgcctgcagaagcctgttcggccccgtggaccacgaggagctgagcagagagctgcaggccagactggccgagctgaacgccgaggaccagaacagatgggactacgacttccagcaggacatgcccctgagaggccccggcagactgcagtggaccgaggtggacagcgacagcgtgcccgccttctacagagagaccgtgcaggtgggcagatgcagactgctgctggcccccagacccgtggccgtggccgtggccgtgagcccccccctggagcccgccgccgagagcctggacggcctggaggaggcccccgagcagctgcccagcgtgcccgtgcccgcccccgccagcacccccccccccgtgcccgtgctggcccccgcccccgcccccgcccccgcccccgtggccgcccccgtggccgcccccgtggccgtggccgtgctggcccccgcccccgcccccgcccccgcccccgcccccgcccccgcccccgtggccgcccccgcccccgcccccgcccccgcccccgcccccgcccccgcccccgcccccgcccccgacgccgccccccaggagagcgccgagcagggcgccaaccagggccagagaggccaggagcccctggccgaccagctgcacagcggcatcagcggcagacccgccgccggcaccgccgccgccagcgccaacggcgccgccatcaagaagctgagcggccccctgatcagcgacttcttcgccaagagaaagagaagcgcccccgagaagagcagcggcgacgtgcccgccccctgccccagccccagcgccgcccccggcgtgggcagcgtggagcagacccccagaaagagactgagatag

SEQ ID NO: 10305 - DNA, 951 bp, synthetic construct; identical to SEQ ID NO: 10304
  misc_feature 1..951: note = Description of Artificial Sequence: Synthetic coding sequence
  source 1..951: mol_type = other DNA

SEQ ID NO: 10306 - DNA, 918 bp, synthetic construct; identical to SEQ ID NO: 10303
  misc_feature 1..918: note = Description of Artificial Sequence: Synthetic coding sequence
  source 1..918: mol_type = other DNA

SEQ ID NO: 10307 - DNA, 504 bp, synthetic construct
  misc_feature 1..504: note = Description of Artificial Sequence: Synthetic coding sequence
  source 1..504: mol_type = other DNA
atggagcccgccgccggcagcagcatggagcccagcgccgactggctggccaccgccgccgccagaggcagagtggaggaggtgagagccctgctggaggccggcgccctgcccaacgcccccaacagctacggcagaagacccatccaggtgatgatgatgggcagcgccagagtggccgagctgctgctgctgcacggcgccgagcccaactgcgccgaccccgccaccctgaccagacccgtgcacgacgccgccagagagggcttcctggacaccctggtggtgctgcacagagccggcgccagactggacgtgagagacgcctggggcagactgcccgtggacctggccgaggagctgggccacagagacgtggccagatacctgagagccgccgccggcggcaccagaggcagcaaccacgccagaatcgacgccgccgagggccccagcgagatgatcggcaaccacctgtgggtgtgcagaagcagacacgcctag

SEQ ID NO: 10308 - DNA, 471 bp, synthetic construct
  misc_feature 1..471: note = Description of Artificial Sequence: Synthetic coding sequence
  source 1..471: mol_type = other DNA
atggagcccgccgccggcagcagcatggagcccagcgccgactggctggccaccgccgccgccagaggcagagtggaggaggtgagagccctgctggaggccggcgccctgcccaacgcccccaacagctacggcagaagacccatccaggtgatgatgatgggcagcgccagagtggccgagctgctgctgctgcacggcgccgagcccaactgcgccgaccccgccaccctgaccagacccgtgcacgacgccgccagagagggcttcctggacaccctggtggtgctgcacagagccggcgccagactggacgtgagagacgcctggggcagactgcccgtggacctggccgaggagctgggccacagagacgtggccagatacctgagagccgccgccggcggcaccagaggcagcaaccacgccagaatcgacgccgccgagggccccagcgacatccccgactag

SEQ ID NO: 10309 - DNA, 522 bp, synthetic construct
  misc_feature 1..522: note = Description of Artificial Sequence: Synthetic coding sequence
  source 1..522: mol_type = other DNA
atgggcagaggcagatgcgtgggccccagcctgcagctgagaggccaggagtggagatgcagccccctggtgcccaagggcggcgccgccgccgccgagctgggccccggcggcggcgagaacatggtgagaagattcctggtgaccctgagaatcagaagagcctgcggcccccccagagtgagagtgttcgtggtgcacatccccagactgaccggcgagtgggccgcccccggcgcccccgccgccgtggccctggtgctgatgctgctgagaagccagagactgggccagcagcccctgcccagaagacccggccacgacgacggccagagacccagcggcggcgccgccgccgcccccagaagaggcgcccagctgagaagacccagacacagccaccccaccagagccagaagatgccccggcggcctgcccggccacgccggcggcgccgcccccggcagaggcgccgccggcagagccagatgcctgggccccagcgccagaggccccggctag

SEQ ID NO: 10310 - DNA, 504 bp, synthetic construct; identical to SEQ ID NO: 10307
  misc_feature 1..504: note = Description of Artificial Sequence: Synthetic coding sequence
  source 1..504: mol_type = other DNA

SEQ ID NO: 10311 - DNA, 399 bp, synthetic construct
  misc_feature 1..399: note = Description of Artificial Sequence: Synthetic coding sequence
  source 1..399: mol_type = other DNA
atggtgagaagattcctggtgaccctgagaatcagaagagcctgcggcccccccagagtgagagtgttcgtggtgcacatccccagactgaccggcgagtgggccgcccccggcgcccccgccgccgtggccctggtgctgatgctgctgagaagccagagactgggccagcagcccctgcccagaagacccggccacgacgacggccagagacccagcggcggcgccgccgccgcccccagaagaggcgcccagctgagaagacccagacacagccaccccaccagagccagaagatgccccggcggcctgcccggccacgccggcggcgccgcccccggcagaggcgccgccggcagagccagatgcctgggccccagcgccagaggccccggctag

SEQ ID NO: 10312 - DNA, 417 bp, synthetic construct
  misc_feature 1..417: note = Description of Artificial Sequence: Synthetic coding sequence
  source 1..417: mol_type = other DNA
atgagagaggagaacaagggcatgcccagcggcggcggcagcgacgagggcctggccagcgccgccgccagaggcctggtggagaaggtgagacagctgctggaggccggcgccgaccccaacggcgtgaacagattcggcagaagagccatccaggtgatgatgatgggcagcgccagagtggccgagctgctgctgctgcacggcgccgagcccaactgcgccgaccccgccaccctgaccagacccgtgcacgacgccgccagagagggcttcctggacaccctggtggtgctgcacagagccggcgccagactggacgtgagagacgcctggggcagactgcccgtggacctggccgaggagagaggccacagagacgtggccggctacctgagaaccgccaccggcgactag

SEQ ID NO: 10313 - DNA, 237 bp, synthetic construct
  misc_feature 1..237: note = Description of Artificial Sequence: Synthetic coding sequence
  source 1..237: mol_type = other DNA
atgagagaggagaacaagggcatgcccagcggcggcggcagcgacgagggcctggccagcgccgccgccagaggcctggtggagaaggtgagacagctgctggaggccggcgccgaccccaacggcgtgaacagattcggcagaagagccatccaggtggccggcgcccccggccccagaagacagggcgccagagagagaggcgccagacccagaagaatcggcgccggcacctag

SEQ ID NO: 10314 - DNA, 237 bp, synthetic construct; identical to SEQ ID NO: 10313
  misc_feature 1..237: note = Description of Artificial Sequence: Synthetic coding sequence
  source 1..237: mol_type = other DNA

SEQ ID NO: 10315 - DNA, 507 bp, synthetic construct
  misc_feature 1..507: note = Description of Artificial Sequence: Synthetic coding sequence
  source 1..507: mol_type = other DNA
atggccgagccctggggcaacgagctggccagcgccgccgccagaggcgacctggagcagctgaccagcctgctgcagaacaacgtgaacgtgaacgcccagaacggcttcggcagaaccgccctgcaggtgatgaagctgggcaaccccgagatcgccagaagactgctgctgagaggcgccaaccccgacctgaaggacagaaccggcttcgccgtgatccacgacgccgccagagccggcttcctggacaccctgcagaccctgctggagttccaggccgacgtgaacatcgaggacaacgagggcaacctgcccctgcacctggccgccaaggagggccacctgagagtggtggagttcctggtgaagcacaccgccagcaacgtgggccacagaaaccacaagggcgacaccgcctgcgacctggccagactgtacggcagaaacgaggtggtgagcctgatgcaggccaacggcgccggcggcgccaccaacctgcagtag

SEQ ID NO: 10316 - DNA, 507 bp, synthetic construct; identical to SEQ ID NO: 10315
  misc_feature 1..507: note = Description of Artificial Sequence: Synthetic coding sequence
  source 1..507: mol_type = other DNA

SEQ ID NO: 10317 - DNA, 507 bp, synthetic construct; identical to SEQ ID NO: 10315
  misc_feature 1..507: note = Description of Artificial Sequence: Synthetic coding sequence
  source 1..507: mol_type = other DNA

SEQ ID NO: 10318 - DNA, 501 bp, synthetic construct
  misc_feature 1..501: note = Description of Artificial Sequence: Synthetic coding sequence
  source 1..501: mol_type = other DNA
atgctgctggaggaggtgagagccggcgacagactgagcggcgccgccgccagaggcgacgtgcaggaggtgagaagactgctgcacagagagctggtgcaccccgacgccctgaacagattcggcaagaccgccctgcaggtgatgatgttcggcagcaccgccatcgccctggagctgctgaagcagggcgccagccccaacgtgcaggacaccagcggcaccagccccgtgcacgacgccgccagaaccggcttcctggacaccctgaaggtgctggtggagcacggcgccgacgtgaacgtgcccgacggcaccggcgccctgcccatccacctggccgtgcaggagggccacaccgccgtggtgagcttcctggccgccgagagcgacctgcacagaagagacgccagaggcctgacccccctggagctggccctgcagagaggcgcccaggacctggtggacatcctgcagggccacatggtggcccccctgtag

SEQ ID NO: 10319 - DNA, 501 bp, synthetic construct; identical to SEQ ID NO: 10318
  misc_feature 1..501: note = Description of Artificial Sequence: Synthetic coding sequence
  source 1..501: mol_type = other DNA

SEQ ID NO: 10320 - DNA, 639 bp, synthetic construct
  misc_feature 1..639: note = Description of Artificial Sequence: Synthetic coding sequence
  source 1..639: mol_type = other DNA
atgaagccccccagcagcatccagaccagcgagttcgacagcagcgacgaggagcccatcgaggacgagcagacccccatccacatcagctggctgagcctgagcagagtgaactgcagccagttcctgggcctgtgcgccctgcccggctgcaagttcaaggacgtgagaagaaacgtgcagaaggacaccgaggagctgaagagctgcggcatccaggacatcttcgtgttctgcaccagaggcgagctgagcaagtacagagtgcccaacctgctggacctgtaccagcagtgcggcatcatcacccaccaccaccccatcgccgacggcggcacccccgacatcgccagctgctgcgagatcatggaggagctgaccacctgcctgaagaactacagaaagaccctgatccactgctacggcggcctgggcagaagctgcctggtggccgcctgcctgctgctgtacctgagcgacaccatcagccccgagcaggccatcgacagcctgagagacctgagaggcagcggcgccatccagaccatcaagcagtacaactacctgcacgagttcagagacaagctggccgcccacctgagcagcagagacagccagagcagaagcgtgagcagatag

SEQ ID NO: 10321 - DNA, 501 bp, synthetic construct
  misc_feature 1..501: note = Description of Artificial Sequence: Synthetic coding sequence
  source 1..501: mol_type = other DNA
atgaacccctgctgcaagttcaaggacgtgagaagaaacgtgcagaaggacaccgaggagctgaagagctgcggcatccaggacatcttcgtgttctgcaccagaggcgagctgagcaagtacagagtgcccaacctgctggacctgtaccagcagtgcggcatcatcacccaccaccaccccatcgccgacggcggcacccccgacatcgccagctgctgcgagatcatggaggagctgaccacctgcctgaagaactacagaaagaccctgatccactgctacggcggcctgggcagaagctgcctggtggccgcctgcctgctgctgtacctgagcgacaccatcagccccgagcaggccatcgacagcctgagagacctgagaggcagcggcgccatccagaccatcaagcagtacaactacctgcacgagttcagagacaagctggccgcccacctgagcagcagagacagccagagcagaagcgtgagcagatag

SEQ ID NO: 10322 - DNA, 210 bp, synthetic construct
  misc_feature 1..210: note = Description of Artificial Sequence: Synthetic coding sequence
  source 1..210: mol_type = other DNA
atgaagccccccagcagcatccagaccagcgagttcgacagcagcgacgaggagcccatcgaggacgagcagacccccatccacatcagctggctgagcctgagcagagtgaactgcagccagttcctgggcctgtgcgccctgcccggctgcaagttcaaggacgtgagaagaaacgtgcagaaggagaagaagaagaagaagaagtag

SEQ ID NO: 10323 - DNA, 624 bp, synthetic construct
  misc_feature 1..624: note = Description of Artificial Sequence: Synthetic coding sequence
  source 1..624: mol_type = other DNA
atgaagccccccagcagcatccagaccagcgagttcgacagcagcgacgaggagcccatcgaggacgagcagacccccatccacatcagctggctgagcctgagcagagtgaactgcagccagttcctgggcctgtgcgccctgcccggctgcaagttcaaggacgtgagaagaaacgtgcagaaggacaccgaggagctgaagagctgcggcatccaggacatcttcgtgttctgcaccagaggcgagctgagcaagtacagagtgcccaacctgctggacctgtaccagcagtgcggcatcatcacccaccaccaccccatcgccgacggcggcacccccgacatcgccagctgctgcgagatcatggaggagctgaccacctgcctgaagaacctgttctgctacggcggcctgggcagaagctgcctggtggccgcctgcctgctgctgtacctgagcgacaccatcagccccgagcaggccatcgacagcctgagagacctgagaggcagcggcgccatccagaccatcaagcagtacaactacctgcacgagttcagagacaagctggccgcccacctgagcagcagagacagccagagcagaagcgtgagcagatag

SEQ ID NO: 10324 - DNA, 519 bp, synthetic construct
  misc_feature 1..519: note = Description of Artificial Sequence: Synthetic coding sequence
  source 1..519: mol_type = other DNA
atgaagccccccagcagcatccagaccagctgcaagttcaaggacgtgagaagaaacgtgcagaaggacaccgaggagctgaagagctgcggcatccaggacatcttcgtgttctgcaccagaggcgagctgagcaagtacagagtgcccaacctgctggacctgtaccagcagtgcggcatcatcacccaccaccaccccatcgccgacggcggcacccccgacatcgccagctgctgcgagatcatggaggagctgaccacctgcctgaagaactacagaaagaccctgatccactgctacggcggcctgggcagaagctgcctggtggccgcctgcctgctgctgtacctgagcgacaccatcagccccgagcaggccatcgacagcctgagagacctgagaggcagcggcgccatccagaccatcaagcagtacaactacctgcacgagttcagagacaagctggccgcccacctgagcagcagagacagccagagcagaagcgtgagcagatag

SEQ ID NO: 10325 - DNA, 2871 bp, synthetic construct
  misc_feature 1..2871: note = Description of Artificial Sequence: Synthetic coding sequence
  source 1..2871: mol_type = other DNA
atgagcagcggcctgtggagccaggagaaggtgaccagcccctactgggaggagagaatcttctacctgctgctgcaggagtgcagcgtgaccgacaagcagacccagaagctgctgaaggtgcccaagggcagcatcggccagtacatccaggacagaagcgtgggccacagcagaatccccagcgccaagggcaagaagaaccagatcggcctgaagatcctggagcagccccacgccgtgctgttcgtggacgagaaggacgtggtggagatcaacgagaagttcaccgagctgctgctggccatcaccaactgcgaggagagattcagcctgttcaagaacagaaacagactgagcaagggcctgcagatcgacgtgggctgccccgtgaaggtgcagctgagaagcggcgaggagaagttccccggcgtggtgagattcagaggccccctgctggccgagagaaccgtgagcggcatcttcttcggcgtggagctgctggaggagggcagaggccagggcttcaccgacggcgtgtaccagggcaagcagctgttccagtgcgacgaggactgcggcgtgttcgtggccctggacaagctggagctgatcgaggacgacgacaccgccctggagagcgactacgccggccccggcgacaccatgcaggtggagctgccccccctggagatcaacagcagagtgagcctgaaggtgggcgagaccatcgagagcggcaccgtgatcttctgcgacgtgctgcccggcaaggagagcctgggctacttcgtgggcgtggacatggacaaccccatcggcaactgggacggcagattcgacggcgtgcagctgtgcagcttcgcctgcgtggagagcaccatcctgctgcacatcaacgacatcatccccgccctgagcgagagcgtgacccaggagagaagaccccccaagctggccttcatgagcagaggcgtgggcgacaagggcagcagcagccacaacaagcccaaggccaccggcagcaccagcgaccccggcaacagaaacagaagcgagctgttctacaccctgaacggcagcagcgtggacagccagccccagagcaagagcaagaacacctggtacatcgacgaggtggccgaggaccccgccaagagcctgaccgagatcagcaccgacttcgacagaagcagcccccccctgcagcccccccccgtgaacagcctgaccaccgagaacagattccacagcctgcccttcagcctgaccaagatgcccaacaccaacggcagcatcggccacagccccctgagcctgagcgcccagagcgtgatggaggagctgaacaccgcccccgtgcaggagagcccccccctggccatgccccccggcaacagccacggcctggaggtgggcagcctggccgaggtgaaggagaacccccccttctacggcgtgatcagatggatcggccagccccccggcctgaacgaggtgctggccggcctggagctggaggacgagtgcgccggctgcaccgacggcaccttcagaggcaccagatacttcacctgcgccctgaagaaggccctgttcgtgaagctgaagagctgcagacccgacagcagattcgccagcctgcagcccgtgagcaaccagatcgagagatgcaacagcctggccttcggcggctacctgagcgaggtggtggaggagaacaccccccccaagatggagaaggagggcctggagatcatgatcggcaagaagaagggcatccagggccactacaacagctgctacctggacagcaccctgttctgcctgttcgccttcagcagcgtgctggacaccgtgctgctgagacccaaggagaagaacgacgtggagtactacagcgagacccaggagctgctgagaaccgagatcgtgaaccccctgagaatctacggctacgtgtgcgccaccaagatcatgaagctgagaaagatcctggagaaggtggaggccgccagcggcttcaccagcgaggagaaggaccccgaggagttcctgaacatcctgttccaccacatcctgagagtggagcccctgctgaagatcagaagcgccggccagaaggtgcaggactgctacttctaccagatcttcatggagaagaacgagaaggtgggcgtgcccaccatccagcagctgctggagtggagcttcatcaacagcaacctgaagttcgccgaggcccccagctgcctgatcatccagatgcccagattcggcaaggacttcaagctgttcaagaagatcttccccagcctggagctgaacatcaccgacctgctggaggacacccccagacagtgcagaatctgcggcggcctggccatgtacgagtgcagagagtgctacgacgaccccgacatcagcgccggcaagatcaagcagttctgcaagacctgcaacacccaggtgcacctgcaccccaagagactgaaccacaagtacaaccccgtgagcctgcccaaggacctgcccgactgggactggagacacggctgcatcccctgccagaacatggagctgttcgccgtgctgtgcatcgagaccagccactacgtggccttcgtgaagtacggcaaggacgacagcgcctggctgttcttcgacagcatggccgacagagacggcggccagaacggcttcaacatcccccaggtgaccccctgccccgaggtgggcgagtacctgaagatgagcctggaggacctgcacagcctggacagcagaagaatccagggctgcgccagaagactgctgtgcgacgcctacatgtgcatgtaccagagccccaccatgagcctgtacaagtag

SEQ ID NO: 10326 - DNA, 2862 bp, synthetic construct
  misc_feature 1..2862: note = Description of Artificial Sequence: Synthetic coding sequence
  source 1..2862: mol_type = other DNA
atgagcagcggcctgtggagccaggagaaggtgaccagcccctactgggaggagagaatcttctacctgctgctgcaggagtgcagcgtgaccgacaagcagacccagaagctgctgaaggtgcccaagggcagcatcggccagtacatccaggacagaagcgtgggccacagcagaatccccagcgccaagggcaagaagaaccagatcggcctgaagatcctggagcagccccacgccgtgctgttcgtggacgagaaggacgtggtggagatcaacgagaagttcaccgagctgctgctggccatcaccaactgcgaggagagattcagcctgttcaagaacagaaacagactgagcaagggcctgcagatcgacgtgggctgccccgtgaaggtgcagctgagaagcggcgaggagaagttccccggcgtggtgagattcagaggccccctgctggccgagagaaccgtgagcggcatcttcttcggcgtggagctgctggaggagggcagaggccagggcttcaccgacggcgtgtaccagggcaagcagctgttccagtgcgacgaggactgcggcgtgttcgtggccctggacaagctggagctgatcgaggacgacgacaccgccctggagagcgactacgccggccccggcgacaccatgcaggtggagctgccccccctggagatcaacagcagagtgagcctgaaggtgggcgagaccatcgagagcggcaccgtgatcttctgcgacgtgctgcccggcaaggagagcctgggctacttcgtgggcgtggacatggacaaccccatcggcaactgggacggcagattcgacggcgtgcagctgtgcagcttcgcctgcgtggagagcaccatcctgctgcacatcaacgacatcatccccgagagcgtgacccaggagagaagaccccccaagctggccttcatgagcagaggcgtgggcgacaagggcagcagcagccacaacaagcccaaggccaccggcagcaccagcgaccccggcaacagaaacagaagcgagctgttctacaccctgaacggcagcagcgtggacagccagccccagagcaagagcaagaacacctggtacatcgacgaggtggccgaggaccccgccaagagcctgaccgagatcagcaccgacttcgacagaagcagcccccccctgcagcccccccccgtgaacagcctgaccaccgagaacagattccacagcctgcccttcagcctgaccaagatgcccaacaccaacggcagcatcggccacagccccctgagcctgagcgcccagagcgtgatggaggagctgaacaccgcccccgtgcaggagagcccccccctggccatgccccccggcaacagccacggcctggaggtgggcagcctggccgaggtgaaggagaacccccccttctacggcgtgatcagatggatcggccagccccccggcctgaacgaggtgctggccggcctggagctggaggacgagtgcgccggctgcaccgacggcaccttcagaggcaccagatacttcacctgcgccctgaagaaggccctgttcgtgaagctgaagagctgcagacccgacagcagattcgccagcctgcagcccgtgagcaaccagatcgagagatgcaacagcctggccttcggcggctacctgagcgaggtggtggaggagaacaccccccccaagatggagaaggagggcctggagatcatgatcggcaagaagaagggcatccagggccactacaacagctgctacctggacagcaccctgttctgcctgttcgccttcagcagcgtgctggacaccgtgctgctgagacccaaggagaagaacgacgtggagtactacagcgagacccaggagctgctgagaaccgagatcgtgaaccccctgagaatctacggctacgtgtgcgccaccaagatcatgaagctgagaaagatcctggagaaggtggaggccgccagcggcttcaccagcgaggagaaggaccccgaggagttcctgaacatcctgttccaccacatcctgagagtggagcccctgctgaagatcagaagcgccggccagaaggtgcaggactgctacttctaccagatcttcatggagaagaacgagaaggtgggcgtgcccaccatccagcagctgctggagtggagcttcatcaacagcaacctgaagttcgccgaggcccccagctgcctgatcatccagatgcccagattcggcaaggacttcaagctgttcaagaagatcttccccagcctggagctgaacatcaccgacctgctggaggacacccccagacagtgcagaatctgcggcggcctggccatgtacgagtgcagagagtgctacgacgaccccgacatcagcgccggcaagatcaagcagttctgcaagacctgcaacacccaggtgcacctgcaccccaagagactgaaccacaagtacaaccccgtgagcctgcccaaggacctgcccgactgggactggagacacggctgcatcccctgccagaacatggagctgttcgccgtgctgtgcatcgagaccagccactacgtggccttcgtgaagtacggcaaggacgacagcgcctggctgttcttcgacagcatggccgacagagacggcggccagaacggcttcaacatcccccaggtgaccccctgccccgaggtgggcgagtacctgaagatgagcctggaggacctgcacagcctggacagcagaagaatccagggctgcgccagaagactgctgtgcgacgcctacatgtgcatgtaccagagccccaccatgagcctgtacaagtag

SEQ ID NO: 10327 - DNA, 2862 bp, synthetic construct; identical to SEQ ID NO: 10326
  misc_feature 1..2862: note = Description of Artificial Sequence: Synthetic coding sequence
  source 1..2862: mol_type = other DNA

SEQ ID NO: 10328 - DNA, 2871 bp, synthetic construct
  misc_feature 1..2871: note = Description of Artificial Sequence: Synthetic coding sequence
  source 1..2871: mol_type = other DNA
atgagcagcggcctgtggagccaggagaaggtgaccagcccctactgggaggagagaatcttctacctgctgctgcaggagtgcagcgtgaccgacaagcagacccagaagctgctgaaggtgcccaagggcagcatcggccagtacatccaggacagaagcgtgggccacagcagaatccccagcgccaagggcaagaagaaccagatcggcctgaagatcctggagcagccccacgccgtgctgttcgtggacgagaaggacgtggtggagatcaacgagaagttcaccgagctgctgctggccatcaccaactgcgaggagagattcagcctgttcaagaacagaaacagactgagcaagggcctgcagatcgacgtgggctgccccgtgaaggtgcagctgagaagcggcgaggagaagttccccggcgtggtgagattcagaggccccctgctggccgagagaaccgtgagcggcatcttcttcggcgtggagctgctggaggagggcagaggccagggcttcaccgacggcgtgtaccagggcaagcagctgttccagtgcgacgaggactgcggcgtgttcgtggccctggacaagctggagctgatcgaggacgacgacaccgccctggagagcgactacgccggccccggcgacaccatgcaggtggagctgccccccctggagatcaacagcagagtgagcctgaaggtgggcgagaccatcgagagcggcaccgtgatcttctgcgacgtgctgcccggcaaggagagcctgggctacttcgtgggcgtggacatggacaaccccatcggcaactgggacggcagattcgacggcgtgcagctgtgcagcttcgcctgcgtggagagcaccatcctgctgcacatcaacgacatcatccccgccgtgagcgagagcgtgacccaggagagaagaccccccaagctggccttcatgagcagaggcgtgggcgacaagggcagcagcagccacaacaagcccaaggccaccggcagcaccagcgaccccggcaacagaaacagaagcgagctgttctacaccctgaacggcagcagcgtggacagccagccccagagcaagagcaagaacacctggtacatcgacgaggtggccgaggaccccgccaagagcctgaccgagatcagcaccgacttcgacagaagcagcccccccctgcagcccccccccgtgaacagcctgaccaccgagaacagattccacagcctgcccttcagcctgaccaagatgcccaacaccaacggcagcatcggccacagccccctgagcctgagcgcccagagcgtgatggaggagctgaacaccgcccccgtgcaggagagcccccccctggccatgccccccggcaacagccacggcctggaggtgggcagcctggccgaggtgaaggagaacccccccttctacggcgtgatcagatggatcggccagccccccggcctgaacgaggtgctggccggcctggagctggaggacgagtgcgccggctgcaccgacggcaccttcagaggcaccagatacttcacctgcgccctgaagaaggccctgttcgtgaagctgaagagctgcagacccgacagcagattcgccagcctgcagcccgtgagcaaccagatcgagagatgcaacagcctggccttcggcggctacctgagcgaggtggtggaggagaacaccccccccaagatggagaaggagggcctggagatcatgatcggcaagaagaagggcatccagggccactacaacagctgctacctggacagcaccctgttctgcctgttcgccttcagcagcgtgctggacaccgtgctgctgagacccaaggagaagaacgacgtggagtactacagcgagacccaggagctgctgagaaccgagatcgtgaaccccctgagaatctacggctacgtgtgcgccaccaagatcatgaagctgagaaagatcctggagaaggtggaggccgccagcggcttcaccagcgaggagaaggaccccgaggagttcctgaacatcctgttccaccacatcctgagagtggagcccctgctgaagatcagaagcgccggccagaaggtgcaggactgctacttctaccagatcttcatggagaagaacgagaaggtgggcgtgcccaccatccagcagctgctggagtggagcttcatcaacagcaacctgaagttcgccgaggcccccagctgcctgatcatccagatgcccagattcggcaaggacttcaagctgttcaagaagatcttccccagcctggagctgaacatcaccgacctgctggaggacacccccagacagtgcagaatctgcggcggcctggccatgtacgagtgcagagagtgctacgacgaccccgacatcagcgccggcaagatcaagcagttctgcaagacctgcaacacccaggtgcacctgcaccccaagagactgaaccacaagtacaaccccgtgagcctgcccaaggacctgcccgactgggactggagacacggctgcatcccctgccagaacatggagctgttcgccgtgctgtgcatcgagaccagccactacgtggccttcgtgaagtacggcaaggacgacagcgcctggctgttcttcgacagcatggccgacagagacggcggccagaacggcttcaacatcccccaggtgaccccctgccccgaggtgggcgagtacctgaagatgagcctggaggacctgcacagcctggacagcagaagaatccagggctgcgccagaagactgctgtgcgacgcctacatgtgcatgtaccagagccccaccatgagcctgtacaagtag

SEQ ID NO: 10329 - DNA, 450 bp, synthetic construct
  misc_feature 1..450: note = Description of Artificial Sequence: Synthetic coding sequence
  source 1..450: mol_type = other DNA
atggccagaagcaacctgcccctggccctgggcctggccctggtggccttctgcctgctggccctgcccagagacgccagagccagaccccaggagagaatggtgggcgagctgagagacctgagccccgacgacccccaggtgcagaaggccgcccaggccgccgtggccagctacaacatgggcagcaacagcatctactacttcagagacacccacatcatcaaggcccagagccagctggtggccggcatcaagtacttcctgaccatggagatgggcagcaccgactgcagaaagaccagagtgaccggcgaccacgtggacctgaccacctgccccctggccgccggcgcccagcaggagaagctgagatgcgacttcgaggtgctggtggtgccctggcagaacagcagccagctgctgaagcacaactgcgtgcagatgtag

SEQ ID NO: 10330 - DNA, 504 bp, synthetic construct
  misc_feature 1..504: note = Description of Artificial Sequence: Synthetic coding sequence
  source 1..504: mol_type = other DNA
atgctgcccgagaaggccctgcacggccacccccagctgcccagaaccgtgcccaccagagccgccatgagagccgccggcaccctgctggccttctgctgcctggtgctgagcaccaccggcggccccagccccgacacctgcagccaggacctgaacagcagagtgaagcccggcttccccaagaccatcaagaccaacgaccccggcgtgctgcaggccgccagatacagcgtggagaagttcaacaactgcaccaacgacatgttcctgttcaaggagagcagaatcaccagagccctggtgcagatcgtgaagggcctgaagtacatgctggaggtggagatcggcagaaccacctgcaagaagaaccagcacctgagactggacgactgcgacttccagaccaaccacaccctgaagcagaccctgagctgctacagcgaggtgtgggtggtgccctggctgcagcacttcgaggtgcccgtgctgagatgccactag

SEQ ID NO: 10331 - DNA, 438 bp, synthetic construct
  misc_feature 1..438: note = Description of Artificial Sequence: Synthetic coding sequence
  source 1..438: mol_type = other DNA
atgagagccgccggcaccctgctggccttctgctgcctggtgctgagcaccaccggcggccccagccccgacacctgcagccaggacctgaacagcagagtgaagcccggcttccccaagaccatcaagaccaacgaccccggcgtgctgcaggccgccagatacagcgtggagaagttcaacaactgcaccaacgacatgttcctgttcaaggagagcagaatcaccagagccctggtgcagatcgtgaagggcctgaagtacatgctggaggtggagatcggcagaaccacctgcaagaagaaccagcacctgagactggacgactgcgacttccagaccaaccacaccctgaagcagaccctgagctgctacagcgaggtgtgggtggtgccctggctgcagcacttcgaggtgcccgtgctgagatgccactag

SEQ ID NO: 10332 - DNA, 453 bp, synthetic construct
  misc_feature 1..453: note = Description of Artificial Sequence: Synthetic coding sequence
  source 1..453: mol_type = other DNA
atgctgggcgccgccctgagaagatgcgccgtggccgccaccaccagagccgaccccagaggcctgctgcacagcgccagaacccccggccccgccgtggccatccagagcgtgagatgctacagccacggcagccaggagaccgacgaggagttcgacgccagatgggtgacctacttcaacaagcccgacatcgacgcctgggagctgagaaagggcatcaacaccctggtgacctacgacatggtgcccgagcccaagatcatcgacgccgccctgagagcctgcagaagactgaacgacttcgccagcaccgtgagaatcctggaggtggtgaaggacaaggccggcccccacaaggagatctacccctacgtgatccaggagctgagacccaccctgaacgagctgggcatcagcacccccgaggagctgggcctggacaaggtgtag

SEQ ID NO: 10333 - DNA, 318 bp, synthetic construct
  misc_feature 1..318: note = Description of Artificial Sequence: Synthetic coding sequence
  source 1..318: mol_type = other DNA
atgggcgacgtggagaagggcaagaagatcttcatcatgaagtgcagccagtgccacaccgtggagaagggcggcaagcacaagaccggccccaacctgcacggcctgttcggcagaaagaccggccaggcccccggctacagctacaccgccgccaacaagaacaagggcatcatctggggcgaggacaccctgatggagtacctggagaaccccaagaagtacatccccggcaccaagatgatcttcgtgggcatcaagaagaaggaggagagagccgacctgatcgcctacctgaagaaggccaccaacgagtag

SEQ ID NO: 10334 - DNA, 318 bp, synthetic construct; identical to SEQ ID NO: 10333
  misc_feature 1..318: note = Description of Artificial Sequence: Synthetic coding sequence
  source 1..318: mol_type = other DNA

SEQ ID NO: 10335 - DNA, 318 bp, synthetic construct; identical to SEQ ID NO: 10333
  misc_feature 1..318: note = Description of Artificial Sequence: Synthetic coding sequence
  source 1..318: mol_type = other DNA

SEQ ID NO: 10336 - DNA, 306 bp, synthetic construct
  misc_feature 1..306: note = Description of Artificial Sequence: Synthetic coding sequence
  source 1..306: mol_type = other DNA
atgggcgacgtggagaagggcaagaagatcttcatcatgaagtgcagccagtgccacaccgtggagaagggcggcaagcacaagaccggccccaacctgcacggcctgttcggcagaaagaccggccaggcccccggctacagctacaccgccgccaacaagaacaagggcatcatctggggcgaggacaccctgatggagtacctggagaaccccaagaagtacatccccggcaccaagatgatcttcgtgggcatcaagaagaaggaggagagagccgacctgatcgcctacctgaagaagtag

SEQ ID NO: 10337 - DNA, 1632 bp, synthetic construct
  misc_feature 1..1632: note = Description of Artificial Sequence: Synthetic coding sequence
  source 1..1632: mol_type = other DNA
atgggcaccagcctgagccccaacgacccctggcccctgaaccccctgagcatccagcagaccaccctgctgctgctgctgagcgtgctggccaccgtgcacgtgggccagagactgctgagacagagaagaagacagctgagaagcgccccccccggccccttcgcctggcccctgatcggcaacgccgccgccgtgggccaggccgcccacctgagcttcgccagactggccagaagatacggcgacgtgttccagatcagactgggcagctgccccatcgtggtgctgaacggcgagagagccatccaccaggccctggtgcagcagggcagcgccttcgccgacagacccgccttcgccagcttcagagtggtgagcggcggcagaagcatggccttcggccactacagcgagcactggaaggtgcagagaagagccgcccacagcatgatgagaaacttcttcaccagacagcccagaagcagacaggtgctggagggccacgtgctgagcgaggccagagagctggtggccctgctggtgagaggcagcgccgacggcgccttcctggaccccagacccctgaccgtggtggccgtggccaacgtgatgagcgccgtgtgcttcggctgcagatacagccacgacgaccccgagttcagagagctgctgagccacaacgaggagttcggcagaaccgtgggcgccggcagcctggtggacgtgatgccctggctgcagtacttccccaaccccgtgagaaccgtgttcagagagttcgagcagctgaacagaaacttcagcaacttcatcctggacaagttcctgagacactgcgagagcctgagacccggcgccgcccccagagacatgatggacgccttcatcctgagcgccgagaagaaggccgccggcgacagccacggcggcggcgccagactggacctggagaacgtgcccgccaccatcaccgacatcttcggcgccagccaggacaccctgagcaccgccctgcagtggctgctgctgctgttcaccagataccccgacgtgcagaccagagtgcaggccgagctggaccaggtggtgggcagagacagactgccctgcatgggcgaccagcccaacctgccctacgtgctggccttcctgtacgaggccatgagattcagcagcttcgtgcccgtgaccatcccccacgccaccaccgccaacaccagcgtgctgggctaccacatccccaaggacaccgtggtgttcgtgaaccagtggagcgtgaaccacgaccccgtgaagtggcccaaccccgagaacttcgaccccgccagattcctggacaaggacggcctgatcaacaaggacctgaccagcagagtgatgatcttcagcgtgggcaagagaagatgcatcggcgaggagctgagcaagatgcagctgttcctgttcatcagcatcctggcccaccagtgcgacttcagagccaaccccaacgagcccgccaagatgaacttcagctacggcctgaccatcaagcccaagagcttcaaggtgaacgtgaccctgagagagagcatggagctgctggacagcgccgtgcagaacctgcaggccaaggagacctgccagtag

SEQ ID NO: 10338 - DNA, 1632 bp, synthetic construct; identical to SEQ ID NO: 10337
  misc_feature 1..1632: note = Description of Artificial Sequence: Synthetic coding sequence
  source 1..1632: mol_type = other DNA

SEQ ID NO: 10339 - DNA, 3399 bp, synthetic construct
  misc_feature 1..3399: note = Description of Artificial Sequence: Synthetic coding sequence
  source 1..3399: mol_type = other DNA
atggagcccgacagcctgctggaccaggacgacagctacgagagcccccaggagagacccggcagcagaagaagcctgcccggcagcctgagcgagaagagccccagcatggagcccagcgccgccacccccttcagagtgaccggcttcctgagcagaagactgaagggcagcatcaagagaaccaagagccagcccaagctggacagaaaccacagcttcagacacatcctgcccggcttcagaagcgccgccgccgccgccgccgacaacgagagaagccacctgatgcccagactgaaggagagcagaagccacgagagcctgctgagccccagcagcgccgtggaggccctggacctgagcatggaggaggaggtggtgatcaagcccgtgcacagcagcatcctgggccaggactactgcttcgaggtgaccaccagcagcggcagcaagtgcttcagctgcagaagcgccgccgagagagacaagtggatggagaacctgagaagagccgtgcaccccaacaaggacaacagcagaagagtggagcacatcctgaagctgtgggtgatcgaggccaaggacctgcccgccaagaagaagtacctgtgcgagctgtgcctggacgacgtgctgtacgccagaaccaccggcaagctgaagaccgacaacgtgttctggggcgagcacttcgagttccacaacctgccccccctgagaaccgtgaccgtgcacctgtacagagagaccgacaagaagaagaagaaggagagaaacagctacctgggcctggtgagcctgcccgccgccagcgtggccggcagacagttcgtggagaagtggtaccccgtggtgacccccaaccccaagggcggcaagggccccggccccatgatcagaatcaaggccagataccagaccatcaccatcctgcccatggagatgtacaaggagttcgccgagcacatcaccaaccactacctgggcctgtgcgccgccctggagcccatcctgagcgccaagaccaaggaggagatggccagcgccctggtgcacatcctgcagagcaccggcaaggtgaaggacttcctgaccgacctgatgatgagcgaggtggacagatgcggcgacaacgagcacctgatcttcagagagaacaccctggccaccaaggccatcgaggagtacctgaagctggtgggccagaagtacctgcaggacgccctgggcgagttcatcaaggccctgtacgagagcgacgagaactgcgaggtggaccccagcaagtgcagcgccgccgacctgcccgagcaccagggcaacctgaagatgtgctgcgagctggccttctgcaagatcatcaacagctactgcgtgttccccagagagctgaaggaggtgttcgccagctggagacaggagtgcagcagcagaggcagacccgacatcagcgagagactgatcagcgccagcctgttcctgagattcctgtgccccgccatcatgagccccagcctgttcaacctgctgcaggagtaccccgacgacagaaccgccagaaccctgaccctgatcgccaaggtgacccagaacctggccaacttcgccaagttcggcagcaaggaggagtacatgagcttcatgaaccagttcctggagcacgagtggaccaacatgcagagattcctgctggagatcagcaaccccgagaccctgagcaacaccgccggcttcgagggctacatcgacctgggcagagagctgagcagcctgcacagcctgctgtgggaggccgtgagccagctggagcagagcatcgtgagcaagctgggccccctgcccagaatcctgagagacgtgcacaccgccctgagcacccccggcagcggccagctgcccggcaccaacgacctggccagcacccccggcagcggcagcagcagcatcagcgccggcctgcagaagatggtgatcgagaacgacctgagcggcctgatcgacttcaccagactgcccagccccacccccgagaacaaggacctgttcttcgtgaccagaagcagcggcgtgcagcccagccccgccagaagcagcagctacagcgaggccaacgagcccgacctgcagatggccaacggcggcaagagcctgagcatggtggacctgcaggacgccagaaccctggacggcgaggccggcagccccgccggccccgacgtgctgcccaccgacggccaggccgccgccgcccagctggtggccggctggcccgccagagccacccccgtgaacctggccggcctggccaccgtgagaagagccggccagacccccaccacccccggcaccagcgagggcgcccccggcagaccccagctgctggcccccctgagcttccagaaccccgtgtaccagatggccgccggcctgcccctgagccccagaggcctgggcgacagcggcagcgagggccacagcagcctgagcagccacagcaacagcgaggagctggccgccgccgccaagctgggcagcttcagcaccgccgccgaggagctggccagaagacccggcgagctggccagaagacagatgagcctgaccgagaagggcggccagcccaccgtgcccagacagaacagcgccggcccccagagaagaatcgaccagccccccccccccccccccccccccccccccgcccccagaggcagaaccccccccaacctgctgagcaccctgcagtaccccagacccagcagcggcaccctggccagcgccagccccgactgggtgggccccagcaccagactgagacagcagagcagcagcagcaagggcgacagccccgagctgaagcccagagccgtgcacaagcagggccccagccccgtgagccccaacgccctggacagaaccgccgcctggctgctgaccatgaacgcccagctgctggaggacgagggcctgggccccgaccccccccacagagacagactgagaagcaaggacgagctgagccaggccgagaaggacctggccgtgctgcaggacaagctgagaatcagcaccaagaagctggaggagtacgagaccctgttcaagtgccaggaggagaccacccagaagctggtgctggagtaccaggccagactggaggagggcgaggagagactgagaagacagcaggaggacaaggacatccagatgaagggcatcatcagcagactgatgagcgtggaggaggagctgaagaaggaccacgccgagatgcaggccgccgtggacagcaagcagaagatcatcgacgcccaggagaagagaatcgccagcctggacgccgccaacgccagactgatgagcgccctgacccagctgaaggagagcatgcactag

SEQ ID NO: 10340 - DNA, 3198 bp, synthetic construct
  misc_feature 1..3198: note = Description of Artificial Sequence: Synthetic coding sequence
  source 1..3198: mol_type = other DNA
atgcccagactgaaggagagcagaagccacgagagcctgctgagccccagcagcgccgtggaggccctggacctgagcatggaggaggaggtggtgatcaagcccgtgcacagcagcatcctgggccaggactactgcttcgaggtgaccaccagcagcggcagcaagtgcttcagctgcagaagcgccgccgagagagacaagtggatggagaacctgagaagagccgtgcaccccaacaaggacaacagcagaagagtggagcacatcctgaagctgtgggtgatcgaggccaaggacctgcccgccaagaagaagtacctgtgcgagctgtgcctggacgacgtgctgtacgccagaaccaccggcaagctgaagaccgacaacgtgttctggggcgagcacttcgagttccacaacctgccccccctgagaaccgtgaccgtgcacctgtacagagagaccgacaagaagaagaagaaggagagaaacagctacctgggcctggtgagcctgcccgccgccagcgtggccggcagacagttcgtggagaagtggtaccccgtggtgacccccaaccccaagggcggcaagggccccggccccatgatcagaatcaaggccagataccagaccatcaccatcctgcccatggagatgtacaaggagttcgccgagcacatcaccaaccactacctgggcctgtgcgccgccctggagcccatcctgagcgccaagaccaaggaggagatggccagcgccctggtgcacatcctgcagagcaccggcaaggtgaaggacttcctgaccgacctgatgatgagcgaggtggacagatgcggcgacaacgagcacctgatcttcagagagaacaccctggccaccaaggccatcgaggagtacctgaagctggtgggccagaagtacctgcaggacgccctgggcgagttcatcaaggccctgtacgagagcgacgagaactgcgaggtggaccccagcaagtgcagcgccgccgacctgcccgagcaccagggcaacctgaagatgtgctgcgagctggccttctgcaagatcatcaacagctactgcgtgttccccagagagctgaaggaggtgttcgccagctggagacaggagtgcagcagcagaggcagacccgacatcagcgagagactgatcagcgccagcctgttcctgagattcctgtgccccgccatcatgagccccagcctgttcaacctgctgcaggagtaccccgacgacagaaccgccagaaccctgaccctgatcgccaaggtgacccagaacctggccaacttcgccaagttcggcagcaaggaggagtacatgagcttcatgaaccagttcctggagcacgagtggaccaacatgcagagattcctgctggagatcagcaaccccgagaccctgagcaacaccgccggcttcgagggctacatcgacctgggcagagagctgagcagcctgcacagcctgctgtgggaggccgtgagccagctggagcagagcatcgtgagcaagctgggccccctgcccagaatcctgagagacgtgcacaccgccctgagcacccccggcagcggccagctgcccggcaccaacgacctggccagcacccccggcagcggcagcagcagcatcagcgccggcctgcagaagatggtgatcgagaacgacctgagcggcctgatcgacttcaccagactgcccagccccacccccgagaacaaggacctgttcttcgtgaccagaagcagcggcgtgcagcccagccccgccagaagcagcagctacagcgaggccaacgagcccgacctgcagatggccaacggcggcaagagcctgagcatggtggacctgcaggacgccagaaccctggacggcgaggccggcagccccgccggccccgacgtgctgcccaccgacggccaggccgccgccgcccagctggtggccggctggcccgccagagccacccccgtgaacctggccggcctggccaccgtgagaagagccggccagacccccaccacccccggcaccagcgagggcgcccccggcagaccccagctgctggcccccctgagcttccagaaccccgtgtaccagatggccgccggcctgcccctgagccccagaggcctgggcgacagcggcagcgagggccacagcagcctgagcagccacagcaacagcgaggagctggccgccgccgccaagctgggcagcttcagcaccgccgccgaggagctggccagaagacccggcgagctggccagaagacagatgagcctgaccgagaagggcggccagcccaccgtgcccagacagaacagcgccggcccccagagaagaatcgaccagccccccccccccccccccccccccccccccgcccccagaggcagaaccccccccaacctgctgagcaccctgcagtaccccagacccagcagcggcaccctggccagcgccagccccgactgggtgggccccagcaccagactgagacagcagagcagcagcagcaagggcgacagccccgagctgaagcccagagccgtgcacaagcagggccccagccccgtgagccccaacgccctggacagaaccgccgcctggctgctgaccatgaacgcccagctgctggaggacgagggcctgggccccgaccccccccacagagacagactgagaagcaaggacgagctgagccaggccgagaaggacctggccgtgctgcaggacaagctgagaatcagcaccaagaagctggaggagtacgagaccctgttcaagtgccaggaggagaccacccagaagctggtgctggagtaccaggccagactggaggagggcgaggagagactgagaagacagcaggaggacaaggacatccagatgaagggcatcatcagcagactgatgagcgtggaggaggagctgaagaaggaccacgccgagatgcaggccgccgtggacagcaagcagaagatcatcgacgcccaggagaagagaatcgccagcctggacgccgccaacgccagactgatgagcgccctgacccagctgaaggagagatacagcatgcaggccagaaacggcatcagccccaccaaccccaccaagctgcagatcaccgagaacggcgagttcagaaacagcagcaactgctag

SEQ ID NO: 10341 - DNA, 3210 bp, synthetic construct
  misc_feature 1..3210: note = Description of Artificial Sequence: Synthetic coding sequence
  source 1..3210: mol_type = other DNA
agccagcccaagctggacagaaaccacagcttcagacacatcctgcccggcttcagaagcgccgccgccgccgccgccgacaacgagagaagccacctgatgcccagactgaaggagagcagaagccacgagagcctgctgagccccagcagcgccgtggaggccctggacctgagcatggaggaggaggtggtgatcaagcccgtgcacagcagcatcctgggccaggactactgcttcgaggtgaccaccagcagcggcagcaagtgcttcagctgcagaagcgccgccgagagagacaagtggatggagaacctgagaagagccgtgcaccccaacaaggacaacagcagaagagtggagcacatcctgaagctgtgggtgatcgaggccaaggacctgcccgccaagaagaagtacctgtgcgagctgtgcctggacgacgtgctgtacgccagaaccaccggcaagctgaagaccgacaacgtgttctggggcgagcacttcgagttccacaacctgccccccctgagaaccgtgaccgtgcacctgtacagagagaccgacaagaagaagaagaaggagagaaacagctacctgggcctggtgagcctgcccgccgccagcgtggccggcagacagttcgtggagaagtggtaccccgtggtgacccccaaccccaagggcggcaagggccccggccccatgatcagaatcaaggccagataccagaccatcaccatcctgcccatggagatgtacaaggagttcgccgagcacatcaccaaccactacctgggcctgtgcgccgccctggagcccatcctgagcgccaagaccaaggaggagatggccagcgccctggtgcacatcctgcagagcaccggcaaggtgaaggacttcctgaccgacctgatgatgagcgaggtggacagatgcggcgacaacgagcacctgatcttcagagagaacaccctggccaccaaggccatcgaggagtacctgaagctggtgggccagaagtacctgcaggacgccctgggcgagttcatcaaggccctgtacgagagcgacgagaactgcgaggtggaccccagcaagtgcagcgccgccgacctgcccgagcaccagggcaacctgaagatgtgctgcgagctggccttctgcaagatcatcaacagctactgcgtgttccccagagagctgaaggaggtgttcgccagctggagacaggagtgcagcagcagaggcagacccgacatcagcgagagactgatcagcgccagcctgttcctgagattcctgtgccccgccatcatgagccccagcctgttcaacctgctgcaggagtaccccgacgacagaaccgccagaaccctgaccctgatcgccaaggtgacccagaacctggccaacttcgccaagttcggcagcaaggaggagtacatgagcttcatgaaccagttcctggagcacgagtggaccaacatgcagagattcctgctggagatcagcaaccccgagaccctgagcaacaccgccggcttcgagggctacatcgacctgggcagagagctgagcagcctgcacagcctgctgtgggaggccgtgagccagctggagcagagcatcgtgagcaagctgggccccctgcccagaatcctgagagacgtgcacaccgccctgagcacccccggcagcggccagctgcccggcaccaacgacctggccagcacccccggcagcggcagcagcagcatcagcgccggcctgcagaagatggtgatcgagaacgacctgagcggcctgatcgacttcaccagactgcccagccccacccccgagaacaaggacctgttcttcgtgaccagaagcagcggcgtgcagcccagccccgccagaagcagcagctacagcgaggccaacgagcccgacctgcagatggccaacggcggcaagagcctgagcatggtggacctgcaggacgccagaaccctggacggcgaggccggcagccccgccggccccgacgtgctgcccaccgacggccaggccgccgccgcccagctggtggccggctggcccgccagagccacccccgtgaacctggccggcctggccaccgtgagaagagccggccagacccccaccacccccggcaccagcgagggcgcccccggcagaccccagctgctggcccccctgagcttccagaaccccgtgtaccagatggccgccggcctgcccctgagccccagaggcctgggcgacagcggcagcgagggccacagcagcctgagcagccacagcaacagcgaggagctggccgccgccgccaagctgggcagcttcagcaccgccgccgaggagctggccagaagacccggcgagctggccagaagacagatgagcctgaccgagaagggcggccagcccaccgtgcccagacagaacagcgccggcccccagagaagaatcgaccagccccccccccccccccccccccccccccccgcccccagaggcagaaccccccccaacctgctgagcaccctgcagtaccccagacccagcagcggcaccctggccagcgccagccccgactgggtgggccccagcaccagactgagacagcagagcagcagcagcaagggcgacagccccgagctgaagcccagagccgtgcacaagcagggccccagccccgtgagccccaacgccctggacagaaccgccgcctggctgctgaccatgaacgcccagctgctggaggacgagggcctgggccccgaccccccccacagagacagactgagaagcaaggacgagctgagccaggccgagaaggacctggccgtgctgcaggacaagctgagaatcagcaccaagaagctggaggagtacgagaccctgttcaagtgccaggaggagaccacccagaagctggtgctggagtaccaggccagactggaggagggcgaggagagactgagaagacagcaggaggacaaggacatccagatgaagggcatcatcagcagactgatgagcgtggaggaggagctgaagaaggaccacgccgagatgcaggccgccgtggacagcaagcagaagatcatcgacgcccaggagaagagaatcgccagcctggacgccgccaacgccagactgatgagcgccctgacccagctgaaggagagcatgcactag

SEQ ID NO: 10342 - DNA, 876 bp, synthetic construct
  misc_feature 1..876: note = Description of Artificial Sequence: Synthetic coding sequence
  source 1..876: mol_type = other DNA
atggagcccgacagcctgctggaccaggacgacagctacgagagcccccaggagagacccggcagcagaagaagcctgcccggcagcctgagcgagaagagccccagcatggagcccagcgccgccacccccttcagagtgaccggcttcctgagcagaagactgaagggcagcatcaagagaaccaagagccagcccaagctggacagaaaccacagcttcagacacatcctgcccggcttcagaagcgccgccgccgccgccgccgacaacgagagaagccacctgatgcccagactgaaggagagcagaagccacgagagcctgctgagccccagcagcgccgtggaggccctggacctgagcatggaggaggaggtggtgatcaagcccgtgcacagcagcatcctgggccaggactactgcttcgaggtgaccaccagcagcggcagcaagtgcttcagctgcagaagcgccgccgagagagacaagtggatggagaacctgagaagagccgtgcaccccaacaaggacaacagcagaagagtggagcacatcctgaagctgtgggtgatcgaggccaaggacctgcccgccaagaagaagtacctgtgcgagctgtgcctggacgacgtgctgtacgccagaaccaccggcaagctgaagaccgacaacgtgttctggggcgagcacttcgagttccacaacctgccccccctgagaaccgtgaccgtgcacctgtacagagagaccgacaagaagaagaagaaggagagaaacagctacctgggcctggtgagcctgcccgccgccagcgtggccggcagacagttcgtggagaagtggtaccccgtggtgacccccaaccccaagtag

SEQ ID NO: 10343 - DNA, 3570 bp, synthetic construct
  misc_feature 1..3570: note = Description of Artificial Sequence: Synthetic coding sequence
  source 1..3570: mol_type = other DNA
atgagcgccggcggcagcgccagaaagagcaccggcagaagcagctactactacagactgctgagaagacccagactgcagagacagagaagcagaagcagaagcagaaccagacccgccagagagagcccccaggagagacccggcagcagaagaagcctgcccggcagcctgagcgagaagagccccagcatggagcccagcgccgccacccccttcagagtgaccggcttcctgagcagaagactgaagggcagcatcaagagaaccaagagccagcccaagctggacagaaaccacagcttcagacacatcctgcccggcttcagaagcgccgccgccgccgccgccgacaacgagagaagccacctgatgcccagactgaaggagagcagaagccacgagagcctgctgagccccagcagcgccgtggaggccctggacctgagcatggaggaggaggtggtgatcaagcccgtgcacagcagcatcctgggccaggactactgcttcgaggtgaccaccagcagcggcagcaagtgcttcagctgcagaagcgccgccgagagagacaagtggatggagaacctgagaagagccgtgcaccccaacaaggacaacagcagaagagtggagcacatcctgaagctgtgggtgatcgaggccaaggacctgcccgccaagaagaagtacctgtgcgagctgtgcctggacgacgtgctgtacgccagaaccaccggcaagctgaagaccgacaacgtgttctggggcgagcacttcgagttccacaacctgccccccctgagaaccgtgaccgtgcacctgtacagagagaccgacaagaagaagaagaaggagagaaacagctacctgggcctggtgagcctgcccgccgccagcgtggccggcagacagttcgtggagaagtggtaccccgtggtgacccccaaccccaagggcggcaagggccccggccccatgatcagaatcaaggccagataccagaccatcaccatcctgcccatggagatgtacaaggagttcgccgagcacatcaccaaccactacctgggcctgtgcgccgccctggagcccatcctgagcgccaagaccaaggaggagatggccagcgccctggtgcacatcctgcagagcaccggcaaggtgaaggacttcctgaccgacctgatgatgagcgaggtggacagatgcggcgacaacgagcacctgatcttcagagagaacaccctggccaccaaggccatcgaggagtacctgaagctggtgggccagaagtacctgcaggacgccctgggcgagttcatcaaggccctgtacgagagcgacgagaactgcgaggtggaccccagcaagtgcagcgccgccgacctgcccgagcaccagggcaacctgaagatgtgctgcgagctggccttctgcaagatcatcaacagctactgcgtgttccccagagagctgaaggaggtgttcgccagctggagacaggagtgcagcagcagaggcagacccgacatcagcgagagactgatcagcgccagcctgttcctgagattcctgtgccccgccatcatgagccccagcctgttcaacctgctgcaggagtaccccgacgacagaaccgccagaaccctgaccctgatcgccaaggtgacccagaacctggccaacttcgccaagttcggcagcaaggaggagtacatgagcttcatgaaccagttcctggagcacgagtggaccaacatgcagagattcctgctggagatcagcaaccccgagaccctgagcaacaccgccggcttcgagggctacatcgacctgggcagagagctgagcagcctgcacagcctgctgtgggaggccgtgagccagctggagcagagcatcgtgagcaagctgggccccctgcccagaatcctgagagacgtgcacaccgccctgagcacccccggcagcggccagctgcccggcaccaacgacctggccagcacccccggcagcggcagcagcagcatcagcgccggcctgcagaagatggtgatcgagaacgacctgagcggcctgatcgacttcaccagactgcccagccccacccccgagaacaaggacctgttcttcgtgaccagaagcagcggcgtgcagcccagccccgccagaagcagcagctacagcgaggccaacgagcccgacctgcagatggccaacggcggcaagagcctgagcatggtggacctgcaggacgccagaaccctggacggcgaggccggcagccccgccggccccgacgtgctgcccaccgacggccaggccgccgccgcccagctggtggccggctggcccgccagagccacccccgtgaacctggccggcctggccaccgtgagaagagccggccagacccccaccacccccggcaccagcgagggcgcccccggcagaccccagctgctggcccccctgagcttccagaaccccgtgtaccagatggccgccggcctgcccctgagccccagaggcctgggcgacagcggcagcgagggccacagcagcctgagcagccacagcaacagcgaggagctggccgccgccgccaagctgggcagcttcagcaccgccgccgaggagctggccagaagacccggcgagctggccagaagacagatgagcctgaccgagaagggcggccagcccaccgtgcccagacagaacagcgccggcccccagagaagaatcgaccagccccccccccccccccccccccccccccccgcccccagaggcagaaccccccccaacctgctgagcaccctgcagtaccccagacccagcagcggcaccctggccagcgccagccccgactgggtgggccccagcaccagactgagacagcagagcagcagcagcaagggcgacagccccgagctgaagcccagagccgtgcacaagcagggccccagccccgtgagccccaacgccctggacagaaccgccgcctggctgctgaccatgaacgcccagctgctggaggacgagggcctgggccccgaccccccccacagagacagactgagaagcaaggacgagctgagccaggccgagaaggacctggccgtgctgcaggacaagctgagaatcagcaccaagaagctggaggagtacgagaccctgttcaagtgccaggaggagaccacccagaagctggtgctggagtaccaggccagactggaggagggcgaggagagactgagaagacagcaggaggacaaggacatccagatgaagggcatcatcagcagactgatgagcgtggaggaggagctgaagaaggaccacgccgagatgcaggccgccgtggacagcaagcagaagatcatcgacgcccaggagaagagaatcgccagcctggacgccgccaacgccagactgatgagcgccctgacccagctgaaggagagatacagcatgcaggccagaaacggcatcagccccaccaaccccaccaagctgcagatcaccgagaacggcgagttcagaaacagcagcaactgctag

SEQ ID NO: 10344 - DNA, 690 bp, synthetic construct
  misc_feature 1..690: note = Description of Artificial Sequence: Synthetic coding sequence
  source 1..690: mol_type = other DNA
atgcccagactgaaggagagcagaagccacgagagcctgctgagccccagcagcgccgtggaggccctggacctgagcatggaggaggaggtggtgatcaagcccgtgcacagcagcatcctgggccaggactactgcttcgaggtgaccaccagcagcggcagcaagtgcttcagctgcagaagcgccgccgagagagacaagtggatggagaacctgagaagagccgtgcaccccaacaaggacaacagcagaagagtggagcacatcctgaagctgtgggtgatcgaggccaaggacctgcccgccaagaagaagtacctgtgcgagctgtgcctggacgacgtgctgtacgccagaaccaccggcaagctgaagaccgacaacgtgttctggggcgagcacttcgagttccacaacctgccccccctgagaaccgtgaccgtgcacctgtacagagagaccgacaagaagaagaagaaggagagaaacagctacctgggcctggtgagcctgcccgccgccagcgtggccggcagacagttcgtggagaagtggtaccccgtggtgacccccaaccccaagggcggcaagggccccggccccatgatcagaatcaaggccagataccagaccatcaccatcctgcccatggagatgtacaaggagttcgccgagcacatcacctag

SEQ ID NO: 10345 - DNA, 3423 bp, synthetic construct
  misc_feature 1..3423: note = Description of Artificial Sequence: Synthetic coding sequence
  source 1..3423: mol_type = other DNA
atgagctacaactacgtggtgaccgcccagaagcccaccgccgtgaacggctgcgtgaccggccacttcaccagcgccgaggacctgaacctgctgatcgccaagaacaccagactggagatctacgtggtgaccgccgagggcctgagacccgtgaaggaggtgggcatgtacggcaagatcgccgtgatggagctgttcagacccaagggcgagagcaaggacctgctgttcatcctgaccgccaagtacaacgcctgcatcctggagtacaagcagagcggcgagagcatcgacatcatcaccagagcccacggcaacgtgcaggacagaatcggcagacccagcgagaccggcatcatcggcatcatcgaccccgagtgcagaatgatcggcctgagactgtacgacggcctgttcaaggtgatccccctggacagagacaacaaggagctgaaggccttcaacatcagactggaggagctgcacgtgatcgacgtgaagttcctgtacggctgccaggcccccaccatctgcttcgtgtaccaggacccccagggcagacacgtgaagacctacgaggtgagcctgagagagaaggagttcaacaagggcccctggaagcaggagaacgtggaggccgaggccagcatggtgatcgccgtgcccgagcccttcggcggcgccatcatcatcggccaggagagcatcacctaccacaacggcgacaagtacctggccatcgccccccccatcatcaagcagagcaccatcgtgtgccacaacagagtggaccccaacggcagcagatacctgctgggcgacatggagggcagactgttcatgctgctgctggagaaggaggagcagatggacggcaccgtgaccctgaaggacctgagagtggagctgctgggcgagaccagcatcgccgagtgcctgacctacctggacaacggcgtggtgttcgtgggcagcagactgggcgacagccagctggtgaagctgaacgtggacagcaacgagcagggcagctacgtggtggccatggagaccttcaccaacctgggccccatcgtggacatgtgcgtggtggacctggagagacagggccagggccagctggtgacctgcagcggcgccttcaaggagggcagcctgagaatcatcagaaacggcatcggcatccacgagcacgccagcatcgacctgcccggcatcaagggcctgtggcccctgagaagcgaccccaacagagagaccgacgacaccctggtgctgagcttcgtgggccagaccagagtgctgatgctgaacggcgaggaggtggaggagaccgagctgatgggcttcgtggacgaccagcagaccttcttctgcggcaacgtggcccaccagcagctgatccagatcaccagcgccagcgtgagactggtgagccaggagcccaaggccctggtgagcgagtggaaggagccccaggccaagaacatcagcgtggccagctgcaacagcagccaggtggtggtggccgtgggcagagccctgtactacctgcagatccacccccaggagctgagacagatcagccacaccgagatggagcacgaggtggcctgcctggacatcacccccctgggcgacagcaacggcctgagccccctgtgcgccatcggcctgtggaccgacatcagcgccagaatcctgaagctgcccagcttcgagctgctgcacaaggagatgctgggcggcgagatcatccccagaagcatcctgatgaccaccttcgagagcagccactacctgctgtgcgccctgggcgacggcgccctgttctacttcggcctgaacatcgagaccggcctgctgagcgacagaaagaaggtgaccctgggcacccagcccaccgtgctgagaaccttcagaagcctgagcaccaccaacgtgttcgcctgcagcgacagacccaccgtgatctacagcagcaaccacaagctggtgttcagcaacgtgaacctgaaggaggtgaactacatgtgccccctgaacagcgacggctaccccgacagcctggccctggccaacaacagcaccctgaccatcggcaccatcgacgagatccagaagctgcacatcagaaccgtgcccctgtacgagagccccagaaagatctgctaccaggaggtgagccagtgcttcggcgtgctgagcagcagaatcgaggtgcaggacaccagcggcggcaccaccgccctgagacccagcgccagcacccaggccctgagcagcagcgtgagcagcagcaagctgttcagcagcagcaccgccccccacgagaccagcttcggcgaggaggtggaggtgcacaacctgctgatcatcgaccagcacaccttcgaggtgctgcacgcccaccagttcctgcagaacgagtacgccctgagcctggtgagctgcaagctgggcaaggaccccaacacctacttcatcgtgggcaccgccatggtgtaccccgaggaggccgagcccaagcagggcagaatcgtggtgttccagtacagcgacggcaagctgcagaccgtggccgagaaggaggtgaagggcgccgtgtacagcatggtggagttcaacggcaagctgctggccagcatcaacagcaccgtgagactgtacgagtggaccaccgagaaggagctgagaaccgagtgcaaccactacaacaacatcatggccctgtacctgaagaccaagggcgacttcatcctggtgggcgacctgatgagaagcgtgctgctgctggcctacaagcccatggagggcaacttcgaggagatcgccagagacttcaaccccaactggatgagcgccgtggagatcctggacgacgacaacttcctgggcgccgagaacgccttcaacctgttcgtgtgccagaaggacagcgccgccaccaccgacgaggagagacagcacctgcaggaggtgggcctgttccacctgggcgagttcgtgaacgtgttctgccacggcagcctggtgatgcagaacctgggcgagaccagcacccccacccagggcagcgtgctgttcggcaccgtgaacggcatgatcggcctggtgaccagcctgagcgagagctggtacaacctgctgctggacatgcagaacagactgaacaaggtgatcaagagcgtgggcaagatcgagcacagcttctggagaagcttccacaccgagagaaagaccgagcccgccaccggcttcatcgacggcgacctgatcgagagcttcctggacatcagcagacccaagatgcaggaggtggtggccaacctgcagtacgacgacggcagcggcatgaagagagaggccaccgccgacgacctgatcaaggtggtggaggagctgaccagaatccactag

SEQ ID NO: 10346 - DNA, 1356 bp, synthetic construct
  misc_feature 1..1356: note = Description of Artificial Sequence: Synthetic coding sequence
  source 1..1356: mol_type = other DNA
atgagctacaactacgtggtgaccgcccagaagcccaccgccgtgaacggctgcgtgaccggccacttcaccagcgccgaggacctgaacctgctgatcgccaagaacaccagactggagatctacgtggtgaccgccgagggcctgagacccgtgaaggaggtgggcatgtacggcaagatcgccgtgatggagctgttcagacccaaggccctgagcagcagcgtgagcagcagcaagctgttcagcagcagcaccgccccccacgagaccagcttcggcgaggaggtggaggtgcacaacctgctgatcatcgaccagcacaccttcgaggtgctgcacgcccaccagttcctgcagaacgagtacgccctgagcctggtgagctgcaagctgggcaaggaccccaacacctacttcatcgtgggcaccgccatggtgtaccccgaggaggccgagcccaagcagggcagaatcgtggtgttccagtacagcgacggcaagctgcagaccgtggccgagaaggaggtgaagggcgccgtgtacagcatggtggagttcaacggcaagctgctggccagcatcaacagcaccgtgagactgtacgagtggaccaccgagaaggagctgagaaccgagtgcaaccactacaacaacatcatggccctgtacctgaagaccaagggcgacttcatcctggtgggcgacctgatgagaagcgtgctgctgctggcctacaagcccatggagggcaacttcgaggagatcgccagagacttcaaccccaactggatgagcgccgtggagatcctggacgacgacaacttcctgggcgccgagaacgccttcaacctgttcgtgtgccagaaggacagcgccgccaccaccgacgaggagagacagcacctgcaggaggtgggcctgttccacctgggcgagttcgtgaacgtgttctgccacggcagcctggtgatgcagaacctgggcgagaccagcacccccacccagggcagcgtgctgttcggcaccgtgaacggcatgatcggcctggtgaccagcctgagcgagagctggtacaacctgctgctggacatgcagaacagactgaacaaggtgatcaagagcgtgggcaagatcgagcacagcttctggagaagcttccacaccgagagaaagaccgagcccgccaccggcttcatcgacggcgacctgatcgagagcttcctggacatcagcagacccaagatgcaggaggtggtggccaacctgcagtacgacgacggcagcggcatgaagagagaggccaccgccgacgacctgatcaaggtggtggaggagctgaccagaatccactag

SEQ ID NO: 10347 - DNA, 441 bp, synthetic construct
  misc_feature 1..441: note = Description of Artificial Sequence: Synthetic coding sequence
  source 1..441: mol_type = other DNA
atgagctacaactacgtggtgaccgcccagaagcccaccgccgtgaacggctgcgtgaccggccacttcaccagcgccgaggacctgaacctgctgatcgccaagaacaccagactggagatctacgtggtgaccgccgagggcctgagacccgtgaaggaggtgggcatgtacggcaagatcgccgtgatggagctgttcagacccaagggcgagagcaaggacctgctgttcatcctgaccgccaagtacaacgcctgcatcctggagtacaagcagagcggcgagagcatcgacatcatcaccagagcccacggcaacgtgcaggacagaatcggcagacccagcgagaccggcatcatcggcatcatcgaccccgagtgcagaatgatcggcctgagactgtacgacggcctgttcaaggtgatccccctggactag

SEQ ID NO: 10348 - DNA, 330 bp, synthetic construct
  misc_feature 1..330: note = Description of Artificial Sequence: Synthetic coding sequence
  source 1..330: mol_type = other DNA
atgagctacaactacgtggtgaccgcccagaagcccaccgccgtgaacggctgcgtgaccggccacttcaccagcgccgaggacctgaacctgctgatcgccaagaacaccagactggagatctacgtggtgaccgccgagggcctgagacccgtgaaggaggtgggcatgtacggcaagatcgccgtgatggagctgttcagacccaagggcgagagcaaggacctgctgttcatcctgaccgccaagtacaacgcctgcatcctggagtacaagcagagcggcgagagcatcgacatcatcaccagagcccacggcaacgtgcagtag

SEQ ID NO: 10349 - DNA, 1284 bp, synthetic construct
  misc_feature 1..1284: note = Description of Artificial Sequence: Synthetic coding sequence
  source 1..1284: mol_type = other DNA
atggcccccaagaagagacccgagacccagaagaccagcgagatcgtgctgagacccagaaacaagagaagcagaagccccctggagctggagcccgaggccaagaagctgtgcgccaagggcagcggccccagcagaagatgcgacagcgactgcctgtgggtgggcctggccggcccccagatcctgcccccctgcagaagcatcgtgagaaccctgcaccagcacaagctgggcagagccagctggcccagcgtgcagcagggcctgcagcagagcttcctgcacaccctggacagctacagaatcctgcagaaggccgcccccttcgacagaagagccaccagcctggcctggcaccccacccaccccagcaccgtggccgtgggcagcaagggcggcgacatcatgctgtggaacttcggcatcaaggacaagcccaccttcatcaagggcatcggcgccggcggcagcatcaccggcctgaagttcaaccccctgaacaccaaccagttctacgccagcagcatggagggcaccaccagactgcaggacttcaagggcaacatcctgagagtgttcgccagcagcgacaccatcaacatctggttctgcagcctggacgtgagcgccagcagcagaatggtggtgaccggcgacaacgtgggcaacgtgatcctgctgaacatggacggcaaggagctgtggaacctgagaatgcacaagaagaaggtgacccacgtggccctgaacccctgctgcgactggttcctggccaccgccagcgtggaccagaccgtgaagatctgggacctgagacaggtgagaggcaaggccagcttcctgtacagcctgccccacagacaccccgtgaacgccgcctgcttcagccccgacggcgccagactgctgaccaccgaccagaagagcgagatcagagtgtacagcgccagccagtgggactgccccctgggcctgatcccccacccccacagacacttccagcacctgacccccatcaaggccgcctggcaccccagatacaacctgatcgtggtgggcagataccccgaccccaacttcaagagctgcaccccctacgagctgagaaccatcgacgtgttcgacggcaacagcggcaagatgatgtgccagctgtacgaccccgagagcagcggcatcagcagcctgaacgagttcaaccccatgggcgacaccctggccagcgccatgggctaccacatcctgatctggagccaggaggaggccagaaccagaaagtag

SEQ ID NO: 10350 - DNA, 717 bp, synthetic construct
  misc_feature 1..717: note = Description of Artificial Sequence: Synthetic coding sequence
  source 1..717: mol_type = other DNA
atggcccccaagaagagacccgagacccagaagaccagcgagatcgtgctgagacccagaaacaagagaagcagaagccccctggagctggagcccgaggccaagaagctgtgcgccaagggcagcggccccagcagaagatgcgacagcgactgcctgtgggtgggcctggccggcccccagatcctgcccccctgcagaagcatcgtgagaaccctgcaccagcacaagctgggcagagccagctggcccagcgtgcagcagggcctgcagcagagcttcctgcacaccctggacagctacagaatcctgcagaaggccgcccccttcgacagaagagccaccagcctggcctggcaccccacccaccccagcaccgtggccgtgggcagcaagggcggcgacatcatgctgtggaacttcggcatcaaggacaagcccaccttcatcaagggcgccgcctggcaccccagatacaacctgatcgtggtgggcagataccccgaccccaacttcaagagctgcaccccctacgagctgagaaccatcgacgtgttcgacggcaacagcggcaagatgatgtgccagctgtacgaccccgagagcagcggcatcagcagcctgaacgagttcaaccccatgggcgacaccctggccagcgccatgggctaccacatcctgatctggagccaggaggaggccagaaccagaaagtag
